United States Patent Application Publication US 2011/0183924 A1 - sequence listing, part 13

SEQ ID NO: 31176 - DNA, 4089 bp, Homo sapiens
cggacgcgtgggtcgacccacgcgtctcccggaatatggagccctgggcgcgggggcggcgtgtcaggtggttgcggagctggtaagaatcatattctaagaactcagccactcaggtatccaccatggtgctgggtcctgaacagaagatgtcagatgacagtgtttctggagatcatggggagtctgccagtcttggtaacatcaaccctgcctatagtaatccctctctttcacagtcccctggggactcagaggagtacttcgccacttactttaatgagaagatctccattcctgaggaggagtactcttgttttagctttcgtaaactctgggctttcaccggaccaggttttcttatgagcattgcctacctggatccaggaaatattgaatccgatttgcagtctggagcagtggctggatttaagttgctctggatccttctgttggccacccttgtggggctgctgctccagcggcttgcagctagactgggagtggttactgggctgcatcttgctgaagtatgtcaccgtcagtatcccaaggtcccacgagtcatcctgtggctgatggtggagttggctatcatcggctcagacatgcaagaagtcattggctcagccattgctatcaatcttctgtctgtaggaagaattcctctgtggggtggcgttctcatcaccattgcagatacttttgtatttctcttcttggacaaatatggcttgcggaagctagaagcattttttggctttctcatcactattatggccctcacatttggatatgagtatgttacagtgaaacccagccagagccaggtactcaagggcatgttcgtaccatcctgttcaggctgtcgcactccacagattgaacaggctgtgggcatcgtgggagctgtcatcatgccacacaacatgtacctgcattctgccttagtcaagtctagacaggtaaaccggaacaataagcaggaagttcgagaagccaataagtactttttcattgaatcctgcattgcactctttgtttccttcatcatcaatgtctttgttgtctcagtctttgctgaagcattttttgggaaaaccaacgagcaggtggttgaagtctgtacaaataccagcagtcctcatgctggcctctttcctaaagataactcgacactggctgtggacatctacaaagggggtgttgtgctgggatgttactttgggcctgctgcactctacatttgggcagtggggatcctggctgcaggacagagctccaccatgacaggaacctattctggccagtttgtcatggagggattcctgaacctaaagtggtcacgctttgcccgagtggttctgactcgctctattgccatcatccccactctgcttgttgctgtcttccaagatgtagagcatctaacagggatgaatgactttctgaatgttctacagagcttacagcttccctttgctctcatacccatcctcacatttacgagcttgcggccagtaatgagtgactttgccaatggactaggctggcggattgcaggaggaatcttggtccttatcatctgttccatcaatatgtactttgtagtggtttatgtccgggacctagggcatgtggcattatatgtggtggctgctgtggtcagcgtggcttatctgggctttgtgttctacttgggttggcaatgtttgattgcactgggcatgtccttcctggactgtgggcatacggtaagcatctctaaaggcctgctgacagaagaagccacccgtggctacgttaaataacactggattagtctgtcttctgcaggtagccatcagagccagtgtgtttctatggtttactgtgtgaacatagccaaaagtatgtgccgttgcacagactgtgtttatgactcaaccgttggttggaaaagactttgtttcatgtgtatttgaaagatggaattattttttccttcctgacctaaccttagaactggattagggtgggatctttgaaaagctgacatttgctgctatcattccaacactaaattcttaagtagttgcccaagggccagctcagtttatccttcggagagacaaggatatgcatgattcttaaccaggctatatgttaaaaaaaaattggaaaatgcaatacattttttattatacaaactacagaatgagtatgcaagttttatttatcaaaatgtaatggatttttaaaggctgagaaattttccttatacctaccttttcagttattttaattataccaaattatcaactagaatagcttcatccatatgaaatataaaatgaagagacacctagctctatcaggcttaggattctttgaacttatttccactttaatttctcagtggaagttaagaggggtgagaaaacaaagaaggggaaaaactgacaactaacaaaaccagcaccacatcgctaggtggtgcttactaattaccttctcaggattttcctcagattgaaaagcttatgaggatttcttgggagtcttaataacctgcctgttagtacagagctttcctgatgatatttactcttgagcacatgtggttgtaaaaccttaactttctttctccaggagggtggtgatagaaacagatggtagtatttatgaactgatgttctcgtgaaatgttgagggtggggagcagaatcgtcatgtttttctgatgcaccgctctgcttcatgcccaagatgacttgcgaggcaatctcaggagctgtggacttaaccattgcaaagcacactgtctttctcagcgttctctgcaagtcagtaggtgttagtatggttgcaaagttcactgtctcagcaaagttgaactgggctacctctctacagctgtttcctcagagggaaaaatcttgagaccagatggtggagctctggagtcagaggaaatgggtgtcttcagcacaaagctgctgcttttacttcagccacttctgacatttttacataccgagcctgagattgtgtgattatctcaaatcaaatcactttgatggagataaataatcaaaactgttttatagtcattgatttggtgagaacagtaatggaaaatggtgttgaaggacttctcatttttggagctttccttccagagtcctggctgattggtgttcgctgttcatctgagcccccaaaagcattattactgatacttgcacacagtcaaaagcgcagactggatggatggtcttttataaggcatttaagggtacactactgtgtttcactgaccatacatttttcttagcccctcaagtaatatagcacagagttatgaatgacaattcccctaaccattcctcttcatatctgcctcttccccttaccatcgtaattctccaaactggtcataaaggcactctgtgaagatattggggactgacatcttaagctctcacctggctgcagtaggaaaggccaaactgacgacaaaaaaaaaattctttataaagatgatatggtaacatgtatctttgccctgggtctgggtgggtccagtcagtctcagatttacaagcatttaggagcctaggtaaaagctgctagtattcttttaaaagttatatttatgacttgcaatgatagaaaactccttccaattaaatggcattttataatattatgtgtgtacttcacagtgttaaaaataccctcatacgttattgcatttgatcttcacagaaagtgcattttaaccagtactctgggtgcaataaataatatgtagaaatttaagtcctccaattccagcatatccagtgagttttgacagtgtgtttatgtggaatgtttaaggatatacaattgtactttatataaattggttcttgttcttcttaaatgtgacatgaaataattgtgctgctacattatactggaaattaacaggggaaaagggaagagctcttggctcccttgaggttctgctagtggtgttaggagtggttacaactgagcttttagtaaccatttaaccgtatgtaaacttggtttctaattaaaaaaaaatttctttttcca

SEQ ID NO: 31177 - DNA, 4476 bp, Homo sapiens
cggacgcgtgggtcgacccacgcgtctcccggaatatggagccctgggcgcgggggcggcgtgtcaggtggttgcggagctggtaagaatcatattctaagaactcagccactcaggtatccaccatggtgctgggtcctgaacagaagatgtcagatgacagtgtttctggagatcatggggagtctgccagtcttggtaacatcaaccctgcctatagtaatccctctctttcacagtcccctggggactcagaggagtacttcgccacttactttaatgagaagatctccattcctgaggaggagtactcttgttttagctttcgtaaactctgggctttcaccggaccaggttttcttatgagcattgcctacctggatccaggaaatattgaatccgatttgcagtctggagcagtggctggatttaagttgctctggatccttctgttggccacccttgtggggctgctgctccagcggcttgcagctagactgggagtggttactgggctgcatcttgctgaagtatgtcaccgtcagtatcccaaggtcccacgagtcatcctgtggctgatggtggagttggctatcatcggctcagacatgcaagaagtcattggctcagccattgctatcaatcttctgtctgtaggaagaattcctctgtggggtggcgttctcatcaccattgcagatacttttgtatttctcttcttggacaaatatggcttgcggaagctagaagcattttttggctttctcatcactattatggccctcacatttggatatgagtatgttacagtgaaacccagccagagccaggtactcaagggcatgttcgtaccatcctgttcaggctgtcgcactccacagattgaacaggctgtgggcatcgtgggagctgtcatcatgccacacaacatgtacctgcattctgccttagtcaagtctagacaggtaaaccggaacaataagcaggaagttcgagaagccaataagtactttttcattgaatcctgcattgcactctttgtttccttcatcatcaatgtctttgttgtctcagtctttgctgaagcattttttgggaaaaccaacgagcaggtggttgaagtctgtacaaataccagcagtcctcatgctggcctctttcctaaagataactcgacactggctgtggacatctacaaagggggtgttgtgctgggatgttactttgggcctgctgcactctacatttgggcagtggggatcctggctgcaggacagagctccaccatgacaggaacctattctggccagtttgtcatggagggattcctgaacctaaagtggtcacgctttgcccgagtggttctgactcgctctattgccatcatccccactctgcttgttgctgtcttccaagatgtagagcatctaacagggatgaatgactttctgaatgttctacagagcttacagcttccctttgctctcatacccatcctcacatttacgagcttgcggccagtaatgagtgactttgccaatggactaggctggcggattgcaggaggaatcttggtccttatcatctgttccatcaatatgtactttgtagtggtttatgtccgggacctagggcatgtggcattatatgtggtggctgctgtggtcagcgtggcttatctgggctttgtgttctacttgggttggcaatgtttgattgcactgggcatgtccttcctggactgtgggcatacggtaagcatctctaaaggcctgctgacagaagaagccacccgtggctacgttaaataacactggattagtctgtcttctgcaggtagccatcagagccagtgtgtttctatggtttactgtgtgaacatagccaaaagtatgtgccgttgcacagactgtgtttatgactcaaccgttggttggaaaagactttgtttcatgtgtatttgaaagatggaattattttttccttcctgacctaaccttagaactggattagggtgggatctttgaaaagctgacatttgctgctatcattccaacactaaattcttaagtagttgcccaagggccagctcagtttatccttcggagagacaaggatatgcatgattcttaaccaggctatatgttaaaaaaaaattggaaaatgcaatacattttttattatacaaactacagaatgagtatgcaagttttatttatcaaaatgtaatggatttttaaaggctgagaaattttccttatacctaccttttcagttattttaattataccaaattatcaactagaatagcttcatccatatgaaatataaaatgaagagacacctagctctatcaggcttaggattctttgaacttatttccactttaatttctcagtggaagttaagaggggtgagaaaacaaagaaggggaaaaactgacaactaacaaaaccagcaccacatcgctaggtggtgcttactaattaccttctcaggattttcctcagattgaaaagcttatgaggatttcttgggagtcttaataacctgcctgttagtacagagctttcctgatgatatttactcttgagcacatgtggttgtaaaaccttaactttctttctccaggagggtggtgatagaaacagatggtagtatttatgaactgatgttctcgtgaaatgttgagggtggggagaaaagactttaagggaggagagccatctattttgttcctaaagccacctctcagcagaatcgtcatgtttttctgatgcaccgctctgcttcatgcccaagatgacttgcgaggcaatctcaggagctgtggacttaaccattgcaaagcacactgtctttctcagcgttctctgcaagtcagtaggtgttagtatggttgcaaagttcactgtctcagcaaagttgaactgggctacctctctacagctgtttcctcagagggaaaaatcttgagaccagatggtggagctctggagtcagaggaaatgggtgtcttcagcacaaagctgctgcttttacttcagccacttctgacatttttacataccgagcctgagattgtgtgattatctcaaatcaaatcactttgatggagataaataatcaaaactgttttatagtcattgatttggtgagaacagtaatggaaaatggtgttgaaggacttctcatttttggagctttccttccagagtcctggctgattggtgttcgctgttcatctgagcccccaaaagcattattactgatacttgcacacagtcaaaagcgcagactggatggatggtcttttataaggcatttaagggtacactactgtgtttcactgaccatacatttttcttagcccctcaagtaatatagcacagagttatgaatgacaattcccctaaccattcctcttcatatctgcctcttccccttaccatcgtaattctccaaactggtcataaaggcactctgtgaagatattggggactgacatcttaagctctcacctggctgcagtaggaaaggccaaactgacgacaaaaaaaaaattctttataaagatgatatggtaacatgtatctttgccctgggtctgggtgggtccagtcagtctcagatttacaagcatttaggagcctaggtaaaagctgctagtattcttttaaaagttatatttatgacttgcaatgatagaaaactccttccaattaaatggcattttataatattatgtgtgtacttcacagtgttaaaaataccctcatacgttattgcatttgatcttcacagaaagtgcattttaaccagtactctgggtgcaataaataatatgtagaaatttaagtcctccaattccagcatatccagtgagttttgacagtgtgtttatgtggaatgtttaaggatatacaattgtactttatataaattggttcttgttcttcttaaatgtgacatgaaataattgtgctgctacattatactggaaattaacaggggaaaagggaagagctcttggctcccttgaggttctgctagtggtgttaggagtggttacaactgagcttttagtaaccatttaaccgtatgtaaactggttacaactgagcttttagtaaccatttaaccgtatgtaaacttggtttctaattaaaaaaaaatttctttttccaatttggtttcctgggtatttttttaaccttgaaataatttattaatagggttacaacaactttgatacaaaaatactgaaacagcaactaccacctggaatggcacactaagtccacactgttaggattttctccttagaaaggatagagaaataaatggatttagtcctcagaaagcttggattaattgcagataccaggatattaatttccatttacccacttagtcaaatagttttaccatagctaaaggtcacatcattaccatgttgaaacttgggaaaaaaat

SEQ ID NO: 31178 - DNA, 4089 bp, Homo sapiens
cggacgcgtgggtcgacccacgcgtctcccggaatatggagccctgggcgcgggggcggcgtgtcaggtggttgcggagctggtaagaatcatattctaagaactcagccactcaggtatccaccatggtgctgggtcctgaacagaagatgtcagatgacagtgtttctggagatcatggggagtctgccagtcttggtaacatcaaccctgcctatagtaatccctctctttcacagtcccctggggactcagaggagtacttcgccacttactttaatgagaagatctccattcctgaggaggagtactcttgttttagctttcgtaaactctgggctttcaccggaccaggttttcttatgagcattgcctacctggatccaggaaatattgaatccgatttgcagtctggagcagtggctggatttaagttgctctggatccttctgttggccacccttgtggggctgctgctccagcggcttgcagctagactgggagtggttactgggctgcatcttgctgaagtatgtcaccgtcagtatcccaaggtcccacgagtcatcctgtggctgatggtggagttggctatcatcggctcagacatgcaagaagtcattggctcagccattgctatcaatcttctgtctgtaggaagaattcctctgtggggtggcgttctcatcaccattgcagatacttttgtatttctcttcttggacaaatatggcttgcggaagctagaagcattttttggctttctcatcactattatggccctcacatttggatatgagtatgttacagtgaaacccagccagagccaggtactcaagggcatgttcgtaccatcctgttcaggctgtcgcactccacagattgaacaggctgtgggcatcgtgggagctgtcatcatgccacacaacatgtacctgcattctgccttagtcaagtctagacaggtaaaccggaacaataagcaggaagttcgagaagccaataagtactttttcattgaatcctgcattgcactctttgtttccttcatcatcaatgtctttgttgtctcagtctttgctgaagcattttttgggaaaaccaacgagcaggtggttgaagtctgtacaaataccagcagtcctcatgctggcctctttcctaaagataactcgacactggctgtggacatctacaaagggggtgttgtgctgggatgttactttgggcctgctgcactctacatttgggcagtggggatcctggctgcaggacagagctccaccatgacaggaacctattctggccagtttgtcatggagggattcctgaacctaaagtggtcacgctttgcccgagtggttctgactcgctctattgccatcatccccactctgcttgttgctgtcttccaagatgtagagcatctaacagggatgaatgactttctgaatgttctacagagcttacagcttccctttgctctcatacccatcctcacatttacgagcttgcggccagtaatgagtgactttgccaatggactaggctggcggattgcaggaggaatcttggtccttatcatctgttccatcaatatgtactttgtagtggtttatgtccgggacctagggcatgtggcattatatgtggtggctgctgtggtcagcgtggcttatctgggctttgtgttctacttgggttggcaatgtttgattgcactgggcatgtccttcctggactgtgggcatacggtaagcatctctaaaggcctgctgacagaagaagccacccgtggctacgttaaataacactggattagtctgtcttctgcaggtagccatcagagccagtgtgtttctatggtttactgtgtgaacatagccaaaagtatgtgccgttgcacagactgtgtttatgactcaaccgttggttggaaaagactttgtttcatgtgtatttgaaagatggaattattttttccttcctgacctaaccttagaactggattagggtgggatctttgaaaagctgacatttgctgctatcattccaacactaaattcttaagtagttgcccaagggccagctcagtttatccttcggagagacaaggatatgcatgattcttaaccaggctatatgttaaaaaaaaattggaaaatgcaatacattttttattatacaaactacagaatgagtatgcaagttttatttatcaaaatgtaatggatttttaaaggctgagaaattttccttatacctaccttttcagttattttaattataccaaattatcaactagaatagcttcatccatatgaaatataaaatgaagagacacctagctctatcaggcttaggattctttgaacttatttccactttaatttctcagtggaagttaagaggggtgagaaaacaaagaaggggaaaaactgacaactaacaaaaccagcaccacatcgctaggtggtgcttactaattaccttctcaggattttcctcagattgaaaagcttatgaggatttcttgggagtcttaataacctgcctgttagtacagagctttcctgatgatatttactcttgagcacatgtggttgtaaaaccttaactttctttctccaggagggtggtgatagaaacagatggtagtatttatgaactgatgttctcgtgaaatgttgagggtggggagaaaagactttaagggaggagagccatctattttgttcctaaagccacctctcagcagaatcgtcatgtttttctgatgcaccgctctgcttcatgcccaagatgacttgcgaggcaatctcaggagctgtggacttaaccattgcaaagcacactgtctttctcagcgttctctgcaagtcagtaggtgttagtatggttgcaaagttcactgtctcagcaaagttgaactgggctacctctctacagctgtttcctcagagggaaaaatcttgagaccagatggtggagctctggagtcagaggaaatgggtgtcttcagcacaaagctgctgcttttacttcagccacttctgacatttttacataccgagcctgagattgtgtgattatctcaaatcaaatcactttgatggagataaataatcaaaactgttttatagtcattgatttggtgagaacagtaatggaaaatggtgttcgctgttcatctgagcccccaaaagcattattactgatacttgcacacagtcaaaagcgcagactggatggatggtcttttataaggcatttaagggtacactactgtgtttcactgaccatacatttttcttagcccctcaagtaatatagcacagagttatgaatgacaattcccctaaccattcctcttcatatctgcctcttccccttaccatcgtaattctccaaactggtcataaaggcactctgtgaagatattggggactgacatcttaagctctcacctggctgcagtaggaaaggccaaactgacgacaaaaaaaaaattctttataaagatgatatggtaacatgtatctttgccctgggtctgggtgggtccagtcagtctcagatttacaagcatttaggagcctaggtaaaagctgctagtattcttttaaaagttatatttatgacttgcaatgatagaaaactccttccaattaaatggcattttataatattatgtgtgtacttcacagtgttaaaaataccctcatacgttattgcatttgatcttcacagaaagtgcattttaaccagtactctgggtgcaataaataatatgtagaaatttaagtcctccaattccagcatatccagtgagttttgacagtgtgtttatgtggaatgtttaaggatatacaattgtactttatataaattggttcttgttcttcttaaatgtgacatgaaataattgtgctgctacattatactggaaattaacaggggaaaagggaagagctcttggctcccttgaggttctgctagtggtgttaggagtggttacaactgagcttttagtaaccatttaaccgtatgtaaacttggtttctaattaaaaaaaaatttctttttcca

SEQ ID NO: 31179 - DNA, 4100 bp, Homo sapiens
tgcttggtggttttgctgcagcttcagagtttagcctgaactgtggcaggattttgtaacttgcacattttttgagaagtctgatggaggtataatgtccacggtcgattctttgaacagtgtttctggagatcatggggagtctgccagtcttggtaacatcaaccctgcctatagtaatccctctctttcacagtcccctggggactcagaggagtacttcgccacttactttaatgagaagatctccattcctgaggaggagtactcttgttttagctttcgtaaactctgggctttcaccggaccaggttttcttatgagcattgcctacctggatccaggaaatattgaatccgatttgcagtctggagcagtggctggatttaagttgctctggatccttctgttggccacccttgtggggctgctgctccagcggcttgcagctagactgggagtggttactgggctgcatcttgctgaagtatgtcaccgtcagtatcccaaggtcccacgagtcatcctgtggctgatggtggagttggctatcatcggctcagacatgcaagaagtcattggctcagccattgctatcaatcttctgtctgtaggaagaattcctctgtggggtggcgttctcatcaccattgcagatacttttgtatttctcttcttggacaaatatggcttgcggaagctagaagcattttttggctttctcatcactattatggccctcacatttggatatgagtatgttacagtgaaacccagccagagccaggtactcaagggcatgttcgtaccatcctgttcaggctgtcgcactccacagattgaacaggctgtgggcatcgtgggagctgtcatcatgccacacaacatgtacctgcattctgccttagtcaagtctagacaggtaaaccggaacaataagcaggaagttcgagaagccaataagtactttttcattgaatcctgcattgcactctttgtttccttcatcatcaatgtctttgttgtctcagtctttgctgaagcattttttgggaaaaccaacgagcaggtggttgaagtctgtacaaataccagcagtcctcatgctggcctctttcctaaagataactcgacactggctgtggacatctacaaagggggtgttgtgctgggatgttactttgggcctgctgcactctacatttgggcagtggggatcctggctgcaggacagagctccaccatgacaggaacctattctggccagtttgtcatggagggattcctgaacctaaagtggtcacgctttgcccgagtggttctgactcgctctattgccatcatccccactctgcttgttgctgtcttccaagatgtagagcatctaacagggatgaatgactttctgaatgttctacagagcttacagcttccctttgctctcatacccatcctcacatttacgagcttgcggccagtaatgagtgactttgccaatggactaggctggcggattgcaggaggaatcttggtccttatcatctgttccatcaatatgtactttgtagtggtttatgtccgggacctagggcatgtggcattatatgtggtggctgctgtggtcagcgtggcttatctgggctttgtgttctacttgggttggcaatgtttgattgcactgggcatgtccttcctggactgtgggcatacggtaagcatctctaaaggcctgctgacagaagaagccacccgtggctacgttaaataacactggattagtctgtcttctgcaggtagccatcagagccagtgtgtttctatggtttactgtgtgaacatagccaaaagtatgtgccgttgcacagactgtgtttatgactcaaccgttggttggaaaagactttgtttcatgtgtatttgaaagatggaattattttttccttcctgacctaaccttagaactggattagggtgggatctttgaaaagctgacatttgctgctatcattccaacactaaattcttaagtagttgcccaagggccagctcagtttatccttcggagagacaaggatatgcatgattcttaaccaggctatatgttaaaaaaaaattggaaaatgcaatacattttttattatacaaactacagaatgagtatgcaagttttatttatcaaaatgtaatggatttttaaaggctgagaaattttccttatacctaccttttcagttattttaattataccaaattatcaactagaatagcttcatccatatgaaatataaaatgaagagacacctagctctatcaggcttaggattctttgaacttatttccactttaatttctcagtggaagttaagaggggtgagaaaacaaagaaggggaaaaactgacaactaacaaaaccagcaccacatcgctaggtggtgcttactaattaccttctcaggattttcctcagattgaaaagcttatgaggatttcttgggagtcttaataacctgcctgttagtacagagctttcctgatgatatttactcttgagcacatgtggttgtaaaaccttaactttctttctccaggagggtggtgatagaaacagatggtagtatttatgaactgatgttctcgtgaaatgttgagggtggggagaaaagactttaagggaggagagccatctattttgttcctaaagccacctctcagcagaatcgtcatgtttttctgatgcaccgctctgcttcatgcccaagatgacttgcgaggcaatctcaggagctgtggacttaaccattgcaaagcacactgtctttctcagcgttctctgcaagtcagtaggtgttagtatggttgcaaagttcactgtctcagcaaagttgaactgggctacctctctacagctgtttcctcagagggaaaaatcttgagaccagatggtggagctctggagtcagaggaaatgggtgtcttcagcacaaagctgctgcttttacttcagccacttctgacatttttacataccgagcctgagattgtgtgattatctcaaatcaaatcactttgatggagataaataatcaaaactgttttatagtcattgatttggtgagaacagtaatggaaaatggtgttgaaggacttctcatttttggagctttccttccagagtcctggctgattggtgttcgctgttcatctgagcccccaaaagcattattactgatacttgcacacagtcaaaagcgcagactggatggatggtcttttataaggcatttaagggtacactactgtgtttcactgaccatacatttttcttagcccctcaagtaatatagcacagagttatgaatgacaattcccctaaccattcctcttcatatctgcctcttccccttaccatcgtaattctccaaactggtcataaaggcactctgtgaagatattggggactgacatcttaagctctcacctggctgcagtaggaaaggccaaactgacgacaaaaaaaaaattctttataaagatgatatggtaacatgtatctttgccctgggtctgggtgggtccagtcagtctcagatttacaagcatttaggagcctaggtaaaagctgctagtattcttttaaaagttatatttatgacttgcaatgatagaaaactccttccaattaaatggcattttataatattatgtgtgtacttcacagtgttaaaaataccctcatacgttattgcatttgatcttcacagaaagtgcattttaaccagtactctgggtgcaataaataatatgtagaaatttaagtcctccaattccagcatatccagtgagttttgacagtgtgtttatgtggaatgtttaaggatatacaattgtactttatataaattggttcttgttcttcttaaatgtgacatgaaataattgtgctgctacattatactggaaattaacaggggaaaagggaagagctcttggctcccttgaggttctgctagtggtgttaggagtggttacaactgagcttttagtaaccatttaaccgtatgtaaacttggtttctaattaaaaaaaaatttctttttcca

SEQ ID NO: 31180 - DNA, 3938 bp, Homo sapiens
cggacgcgtgggtcgacccacgcgtctcccggaatatggagccctgggcgcgggggcggcgtgtcaggtggttgcggagctggtaagaatcatattctaagaactcagccactcaggtatccaccatggtgctgggtcctgaacagaagatgtcagatgacagtgtttctggagatcatggggagtctgccagtcttggtaacatcaaccctgcctatagtaatccctctctttcacagtcccctggggactcagaggagtacttcgccacttactttaatgagaagatctccattcctgaggaggagtactcttgttttagctttcgtaaactctgggctttcaccggaccaggttttcttatgagcattgcctacctggatccaggaaatattgaatccgatttgcagtctggagcagtggctggatttaagttgctctggatccttctgttggccacccttgtggggctgctgctccagcggcttgcagctagactgggagtggttactgggctgcatcttgctgaagtatgtcaccgtcagtatcccaaggtcccacgagtcatcctgtggctgatggtggagttggctatcatcggctcagacatgcaagaagtcattggctcagccattgctatcaatcttctgtctgtaggaagaattcctctgtggggtggcgttctcatcaccattgcagatacttttgtatttctcttcttggacaaatatggcttgcggaagctagaagcattttttggctttctcatcactattatggccctcacatttggatatgagtatgttacagtgaaacccagccagagccaggtactcaagggcatgttcgtaccatcctgttcaggctgtcgcactccacagattgaacaggctgtgggcatcgtgggagctgtcatcatgccacacaacatgtacctgcattctgccttagtcaagtctagacaggtaaaccggaacaataagcaggaagttcgagaagccaataagtactttttcattgaatcctgcattgcactctttgtttccttcatcatcaatgtctttgttgtctcagtctttgctgaagcattttttgggaaaaccaacgagcaggtggttgaagtctgtacaaataccagcagtcctcatgctggcctctttcctaaagataactcgacactggctgtggacatctacaaagggggtgttgtgctgggatgttactttgggcctgctgcactctacatttgggcagtggggatcctggctgcaggacagagctccaccatgacaggaacctattctggccagtttgtcatggagggattcctgaacctaaagtggtcacgctttgcccgagtggttctgactcgctctattgccatcatccccactctgcttgttgctgtcttccaagatgtagagcatctaacagggatgaatgactttctgaatgttctacagagcttacagcttccctttgctctcatacccatcctcacatttacgagcttgcggccagtaatgagtgactttgccaatggactaggctggcggattgcaggaggaatcttggtccttatcatctgttccatcaatatgtactttgtagtggtttatgtccgggacctagggcatgtggcattatatgtggtggctgctgtggtcagcgtggcttatctgggctttgtgttctacttgggttggcaatgtttgattgcactgggcatgtccttcctggactgtgggcatacggtaagcatctctaaaggcctgctgacagaagaagccacccgtggctacgttaaataacactggattagtctgtcttctgcaggtagccatcagagccagtgtgtttctatggtttactgtgtgaacatagccaaaagtatgtgccgttgcacagactgtgtttatgactcaaccgttggttggaaaagactttgtttcatgtgtatttgaaagatggaattattttttccttcctgacctaaccttagaactggattagggtgggatctttgaaaagctgacatttgctgctatcattccaacactaaattcttaagtagttgcccaagggccagctcagtttatccttcggagagacaaggatatgcatgattcttaaccaggctatatgttaaaaaaaaattggaaaatgcaatacattttttattatacaaactacagaatgagtatgcaagttttatttatcaaaatgtaatggatttttaaaggctgagaaattttccttatacctaccttttcagttattttaattataccaaattatcaactagaatagcttcatccatatgaaatataaaatgaagagacacctagctctatcaggcttaggattctttgaacttatttccactttaatttctcagtggaagttaagaggggtgagaaaacaaagaaggggaaaaactgacaactaacaaaaccagcaccacatcgctaggtggtgcttactaattaccttctcaggattttcctcagattgaaaagcttatgaggatttcttgggagtcttaataacctgcctgttagtacagagctttcctgatgatatttactcttgagcacatgtggttgtaaaaccttaactttctttctccaggagggtggtgatagaaacagatggtagtatttatgaactgatgttctcgtgaaatgttgagggtggggagaaaagactttaagggaggagagccatctattttgttcctaaagccacctctcagcagaatcgtcatgtttttctgatgcaccgctctgcttcatgcccaagatgacttgcgaggcaatctcaggagctgtggacttaaccattgcaaagcacactgtctttctcagcgttctctgcaagtcagtaggtgttagtatggttgcaaagttcactgtctcagcaaagttgaactgggctacctctctacagctgtttcctcagagggaaaaatcttgagaccagatggtggagctctggagtcagaggaaatgggtgtcttcagcacaaagctgctgcttttacttcagccacttctgacatttttacataccgagcctgagattgtgtgattatctcaaatcaaatcactttgatggagataaataatcaaaactgttttatagtcattgatttggtgagaacagtaatggaaaatggtgttgaaggacttctcatttttggagctttccttccagagtcctggctgattggtgttcgctgttcatctgagcccccaaaagcattattactgatacttgcacacagtcaaaagcgcagactggatggatggtcttttataagtaaccagtactctgggtgcaataaataatatgtagaaatttaagtcctccaattccagcatatccagtgagttttgacagtgtgtttatgtggaatgtttaaggatatacaattgtactttatataaattggttcttgttcttcttaaatgtgacatgaaataattgtgctgctacattatactggaaattaacaggggaaaagggaagagctcttggctcccttgaggttctgctagtggtgttaggagtggttacaactgagcttttagtaaccatttaaccgtatgtaaacttggtttctaattaaaaaaaaatttctttttccaatttggtttcctgggtatttttttaaccttgaaataatttattaatagggttacaacaactttgatacaaaaatactgaaacagcaactaccacctggaatggcacactaagtccacactgttaggattttctccttagaaaggatagagaaataaatggatttagtcctcagaaagcttggattaattgcagataccaggatattaatttccatttacccacttagtcaaatagttttaccatagctaaaggtcacatcattaccatgttgaaacttgggaaaaaaat

SEQ ID NO: 31181 - DNA, 4404 bp, Homo sapiens
tctgttttaatgctggtcatttgtgtctgaattccaaagggacgggagtataatgaggtttgtctgacccctccctcccatcatggcctgaactagtttttcaggttttctttggaatgcccttggtcaagaagaggatccgttcagttggttgggggagcttagaattttatttttgtttgctctcctcagtgtcccaagtagttggactataggcacacaccacacagcaccacacctggcttgtttcctttttaaaatggtggctcttgtcctttttgggaagtgtttgggcacagaggtactgatactgttattctggttttagaataagaggctgatggaacctgcaggtaagggaagagctttgacttggacagagaagtggccagcttcttaataaaaagtgggtaagatggaggtgaaacttggacacatgcaatatctgacattgtaaatccttttttcttgtgaggctggattttgttgcttcatatgtgataacagaccaattatatcagtagttcaatggtgatgttcagtttaatctcttttcctctcttgtacagtactcttgttttagctttcgtaaactctgggctttcaccggaccaggttttcttatgagcattgcctacctggatccaggaaatattgaatccgatttgcagtctggagcagtggctggatttaagttgctctggatccttctgttggccacccttgtggggctgctgctccagcggcttgcagctagactgggagtggttactgggctgcatcttgctgaagtatgtcaccgtcagtatcccaaggtcccacgagtcatcctgtggctgatggtggagttggctatcatcggctcagacatgcaagaagtcattggctcagccattgctatcaatcttctgtctgtaggaagaattcctctgtggggtggcgttctcatcaccattgcagatacttttgtatttctcttcttggacaaatatggcttgcggaagctagaagcattttttggctttctcatcactattatggccctcacatttggatatgagtatgttacagtgaaacccagccagagccaggtactcaagggcatgttcgtaccatcctgttcaggctgtcgcactccacagattgaacaggctgtgggcatcgtgggagctgtcatcatgccacacaacatgtacctgcattctgccttagtcaagtctagacaggtaaaccggaacaataagcaggaagttcgagaagccaataagtactttttcattgaatcctgcattgcactctttgtttccttcatcatcaatgtctttgttgtctcagtctttgctgaagcattttttgggaaaaccaacgagcaggtggttgaagtctgtacaaataccagcagtcctcatgctggcctctttcctaaagataactcgacactggctgtggacatctacaaagggggtgttgtgctgggatgttactttgggcctgctgcactctacatttgggcagtggggatcctggctgcaggacagagctccaccatgacaggaacctattctggccagtttgtcatggagggattcctgaacctaaagtggtcacgctttgcccgagtggttctgactcgctctattgccatcatccccactctgcttgttgctgtcttccaagatgtagagcatctaacagggatgaatgactttctgaatgttctacagagcttacagcttccctttgctctcatacccatcctcacatttacgagcttgcggccagtaatgagtgactttgccaatggactaggctggcggattgcaggaggaatcttggtccttatcatctgttccatcaatatgtactttgtagtggtttatgtccgggacctagggcatgtggcattatatgtggtggctgctgtggtcagcgtggcttatctgggctttgtgttctacttgggttggcaatgtttgattgcactgggcatgtccttcctggactgtgggcatacggtaagcatctctaaaggcctgctgacagaagaagccacccgtggctacgttaaataacactggattagtctgtcttctgcaggtagccatcagagccagtgtgtttctatggtttactgtgtgaacatagccaaaagtatgtgccgttgcacagactgtgtttatgactcaaccgttggttggaaaagactttgtttcatgtgtatttgaaagatggaattattttttccttcctgacctaaccttagaactggattagggtgggatctttgaaaagctgacatttgctgctatcattccaacactaaattcttaagtagttgcccaagggccagctcagtttatccttcggagagacaaggatatgcatgattcttaaccaggctatatgttaaaaaaaaattggaaaatgcaatacattttttattatacaaactacagaatgagtatgcaagttttatttatcaaaatgtaatggatttttaaaggctgagaaattttccttatacctaccttttcagttattttaattataccaaattatcaactagaatagcttcatccatatgaaatataaaatgaagagacacctagctctatcaggcttaggattctttgaacttatttccactttaatttctcagtggaagttaagaggggtgagaaaacaaagaaggggaaaaactgacaactaacaaaaccagcaccacatcgctaggtggtgcttactaattaccttctcaggattttcctcagattgaaaagcttatgaggatttcttgggagtcttaataacctgcctgttagtacagagctttcctgatgatatttactcttgagcacatgtggttgtaaaaccttaactttctttctccaggagggtggtgatagaaacagatggtagtatttatgaactgatgttctcgtgaaatgttgagggtggggagaaaagactttaagggaggagagccatctattttgttcctaaagccacctctcagcagaatcgtcatgtttttctgatgcaccgctctgcttcatgcccaagatgacttgcgaggcaatctcaggagctgtggacttaaccattgcaaagcacactgtctttctcagcgttctctgcaagtcagtaggtgttagtatggttgcaaagttcactgtctcagcaaagttgaactgggctacctctctacagctgtttcctcagagggaaaaatcttgagaccagatggtggagctctggagtcagaggaaatgggtgtcttcagcacaaagctgctgcttttacttcagccacttctgacatttttacataccgagcctgagattgtgtgattatctcaaatcaaatcactttgatggagataaataatcaaaactgttttatagtcattgatttggtgagaacagtaatggaaaatggtgttgaaggacttctcatttttggagctttccttccagagtcctggctgattggtgttcgctgttcatctgagcccccaaaagcattattactgatacttgcacacagtcaaaagcgcagactggatggatggtcttttataaggcatttaagggtacactactgtgtttcactgaccatacatttttcttagcccctcaagtaatatagcacagagttatgaatgacaattcccctaaccattcctcttcatatctgcctcttccccttaccatcgtaattctccaaactggtcataaaggcactctgtgaagatattggggactgacatcttaagctctcacctggctgcagtaggaaaggccaaactgacgacaaaaaaaaaattctttataaagatgatatggtaacatgtatctttgccctgggtctgggtgggtccagtcagtctcagatttacaagcatttaggagcctaggtaaaagctgctagtattcttttaaaagttatatttatgacttgcaatgatagaaaactccttccaattaaatggcattttataatattatgtgtgtacttcacagtgttaaaaataccctcatacgttattgcatttgatcttcacagaaagtgcattttaaccagtactctgggtgcaataaataatatgtagaaatttaagtcctccaattccagcatatccagtgagttttgacagtgtgtttatgtggaatgtttaaggatatacaattgtactttatataaattggttcttgttcttcttaaatgtgacatgaaataattgtgctgctacattatactggaaattaacaggggaaaagggaagagctcttggctcccttgaggttctgctagtggtgttaggagtggttacaactgagcttttagtaaccatttaaccgtatgtaaacttggtttctaattaaaaaaaaatttctttttcca

SEQ ID NO: 31182 - DNA, 4168 bp, Homo sapiens
cggacgcgtgggtcgacccacgcgtctcccggaatatggagccctgggcgcgggggcggcgtgtcaggtggttgcggagctggtaagaatcatattctaagaactcagccactcaggtatccaccatggtgctgggtcctgaacagaagatgtcagatgacagtgtttctggagatcatggggagtctgccagtcttggtaacatcaaccctgcctatagtaatccctctctttcacagtcccctggggactcagaggagtacttcgccacttactttaatgagaagatctccattcctgaggaggagaataagaggctgatggaacctgcagtactcttgttttagctttcgtaaactctgggctttcaccggaccaggttttcttatgagcattgcctacctggatccaggaaatattgaatccgatttgcagtctggagcagtggctggatttaagttgctctggatccttctgttggccacccttgtggggctgctgctccagcggcttgcagctagactgggagtggttactgggctgcatcttgctgaagtatgtcaccgtcagtatcccaaggtcccacgagtcatcctgtggctgatggtggagttggctatcatcggctcagacatgcaagaagtcattggctcagccattgctatcaatcttctgtctgtaggaagaattcctctgtggggtggcgttctcatcaccattgcagatacttttgtatttctcttcttggacaaatatggcttgcggaagctagaagcattttttggctttctcatcactattatggccctcacatttggatatgagtatgttacagtgaaacccagccagagccaggtactcaagggcatgttcgtaccatcctgttcaggctgtcgcactccacagattgaacaggctgtgggcatcgtgggagctgtcatcatgccacacaacatgtacctgcattctgccttagtcaagtctagacaggtaaaccggaacaataagcaggaagttcgagaagccaataagtactttttcattgaatcctgcattgcactctttgtttccttcatcatcaatgtctttgttgtctcagtctttgctgaagcattttttgggaaaaccaacgagcaggtggttgaagtctgtacaaataccagcagtcctcatgctggcctctttcctaaagataactcgacactggctgtggacatctacaaagggggtgttgtgctgggatgttactttgggcctgctgcactctacatttgggcagtggggatcctggctgcaggacagagctccaccatgacaggaacctattctggccagtttgtcatggagggattcctgaacctaaagtggtcacgctttgcccgagtggttctgactcgctctattgccatcatccccactctgcttgttgctgtcttccaagatgtagagcatctaacagggatgaatgactttctgaatgttctacagagcttacagcttccctttgctctcatacccatcctcacatttacgagcttgcggccagtaatgagtgactttgccaatggactaggctggcggattgcaggaggaatcttggtccttatcatctgttccatcaatatgtactttgtagtggtttatgtccgggacctagggcatgtggcattatatgtggtggctgctgtggtcagcgtggcttatctgggctttgtgttctacttgggttggcaatgtttgattgcactgggcatgtccttcctggactgtgggcatacggtaagcatctctaaaggcctgctgacagaagaagccacccgtggctacgttaaataacactggattagtctgtcttctgcaggtagccatcagagccagtgtgtttctatggtttactgtgtgaacatagccaaaagtatgtgccgttgcacagactgtgtttatgactcaaccgttggttggaaaagactttgtttcatgtgtatttgaaagatggaattattttttccttcctgacctaaccttagaactggattagggtgggatctttgaaaagctgacatttgctgctatcattccaacactaaattcttaagtagttgcccaagggccagctcagtttatccttcggagagacaaggatatgcatgattcttaaccaggctatatgttaaaaaaaaattggaaaatgcaatacattttttattatacaaactacagaatgagtatgcaagttttatttatcaaaatgtaatggatttttaaaggctgagaaattttccttatacctaccttttcagttattttaattataccaaattatcaactagaatagcttcatccatatgaaatataaaatgaagagacacctagctctatcaggcttaggattctttgaacttatttccactttaatttctcagtggaagttaagaggggtgagaaaacaaagaaggggaaaaactgacaactaacaaaaccagcaccacatcgctaggtggtgcttactaattaccttctcaggattttcctcagattgaaaagcttatgaggatttcttgggagtcttaataacctgcctgttagtacagagctttcctgatgatatttactcttgagcacatgtggttgtaaaaccttaactttctttctccaggagggtggtgatagaaacagatggtagtatttatgaactgatgttctcgtgaaatgttgagggtggggagaaaagactttaagggaggagagccatctattttgttcctaaagccacctctcagcagaatcgtcatgtttttctgatgcaccgctctgcttcatgcccaagatgacttgcgaggcaatctcaggagctgtggacttaaccattgcaaagcacactgtctttctcagcgttctctgcaagtcagtaggtgttagtatggttgcaaagttcactgtctcagcaaagttgaactgggctacctctctacagctgtttcctcagagggaaaaatcttgagaccagatggtggagctctggagtcagaggaaatgggtgtcttcagcacaaagctgctgcttttacttcagccacttctgacatttttacataccgagcctgagattgtgtgattatctcaaatcaaatcactttgatggagataaataatcaaaactgttttatagtcattgatttggtgagaacagtaatggaaaatggtgttgaaggacttctcatttttggagctttccttccagagtcctggctgattggtgttcgctgttcatctgagcccccaaaagcattattactgatacttgcacacagtcaaaagcgcagactggatggatggtcttttataaggcatttaagggtacactactgtgtttcactgaccatacatttttcttagcccctcaagtaatatagcacagagttatgaatgacaattcccctaaccattcctcttcatatctgcctcttccccttaccatcgtaattctccaaactggtcataaaggcactctgtgaagatattggggactgacatcttaagctctcacctggctgcagtaggaaaggccaaactgacgacaaaaaaaaaattctttataaagatgatatggtaacatgtatctttgccctgggtctgggtgggtccagtcagtctcagatttacaagcatttaggagcctaggtaaaagctgctagtattcttttaaaagttatatttatgacttgcaatgatagaaaactccttccaattaaatggcattttataatattatgtgtgtacttcacagtgttaaaaataccctcatacgttattgcatttgatcttcacagaaagtgcattttaaccagtactctgggtgcaataaataatatgtagaaatttaagtcctccaattccagcatatccagtgagttttgacagtgtgtttatgtggaatgtttaaggatatacaattgtactttatataaattggttcttgttcttcttaaatgtgacatgaaataattgtgctgctacattatactggaaattaacaggggaaaagggaagagctcttggctcccttgaggttctgctagtggtgttaggagtggttacaactgagcttttagtaaccatttaaccgtatgtaaacttggtttctaattaaaaaaaaatttctttttcca

SEQ ID NO: 31183 - DNA, 3124 bp, Homo sapiens
acctcttatagatgattgtgtatgatatgtaggagagctcttatttggtccttgcttctgaaacaaaagttgctgttgaattgctttgggttctaggttgaagtctgtacaaataccagcagtcctcatgctggcctctttcctaaagataactcgacactggctgtggacatctacaaagggggtgttgtgctgggatgttactttgggcctgctgcactctacatttgggcagtggggatcctggctgcaggacagagctccaccatgacaggaacctattctggccagtttgtcatggagggattcctgaacctaaagtggtcacgctttgcccgagtggttctgactcgctctattgccatcatccccactctgcttgttgctgtcttccaagatgtagagcatctaacagggatgaatgactttctgaatgttctacagagcttacagcttccctttgctctcatacccatcctcacatttacgagcttgcggccagtaatgagtgactttgccaatggactaggctggcggattgcaggaggaatcttggtccttatcatctgttccatcaatatgtactttgtagtggtttatgtccgggacctagggcatgtggcattatatgtggtggctgctgtggtcagcgtggcttatctgggctttgtgttctacttgggttggcaatgtttgattgcactgggcatgtccttcctggactgtgggcatacggtaagcatctctaaaggcctgctgacagaagaagccacccgtggctacgttaaataacactggattagtctgtcttctgcaggtagccatcagagccagtgtgtttctatggtttactgtgtgaacatagccaaaagtatgtgccgttgcacagactgtgtttatgactcaaccgttggttggaaaagactttgtttcatgtgtatttgaaagatggaattattttttccttcctgacctaaccttagaactggattagggtgggatctttgaaaagctgacatttgctgctatcattccaacactaaattcttaagtagttgcccaagggccagctcagtttatccttcggagagacaaggatatgcatgattcttaaccaggctatatgttaaaaaaaaattggaaaatgcaatacattttttattatacaaactacagaatgagtatgcaagttttatttatcaaaatgtaatggatttttaaaggctgagaaattttccttatacctaccttttcagttattttaattataccaaattatcaactagaatagcttcatccatatgaaatataaaatgaagagacacctagctctatcaggcttaggattctttgaacttatttccactttaatttctcagtggaagttaagaggggtgagaaaacaaagaaggggaaaaactgacaactaacaaaaccagcaccacatcgctaggtggtgcttactaattaccttctcaggattttcctcagattgaaaagcttatgaggatttcttgggagtcttaataacctgcctgttagtacagagctttcctgatgatatttactcttgagcacatgtggttgtaaaaccttaactttctttctccaggagggtggtgatagaaacagatggtagtatttatgaactgatgttctcgtgaaatgttgagggtggggagaaaagactttaagggaggagagccatctattttgttcctaaagccacctctcagcagaatcgtcatgtttttctgatgcaccgctctgcttcatgcccaagatgacttgcgaggcaatctcaggagctgtggacttaaccattgcaaagcacactgtctttctcagcgttctctgcaagtcagtaggtgttagtatggttgcaaagttcactgtctcagcaaagttgaactgggctacctctctacagctgtttcctcagagggaaaaatcttgagaccagatggtggagctctggagtcagaggaaatgggtgtcttcagcacaaagctgctgcttttacttcagccacttctgacatttttacataccgagcctgagattgtgtgattatctcaaatcaaatcactttgatggagataaataatcaaaactgttttatagtcattgatttggtgagaacagtaatggaaaatggtgttgaaggacttctcatttttggagctttccttccagagtcctggctgattggtgttcgctgttcatctgagcccccaaaagcattattactgatacttgcacacagtcaaaagcgcagactggatggatggtcttttataaggcatttaagggtacactactgtgtttcactgaccatacatttttcttagcccctcaagtaatatagcacagagttatgaatgacaattcccctaaccattcctcttcatatctgcctcttccccttaccatcgtaattctccaaactggtcataaaggcactctgtgaagatattggggactgacatcttaagctctcacctggctgcagtaggaaaggccaaactgacgacaaaaaaaaaattctttataaagatgatatggtaacatgtatctttgccctgggtctgggtgggtccagtcagtctcagatttacaagcatttaggagcctaggtaaaagctgctagtattcttttaaaagttatatttatgacttgcaatgatagaaaactccttccaattaaatggcattttataatattatgtgtgtacttcacagtgttaaaaataccctcatacgttattgcatttgatcttcacagaaagtgcattttaaccagtactctgggtgcaataaataatatgtagaaatttaagtcctccaattccagcatatccagtgagttttgacagtgtgtttatgtggaatgtttaaggatatacaattgtactttatataaattggttcttgttcttcttaaatgtgacatgaaataattgtgctgctacattatactggaaattaacaggggaaaagggaagagctcttggctcccttgaggttctgctagtggtgttaggagtggttacaactgagcttttagtaaccatttaaccgtatgtaaacttggtttctaattaaaaaaaaatttctttttcca

SEQ ID NO: 31184 - DNA, 4231 bp, Homo sapiens
  misc_feature (3266)..(3266): n is a, c, g, or t
  misc_feature (3275)..(3275): n is a, c, g, or t
  misc_feature (3990)..(3990): n is a, c, g, or t
cggacgcgtgggtcgacccacgcgtctcccggaatatggagccctgggcgcgggggcggcgtgtcaggtggttgcggagctggtaagaatcatattctaagaactcagccactcaggtatccaccatggtgctgggtcctgaacagaagatgtcagatgacagtgtttctggagatcatggggagtctgccagtcttggtaacatcaaccctgcctatagtaatccctctctttcacagtcccctggggactcagaggagtacttcgccacttactttaatgagaagatctccattcctgaggaggagtactcttgttttagctttcgtaaactctgggctttcaccggaccaggttttcttatgagcattgcctacctggatccaggaaatattgaatccgatttgcagtctggagcagtggctggatttaagttgctctggatccttctgttggccacccttgtggggctgctgctccagcggcttgcagctagactgggagtggttactgggctgcatcttgctgaagtatgtcaccgtcagtatcccaaggtcccacgagtcatcctgtggctgatggtggagttggctatcatcggctcagacatgcaagaagtcattggctcagccattgctatcaatcttctgtctgtaggaagaattcctctgtggggtggcgttctcatcaccattgcagatacttttgtatttctcttcttggacaaatatggcttgcggaagctagaagcattttttggctttctcatcactattatggccctcacatttggatatgagtatgttacagtgaaacccagccagagccaggtactcaagggcatgttcgtaccatcctgttcaggctgtcgcactccacagattgaacaggctgtgggcatcgtgggagctgtcatcatgccacacaacatgtacctgcattctgccttagtcaagtctagacaggtaaaccggaacaataagcaggaagttcgagaagccaataagtactttttcattgaatcctgcattgcactctttgtttccttcatcatcaatgtctttgttgtctcagtctttgctgaagcattttttgggaaaaccaacgagcaggtggttgaagtctgtacaaataccagcagtcctcatgctggcctctttcctaaagataactcgacactggctgtggacatctacaaagggggtgttgtgctgggatgttactttgggcctgctgcactctacatttgggcagtggggatcctggctgcaggacagagctccaccatgacaggaacctattctggccagtttgtcatggagggattcctgaacctaaagtggtcacgctttgcccgagtggttctgactcgctctattgccatcatccccactctgcttgttgctgtcttccaagatgtagagcatctaacagggatgaatgactttctgaatgttctacagagcttacagcttccctttgctctcatacccatcctcacatttacgagcttgcggccagtaatgagtgactttgccaatggactaggctggcggattgcaggaggaatcttggtccttatcatctgttccatcaatatgtactttgtagtggtttatgtccgggacctagggcatgtggcattatatgtggtggctgctgtggtcagcgtggcttatctgggctttgtgttctacttgggttggcaatgtttgattgcactgggcatgtccttcctggactgtgggcatacggtaagcatctctaaaggcctgctgacagaagaagccacccgtggctacgttaaataacactggattagtctgtcttctgcagtgccatctgggattgacagctcagcctgaactctatcttctgaacaccatggacgctgactcacttgtgtctagatgactgacagcctgagagactctataagaacatgtttttctaagccctttttgtgccaggtgtcccgttaacgtctctgttagttcagaggtgagttttgttcagacgttttgaacaaaaggcaaagatttcctcatgggaagggtgttcaaaactgacagctataaatgtaggtcagagacccacccacctcataacagtcatacactcccagagttaaacgattggcctctgatggccacacacccctatgggcttgtgtcttggactctgggatttaaaagatatatatgtatatatatttatgtaaacctgagcatctcagtttgggtagagttttaaggttatatgaaactgatagaacttttgtattttttttttaaatattgttttgatatatcagatatttgttttgtctggatcacaagtgagaaagaaaagagaataatgctctttttcacaatgaactggtcaaattgactatcttgtaaagtgatactttactatgtcagtgaaatttcagtttgattttagtcaaccagattatatcctttgtatctactgatattaacacatcatattaacacatcatttcttaaaaaaacatttcttctgtttggcaatcataattaactctggttatcagcctattttgtaattattgtctttgtcgtcacttttcttgaattgttttctagtcattaaacagatatgaaggcattgccaaagagctttaatatccagtaacaagatccagaaaccaaactttaaccagtgatcagttttccgtgctgcattgtaactcagctcattctggcattcaagttttaggcaaaaaaagaggaaacttctaacatttagcttgtaagtcctgacataagatagtgaagatatttatcttctttctaatatttgtatagtccgccaatgtattttcttcccactattcccattaacataccaaacactgtttctaggtccaaagtctatttctaggagtggccaatatttgtattgttgaatctcctagggaatgctaaatgtttcactttaaaatacctatttataccaagtagcatgagattagtactagagtgagatttggaatattagtccacatatcacaaactgcttgcctacatgtatagattttttttttcacccaccttcctaaccaggaatttgtttccttaaatttgttgttgttgttgttgttgtttgttgttatttttttgagaagagtcttgccctgtcgccaaggcgggaatgcattgacgtgatctcagttcactgtaacctctacctccccggtttaatcgattctcctccttcagcctcctgaatagctgggattncaggcaccncatttttagtggagatggggtttcaccatgttggccaggctggtctcaaactcttgacctcaagtgatctacctgcctcagcctcccaaagtgctgggattacaggtgtgagccactgcacccagcgttttttgttgttaagacagggtcttgctctgttgcccaggctggagtgcagtggtgtgatctcagctcactgcaacttctgccacctgggcttaagccatcctcccacttcagcatcccaaatagctgggactgcaggcacacaccaccacacccagctaatttttgtattttttgtagagacgggatttcaccatgttgcccaggctggtgttgaactcatgagctcaagtaatctgctggccttggcctcccaaagtgctgagattataggcgtgaaccactgcatccagctcactcctcatttctttctagccccaaaggtgttgagtcagcaaatcctgcagcctttgtgtgactttgagcatcactttcccctttcagcattaaatatatgacctctctgccttattttagaacttactacatttcaataaaactttttaaaaaatccagacattgcctatgttcgtttataatcggcccttaaagaggcagggatttttctaaaatgacactttaaaatttcctcatttctacttcagggcctcttgaaacttcagataatgagagcagccaaccctgcaantcaggctatagagtccttctgatcttaaaactgagactgaattcacatcagttttcgcttttacttgaaaaagagactcttaagtgttttggtttctttatacaggacaacaactctagatgaaaccagtgtgttggattttccccgcctccctgggtggttttatttctcagttgtttcattaccagagagtgttggggaaacgaaggtaaaaaataaaaacatcctgttgtgaaactca

SEQ ID NO: 31185 - DNA, 2569 bp, Homo sapiens
  misc_feature (2328)..(2328): n is a, c, g, or t
cggacgcgtgggtcgacccacgcgtctcccggaatatggagccctgggcgcgggggcggcgtgtcaggtggttgcggagctggtaagaatcatattctaagaactcagccactcaggtatccaccatggtgctgggtcctgaacagaagatgtcagatgacagtgtttctggagatcatggggagtctgccagtcttggtaacatcaaccctgcctatagtaatccctctctttcacagtcccctggggactcagaggagtacttcgccacttactttaatgagaagatctccattcctgaggaggagtactcttgttttagctttcgtaaactctgggctttcaccggaccaggttttcttatgagcattgcctacctggatccaggaaatattgaatccgatttgcagtctggagcagtggctggatttaagttgctctggatccttctgttggccacccttgtggggctgctgctccagcggcttgcagctagactgggagtggttactgggctgcatcttgctgaagtatgtcaccgtcagtatcccaaggtcccacgagtcatcctgtggctgatggtggagttggctatcatcggctcagacatgcaagaagtcattggctcagccattgctatcaatcttctgtctgtaggaagaattcctctgtggggtggcgttctcatcaccattgcagatacttttgtatttctcttcttggacaaatatggcttgcggaagctagaagcattttttggctttctcatcactattatggccctcacatttggatatgagtatgttacagtgaaacccagccagagccaggtactcaagggcatgttcgtaccatcctgttcaggctgtcgcactccacagattgaacaggctgtgggcatcgtgggagctgtcatcatgccacacaacatgtacctgcattctgccttagtcaagtctagacaggtaaaccggaacaataagcaggaagttcgagaagccaataagtactttttcattgaatcctgcattgcactctttgtttccttcatcatcaatgtctttgttgtctcagtctttgctgaagcattttttgggaaaaccaacgagcaggtggttgaagtctgtacaaataccagcagtcctcatgctggcctctttcctaaagataactcgacactggctgtggacatctacaaagggggtgttgtgctgggatgttactttgggcctgctgcactctacatttgggcagtggggatcctggctgcaggacagagctccaccatgacaggaacctattctggccagtttgtcatggagggattcctgaacctaaagtggtcacgctttgcccgagtggttctgactcgctctattgccatcatccccactctgcttgttgctgtcttccaagatgtagagcatctaacagggatgaatgactttctgaatgttctacagagcttacagcttccctttgctctcatacccatcctcacatttacgagcttgcggccagtaatgagtgactttgccaatggactaggctggcggattgcaggaggaatcttggtccttatcatctgttccatcaatatgtactttgtagtggtttatgtccgggacctagggcatgtggcattatatgtggtggctgctgtggtcagcgtggcttatctgggctttgtgttctacttgggttggcaatgtttgattgcactgggcatgtccttcctggactgtgggcatacgtgccatctgggattgacagctcagcctgaactctatcttctgaacaccatggacgctgactcacttgtgtctagatgactgacagcctgagagactctataagaacatgtttttctaagccctttttgtgccaggtgtcccgttaacgtctctgttagttcagagagacgggatttcaccatgttgcccaggctggtgttgaactcatgagctcaagtaatctgctggccttggcctcccaaagtgctgagattataggcgtgaaccactgcatccagctcactcctcatttctttctagccccaaaggtgttgagtcagcaaatcctgcagcctttgtgtgactttgagcatcactttcccctttcagcattaaatatatgacctctctgccttattttagaacttactacatttcaataaaactttttaaaaaatccagacattgcctatgttcgtttataatcggcccttaaagaggcagggatttttctaaaatgacactttaaaatttcctcatttctacttcagggcctcttgaaacttcagataatgagagcagccaaccctgcaantcaggctatagagtccttctgatcttaaaactgagactgaattcacatcagttttcgcttttacttgaaaaagagactcttaagtgttttggtttctttatacaggacaacaactctagatgaaaccagtgtgttggattttccccgcctccctgggtggttttatttctcagttgtttcattaccagagagtgttggggaaacgaaggtaaaaaataaaaacatcctgttgtgaaactca

SEQ ID NO: 31186 - DNA, 1217 bp, Homo sapiens
cggacgcgtgggtcgacccacgcgtctcccggaatatggagccctgggcgcgggggcggcgtgtcaggtggttgcggagctggtaagaatcatattctaagaactcagccactcaggtatccaccatggtgctgggtcctgaacagaagatgtcagatgacagtgtttctggagatcatggggagtctgccagtcttggtaacatcaaccctgcctatagtaatccctctctttcacagtcccctggggactcagaggagtacttcgccacttactttaatgagaagatctccattcctgaggaggagtactcttgttttagctttcgtaaactctgggctttcaccggaccaggttttcttatgagcattgcctacctggatccaggaaatattgaatccgatttgcagtctggagcagtggctggatttaagttgctctggatccttctgttggccacccttgtggggctgctgctccagcggcttgcagctagactgggagtggttactgggctgcatcttgctgaagtatgtcaccgtcagtatcccaaggtcccacgagtcatcctgtggctgatggtggagttggctatcatcggctcagacatgcaagaagtcattggctcagccattgctatcaatcttctgtctgtaggaagaattcctctgtggggtggcgttctcatcaccattgcagatacttttgtatttctcttcttggacaaatatggcttgcggaagctagaagcattttttggctttctcatcactattatggccctcacatttggatatgagctcacatttacgagcttgcggccagtaatgagtgactttgccaatggactaggctggcggattgcaggaggaatcttggtccttatcatctgttccatcaatatgtactttgtagtggtttatgtccgggacctagggcatgtggcattatatgtggtggctgctgtggtcagcgtggcttatctgggctttgtgttctacttggtaagtctagcctggaagagcaggggcataggtatcagggatggttgaggtggggttcactgacattcagaaatgaacagacccaggctgggcacagtggctcatgcctataatcccagtactttgggaggctgaggcgggaggattgcttgaatccaggagttagagaccaatctgggcaacatagtaagactccatctctacaaaaaaaga

SEQ ID NO: 31187 - DNA, 1492 bp, Homo sapiens
tctgttttaatgctggtcatttgtgtctgaattccaaagggacgggagtataatgaggtttgtctgacccctccctcccatcatggcctgaactagtttttcaggttttctttggaatgcccttggtcaagaagaggatccgttcagttggttgggggagcttagaattttatttttgtttgctctcctcagtgtcccaagtagttggactataggcacacaccacacagcaccacacctggcttgtttcctttttaaaatggtggctcttgtcctttttgggaagtgtttgggcacagaggtactgatactgttattctggttttagaataagaggctgatggaacctgcaggtaagggaagagctttgacttggacagagaagtggccagcttcttaataaaaagtgggtaagatggaggtgaaacttggacacatgcaatatctgacattgtaaatccttttttcttgtgaggctggattttgttgcttcatatgtgataacagaccaattatatcagtagttcaatggtgatgttcagtttaatctcttttcctctcttgtacagtactcttgttttagctttcgtaaactctgggctttcaccggaccaggttttcttatgagcattgcctacctggatccaggaaatattgaatccgatttgcagtctggagcagtggctggatttaagttgctctggatccttctgttggccacccttgtggggctgctgctccagcggcttgcagctagactgggagtggttactgggctgcatcttgctgaagtatgtcaccgtcagtatcccaaggtgagcaatgtattgtcctgtttgtctctcacccatgccataggaatctgtgtgtctggcggtatgtgctggcctcattctatagtgagacagtcaaggacttgggggtcagtggccctgaagacagacggtaccaacggaaatactgtagctcctcctgctgccaggccatgttttccccctctttcaaaatctaacttgagactcgcatttcctagaaggttttcttagaaaaactgtgttaccattcactctggcttccagtatctagcaatgcccagcccaaggggaggaggatgctctctctaagcacttttattcatacctccatgttactccatcagtttgcattttatatatgttctttttttgtttgactttgccatcactttgaaaaagtaattttttttctttttagtacaaactatatgtggcaagatctttggatttgctaataattatttttcagtttcccctcccaccgggggctacactgtcctctgcagcttcttctggacattttgggcctttcttaccgttcctaaggcaagaatgaacactatgtctggaagatatttttaacttagttttgtctcttgttttgtttcttttcctgggtgtgagcaaaaagtatccttatctgcttttcaaaaaaataaaaaaatcttgataatatc

SEQ ID NO: 31188 - DNA, 487 bp, Homo sapiens
attaagggtacactactgtgttcactgaccatacatttttcttagcccctcaagtaataatgcttgtggtgttcgctgttcatctgagcccccaaaagcattattactgatacttgcacacagtcaaaagcgcagactggatggatggtcttttataagtaaccagtactctgggtgcaataaataatatgtagaaatttaagtcctccaattccagcatatccagtgagttttgacagtgtgtttatgtggaatgtttaaggatatacaattgtactttatataaattggttcttgttcttcttaaatgtgacatgaaataattgtgctgctacattatactggaaattaacaggggaaaagggaagagctcttggctcccttgaggttctgctagtggtgttaggagtggttacaactgagcttttagtaaccatttaaccgtatgtaaacttggtttctaattaaaaaaaaatttctttttcca

SEQ ID NO: 31189 - DNA, 780 bp, Homo sapiens
tctgttttaatgctggtcatttgtgtctgaattccaaagggacgggagtataatgaggtttgtctgacccctccctcccatcatggcctgaactagtttttcaggttttctttggaatgcccttggtcaagaagaggatccgttcagttggttgggggagcttagaattttatttttgtttgctctcctcagtgtcccaagtagttggactataggcacacaccacacagcaccacacctggcttgtttcctttttaaaatggtggctcttgtcctttttgggaagtgtttgggcacagaggtactgatactgttattctggttttagaataagaggctgatggaacctgcaggtaagggaagagctttgacttggacagagaagtggccagcttcttaataaaaagtgggtaagatggaggtgaaacttggacacatgcaatatctgacattgtaaatccttttttcttgtgaggctggattttgttgcttcatatgtgataacagaccaattatatcagtagttcaatggtgatgttcagtttaatctcttttcctctcttgtacagtactcttgttttagctttcgtaaactctgggctttcaccggaccaggttttcttatgagcattgcctacctggatccaggaaatattgaatccgatttgcagtctggagcagtggctggatttaaggtgaacatctagtcctacccctgtccttttaagcacataataccctctcacatccttttctccaccctgcatgttggatagtagc

SEQ ID NO: 31190 - DNA, 2165 bp, Homo sapiens
  misc_feature (1)..(1): n is a, c, g, or t
  misc_feature (3)..(4): n is a, c, g, or t
  misc_feature (6)..(6): n is a, c, g, or t
ngnncnggcaccatgaggaagaagcagctgaagacggaggcagctccacactgtgaactaaaatcatattctaagaactcagccactcaggtatccaccatggtgctgggtcctgaacagaagatgtcagatgacagtgtttctggagatcatggggagtctgccagtcttggtaacatcaaccctgcctatagtaatccctctctttcacagtcccctggggactcagaggagtacttcgccacttactttaatgagaagatctccattcctgaggaggagtactcttgttttagctttcgtaaactctgggctttcaccggaccaggttttcttatgagcattgcctacctggatccaggaaatattgaatccgatttgcagtctggagcagtggctggatttaagttgctctggatccttctgttggccacccttgtggggctgctgctccagcggcttgcagctagactgggagtggttactgggctgcatcttgctgaagtatgtcaccgtcagtatcccaaggtcccacgagtcatcctgtggctgatggtggagttggctatcatcggctcagacatgcaagaagtcattggctcagccattgctatcaatcttctgtctgtaggaagaattcctctgtggggtggcgttctcatcaccattgcagatacttttgtatttctcttcttggacaaatatggcttgcggaagctagaagcattttttggctttctcatcactattatggccctcacatttggatatgagtatgttacagtgaaacccagccagagccaggtactcaagggcatgttcgtaccatcctgttcaggctgtcgcactccacagattgaacaggctgtgggcatcgtgggagctgtcatcatgccacacaacatgtacctgcattctgccttagtcaagtctagacaggtaaaccggaacaataagcaggaagttcgagaagccaataagtactttttcattgaatcctgcattgcactctttgtttccttcatcatcaatgtctttgttgtctcagtctttgctgaagcattttttgggaaaaccaacgagcaggtggttgaagtctgtacaaataccagcagtcctcatgctggcctctttcctaaagataactcgacactggctgtggacatctacaaagggggtgttgtgctgggatgttactttgggcctgctgcactctacatttgggcagtggggatcctggctgcaggacagagctccaccatgacaggaacctattctggccagtttgtcatggagggattcctgaacctaaagtggtcacgctttgcccgagtggttctgactcgctctattgccatcatccccactctgcttgttgctgtcttccaagatgtagagcatctaacagggatgaatgactttctgaatgttctacagagcttacagcttccctttgctctcatacccatcctcacatttacgagcttgcggccagtaatgagtgactttgccaatggactaggctggcggattgcaggaggaatcttggtccttatcatctgttccatcaatatgtactttgtagtggtttatgtccgggacctagggcatgtggcattatatgtggtggctgctgtggtcagcgtggcttatctgggctttgtgttctacttgggttggcaatgtttgattgcactgggcatgtccttcctggactgtgggcatacggtaagcatctctaaaggcctgctgacagaagaagccacccgtggctacgttaaataacactggattagtctgtcttctgcaggtagccatcagagccagtgtgtttctatggtttactgtgtgaacatagccaaaagtatgtgccgttgcacagactgtgtttatgactcaaccgttggttggaaaagactttgtttcatgtgtatttgaaagatggaattattttttccttcctgacctaaccttagaactggattagggtgggatctttgaaaagctgacatttgctgctatcattccaacactaaattcttaagtagttgcccaagggccagctcagtttatccttcggagagacaaggatatgcatgattcttaaccaggctatatgttaaaaaaaaattggaaaatgcaatacattttttattatacaaact

SEQ ID NO: 31191 - DNA, 4432 bp, Homo sapiens
cggacgcgtgggtcgacccacgcgtctcccggaatatggagccctgggcgcgggggcggcgtgtcaggtggttgcggagctggtaagaatcatattctaagaactcagccactcaggtatccaccatggtgctgggtcctgaacagaagatgtcagatgacagtgtttctggagatcatggggagtctgccagtcttggtaacatcaaccctgcctatagtaatccctctctttcacagtcccctggggactcagaggagtacttcgccacttactttaatgagaagatctccattcctgaggaggagtactcttgttttagctttcgtaaactctgggctttcaccggaccaggttttcttatgagcattgcctacctggatccaggaaatattgaatccgatttgcagtctggagcagtggctggatttaagttgctctggatccttctgttggccacccttgtggggctgctgctccagcggcttgcagctagactgggagtggttactgggctgcatcttgctgaagtatgtcaccgtcagtatcccaaggtcccacgagtcatcctgtggctgatggtggagttggctatcatcggctcagacatgcaagaagtcattggctcagccattgctatcaatcttctgtctgtaggaagaattcctctgtggggtggcgttctcatcaccattgcagatacttttgtatttctcttcttggacaaatatggcttgcggaagctagaagcattttttggctttctcatcactattatggccctcacatttggatatgagtatgttacagtgaaacccagccagagccaggtactcaagggcatgttcgtaccatcctgttcaggctgtcgcactccacagattgaacaggctgtgggcatcgtgggagctgtcatcatgccacacaacatgtacctgcattctgccttagtcaagtctagacaggtaaaccggaacaataagcaggaagttcgagaagccaataagtactttttcattgaatcctgcattgcactctttgtttccttcatcatcaatgtctttgttgtctcagtctttgctgaagcattttttgggaaaaccaacgagcaggtggttgaagtctgtacaaataccagcagtcctcatgctggcctctttcctaaagataactcgacactggctgtggacatctacaaagggggtgttgtgctgggatgttactttgggcctgctgcactctacatttgggcagtggggatcctggctgcaggacagagctccaccatgacaggaacctattctggccagtttgtcatggagggattcctgaacctaaagtggtcacgctttgcccgagtggttctgactcgctctattgccatcatccccactctgcttgttgctgtcttccaagatgtagagcatctaacagggatgaatgactttctgaatgttctacagagcttacagcttccctttgctctcatacccatcctcacatttacgagcttgcggccagtaatgagtgactttgccaatggactaggctggcggattgcaggaggaatcttggtccttatcatctgttccatcaatatgtactttgtagtggtttatgtccgggacctagggcatgtggcattatatgtggtggctgctgtggtcagcgtggcttatctgggctttgtgttctacttgggttggcaatgtttgattgcactgggcatgtccttcctggactgtgggcatacggtaagcatctctaaaggcctgctgacagaagaagccacccgtggctacgttaaataacactggattagtctgtcttctgcaggtagccatcagagccagtgtgtttctatggtttactgtgtgaacatagccaaaagtatgtgccgttgcacagactgtgtttatgactcaaccgttggttggaaaagactttgtttcatgtgtatttgaaagatggaattattttttccttcctgacctaaccttagaactggattagggtgggatctttgaaaagctgacatttgctgctatcattccaacactaaattcttaagtagttgcccaagggccagctcagtttatccttcggagagacaaggatatgcatgattcttaaccaggctatatgttaaaaaaaaattggaaaatgcaatacattttttattatacaaactacagaatgagtatgcaagttttatttatcaaaatgtaatggatttttaaaggctgagaaattttccttatacctaccttttcagttattttaattataccaaattatcaactagaatagcttcatccatatgaaatataaaatgaagagacacctagctctatcaggcttaggattctttgaacttatttccactttaatttctcagtggaagttaagaggggtgagaaaacaaagaaggggaaaaactgacaactaacaaaaccagcaccacatcgctaggtggtgcttactaattaccttctcaggattttcctcagattgaaaagcttatgaggatttcttgggagtcttaataacctgcctgttagtacagagctttcctgatgatatttactcttgagcacatgtggttgtaaaaccttaactttctttctccaggagggtggtgatagaaacagatggtagtatttatgaactgatgttctcgtgaaatgttgagggtggggagaaaagactttaagggaggagagccatctattttgttcctaaagccacctctcagcagaatcgtcatgtttttctgatgcaccgctctgcttcatgcccaagatgacttgcgaggcaatctcaggagctgtggacttaaccattgcaaagcacactgtctttctcagcgttctctgcaagtcagtaggtgttagtatggttgcaaagttcactgtctcagcaaagttgaactgggctacctctctacagctgtttcctcagagggaaaaatcttgagaccagatggtggagctctggagtcagaggaaatgggtgtcttcagcacaaagctgctgcttttacttcagccacttctgacatttttacataccgagcctgagattgtgtgattatctcaaatcaaatcactttgatggagataaataatcaaaactgttttatagtcattgatttggtgagaacagtaatggaaaatggtgttgaaggacttctcatttttggagctttccttccagagtcctggctgattggtgttcgctgttcatctgagcccccaaaagcattattactgatacttgcacacagtcaaaagcgcagactggatggatggtcttttataaggcatttaagggtacactactgtgtttcactgaccatacatttttcttagcccctcaagtaatatagcacagagttatgaatgacaattcccctaaccattcctcttcatatctgcctcttccccttaccatcgtaattctccaaactggtcataaaggcactctgtgaagatattggggactgacatcttaagctctcacctggctgcagtaggaaaggccaaactgacgacaaaaaaaaaattctttataaagatgatatggtaacatgtatctttgccctgggtctgggtgggtccagtcagtctcagatttacaagcatttaggagcctaggtaaaagctgctagtattcttttaaaagttatatttatgacttgcaatgatagaaaactccttccaattaaatggcattttataatattatgtgtgtacttcacagtgttaaaaataccctcatacgttattgcatttgatcttcacagaaagtgcattttaaccagtactctgggtgcaataaataatatgtagaaatttaagtcctccaattccagcatatccagtgagttttgacagtgtgtttatgtggaatgtttaaggatatacaattgtactttatataaattggttcttgttcttcttaaatgtgacatgaaataattgtgctgctacattatactggaaattaacaggggaaaagggaagagctcttggctcccttgaggttctgctagtggtgttaggagtggttacaactgagcttttagtaaccatttaaccgtatgtaaacttggtttctaattaaaaaaaaatttctttttccaatttggtttcctgggtatttttttaaccttgaaataatttattaatagggttacaacaactttgatacaaaaatactgaaacagcaactaccacctggaatggcacactaagtccacactgttaggattttctccttagaaaggatagagaaataaatggatttagtcctcagaaagcttggattaattgcagataccaggatattaatttccatttacccacttagtcaaatagttttaccatagctaaaggtcacatcattaccatgttgaaacttgggaaaaaaat

SEQ ID NO: 31192 - DNA, 4096 bp, Homo sapiens
cggacgcgtgggtcgacccacgcgtctcccggaatatggagccctgggcgcgggggcggcgtgtcaggtggttgcggagctggtaagaatcatattctaagaactcagccactcaggtatccaccatggtgctgggtcctgaacagaagatgtcagatgacagtgtttctggagatcatggggagtctgccagtcttggtaacatcaaccctgcctatagtaatccctctctttcacagtcccctggggactcagaggagtacttcgccacttactttaatgagaagatctccattcctgaggaggagtactcttgttttagctttcgtaaactctgggctttcaccggaccaggttttcttatgagcattgcctacctggatccaggaaatattgaatccgatttgcagtctggagcagtggctggatttaagttgctctggatccttctgttggccacccttgtggggctgctgctccagcggcttgcagctagactgggagtggttactgggctgcatcttgctgaagtatgtcaccgtcagtatcccaaggtcccacgagtcatcctgtggctgatggtggagttggctatcatcggctcagacatgcaagaagtcattggctcagccattgctatcaatcttctgtctgtaggaagaattcctctgtggggtggcgttctcatcaccattgcagatacttttgtatttctcttcttggacaaatatggcttgcggaagctagaagcattttttggctttctcatcactattatggccctcacatttggatatgagtatgttacagtgaaacccagccagagccaggtactcaagggcatgttcgtaccatcctgttcaggctgtcgcactccacagattgaacaggctgtgggcatcgtgggagctgtcatcatgccacacaacatgtacctgcattctgccttagtcaagtctagacaggtaaaccggaacaataagcaggaagttcgagaagccaataagtactttttcattgaatcctgcattgcactctttgtttccttcatcatcaatgtctttgttgtctcagtctttgctgaagcattttttgggaaaaccaacgagcaggtggttgaagtctgtacaaataccagcagtcctcatgctggcctctttcctaaagataactcgacactggctgtggacatctacaaagggggtgttgtgctgggatgttactttgggcctgctgcactctacatttgggcagtggggatcctggctgcaggacagagctccaccatgacaggaacctattctggccagtttgtcatggagggattcctgaacctaaagtggtcacgctttgcccgagtggttctgactcgctctattgccatcatccccactctgcttgttgctgtcttccaagatgtagagcatctaacagggatgaatgactttctgaatgttctacagagcttacagcttccctttgctctcatacccatcctcacatttacgagcttgcggccagtaatgagtgactttgccaatggactaggctggcggattgcaggaggaatcttggtccttatcatctgttccatcaatatgtactttgtagtggtttatgtccgggacctagggcatgtggcattatatgtggtggctgctgtggtcagcgtggcttatctgggctttgtgttctacttgggttggcaatgtttgattgcactgggcatgtccttcctggactgtgggcatacggtaagcatctctaaaggcctgctgacagaagaagccacccgtggctacgttaaataacactggattagtctgtcttctgcaggtagccatcagagccagtgtgtttctatggtttactgtgtgaacatagccaaaagtatgtgccgttgcacagactgtgtttatgactcaaccgttggttggaaaagactttgtttcatgtgtatttgaaagatggaattattttttccttcctgacctaaccttagaactggattagggtgggatctttgaaaagctgacatttgctgctatcattccaacactaaattcttaagtagttgcccaagggccagctcagtttatccttcggagagacaaggatatgcatgattcttaaccaggctatatgttaaaaaaaaattggaaaatgcaatacattttttattatacaaactacagaatgagtatgcaagttttatttatcaaaatgtaatggatttttaaaggctgagaaattttccttatacctaccttttcagttattttaattataccaaattatcaactagaatagcttcatccatatgaaatataaaatgaagagacacctagctctatcaggcttaggattctttgaacttatttccactttaatttctcagtggaagttaagaggggtgagaaaacaaagaaggggaaaaactgacaactaacaaaaccagcaccacatcgctaggtggtgcttactaattaccttctcaggattttcctcagattgaaaagcttatgaggatttcttgggagtcttaataacctgcctgttagtacagagctttcctgatgatatttactcttgagcacatgtggttgtaaaaccttaactttctttctccaggagggtggtgatagaaacagatggtagtatttatgaactgatgttctcgtgaaatgttgagggtggggagaaaagactttaagggaggagagccatctattttgttcctaaagccacctctcagcagaatcgtcatgtttttctgatgcaccgctctgcttcatgcccaagatgacttgcgaggcaatctcaggagctgtggacttaaccattgcaaagcacactgtctttctcagcgttctctgcaagtcagtaggtgttagtatggttgcaaagttcactgtctcagcaaagttgaactgggctacctctctacagctgtttcctcagagggaaaaatcttgagaccagatggtggagctctggagtcagaggaaatgggtgtcttcagcacaaagctgctgcttttacttcagccacttctgacatttttacataccgagcctgagattgtgtgattatctcaaatcaaatcactttgatggagataaataatcaaaactgttttatagtcattgatttggtgagaacagtaatggaaaatggtgttgaaggacttctcatttttggagctttccttccagagtcctggctgattggtgttcgctgttcatctgagcccccaaaagcattattactgatacttgcacacagtcaaaagcgcagactggatggatggtcttttataaggcatttaagggtacactactgtgtttcactgaccatacatttttcttagcccctcaagtaatatagcacagagttatgaatgacaattcccctaaccattcctcttcatatctgcctcttccccttaccatcgtaattctccaaactggtcataaaggcactctgtgaagatattggggactgacatcttaagctctcacctggctgcagtaggaaaggccaaactgacgacaaaaaaaaaattctttataaagatgatatggtaacatgtatctttgccctgggtctgggtgggtccagtcagtctcagatttacaagcatttaggagcctaggtaaaagctgctagtattcttttaaaagttatatttatgacttgcaatgatagaaaactccttccaattaaatggcattttataatattatgtgtgtacttcacagtgttaaataaccagtactctgggtgcaataaataatatgtagaaatttaagtcctccaattccagcatatccagtgagttttgacagtgtgtttatgtggaatgtttaaggatatacaattgtactttatataaattggttcttgttcttcttaaatgtgacatgaaataattgtgctgctacattatactggaaattaacaggggaaaagggaagagctcttggctcccttgaggttctgctagtggtgttaggagtggttacaactgagcttttagtaaccatttaaccgtatgtaaacttggtttctaattaaaaaaaaatttctttttcca

SEQ ID NO: 31193 - DNA, 4117 bp, Homo sapiens
  misc_feature (1)..(1): n is a, c, g, or t
  misc_feature (3)..(4): n is a, c, g, or t
  misc_feature (6)..(6): n is a, c, g, or t
ngnncnggcaccatgaggaagaagcagctgaagacggaggcagctccacactgtgaactaaaatcatattctaagaactcagccactcaggtatccaccatggtgctgggtcctgaacagaagatgtcagatgacagtgtttctggagatcatggggagtctgccagtcttggtaacatcaaccctgcctatagtaatccctctctttcacagtcccctggggactcagaggagtacttcgccacttactttaatgagaagatctccattcctgaggaggagtactcttgttttagctttcgtaaactctgggctttcaccggaccaggttttcttatgagcattgcctacctggatccaggaaatattgaatccgatttgcagtctggagcagtggctggatttaagttgctctggatccttctgttggccacccttgtggggctgctgctccagcggcttgcagctagactgggagtggttactgggctgcatcttgctgaagtatgtcaccgtcagtatcccaaggtcccacgagtcatcctgtggctgatggtggagttggctatcatcggctcagacatgcaagaagtcattggctcagccattgctatcaatcttctgtctgtaggaagaattcctctgtggggtggcgttctcatcaccattgcagatacttttgtatttctcttcttggacaaatatggcttgcggaagctagaagcattttttggctttctcatcactattatggccctcacatttggatatgagtatgttacagtgaaacccagccagagccaggtactcaagggcatgttcgtaccatcctgttcaggctgtcgcactccacagattgaacaggctgtgggcatcgtgggagctgtcatcatgccacacaacatgtacctgcattctgccttagtcaagtctagacaggtaaaccggaacaataagcaggaagttcgagaagccaataagtactttttcattgaatcctgcattgcactctttgtttccttcatcatcaatgtctttgttgtctcagtctttgctgaagcattttttgggaaaaccaacgagcaggtggttgaagtctgtacaaataccagcagtcctcatgctggcctctttcctaaagataactcgacactggctgtggacatctacaaagggggtgttgtgctgggatgttactttgggcctgctgcactctacatttgggcagtggggatcctggctgcaggacagagctccaccatgacaggaacctattctggccagtttgtcatggagggattcctgaacctaaagtggtcacgctttgcccgagtggttctgactcgctctattgccatcatccccactctgcttgttgctgtcttccaagatgtagagcatctaacagggatgaatgactttctgaatgttctacagagcttacagcttccctttgctctcatacccatcctcacatttacgagcttgcggccagtaatgagtgactttgccaatggactaggctggcggattgcaggaggaatcttggtccttatcatctgttccatcaatatgtactttgtagtggtttatgtccgggacctagggcatgtggcattatatgtggtggctgctgtggtcagcgtggcttatctgggctttgtgttctacttgggttggcaatgtttgattgcactgggcatgtccttcctggactgtgggcatacggtaagcatctctaaaggcctgctgacagaagaagccacccgtggctacgttaaataacactggattagtctgtcttctgcaggtagccatcagagccagtgtgtttctatggtttactgtgtgaacatagccaaaagtatgtgccgttgcacagactgtgtttatgactcaaccgttggttggaaaagactttgtttcatgtgtatttgaaagatggaattattttttccttcctgacctaaccttagaactggattagggtgggatctttgaaaagctgacatttgctgctatcattccaacactaaattcttaagtagttgcccaagggccagctcagtttatccttcggagagacaaggatatgcatgattcttaaccaggctatatgttaaaaaaaaattggaaaatgcaatacattttttattatacaaactacagaatgagtatgcaagttttatttatcaaaatgtaatggatttttaaaggctgagaaattttccttatacctaccttttcagttattttaattataccaaattatcaactagaatagcttcatccatatgaaatataaaatgaagagacacctagctctatcaggcttaggattctttgaacttatttccactttaatttctcagtggaagttaagaggggtgagaaaacaaagaaggggaaaaactgacaactaacaaaaccagcaccacatcgctaggtggtgcttactaattaccttctcaggattttcctcagattgaaaagcttatgaggatttcttgggagtcttaataacctgcctgttagtacagagctttcctgatgatatttactcttgagcacatgtggttgtaaaaccttaactttctttctccaggagggtggtgatagaaacagatggtagtatttatgaactgatgttctcgtgaaatgttgagggtggggagaaaagactttaagggaggagagccatctattttgttcctaaagccacctctcagcagaatcgtcatgtttttctgatgcaccgctctgcttcatgcccaagatgacttgcgaggcaatctcaggagctgtggacttaaccattgcaaagcacactgtctttctcagcgttctctgcaagtcagtaggtgttagtatggttgcaaagttcactgtctcagcaaagttgaactgggctacctctctacagctgtttcctcagagggaaaaatcttgagaccagatggtggagctctggagtcagaggaaatgggtgtcttcagcacaaagctgctgcttttacttcagccacttctgacatttttacataccgagcctgagattgtgtgattatctcaaatcaaatcactttgatggagataaataatcaaaactgttttatagtcattgatttggtgagaacagtaatggaaaatggtgttgaaggacttctcatttttggagctttccttccagagtcctggctgattggtgttcgctgttcatctgagcccccaaaagcattattactgatacttgcacacagtcaaaagcgcagactggatggatggtcttttataaggcatttaagggtacactactgtgtttcactgaccatacatttttcttagcccctcaagtaatatagcacagagttatgaatgacaattcccctaaccattcctcttcatatctgcctcttccccttaccatcgtaattctccaaactggtcataaaggcactctgtgaagatattggggactgacatcttaagctctcacctggctgcagtaggaaaggccaaactgacgacaaaaaaaaaattctttataaagatgatatggtaacatgtatctttgccctgggtctgggtgggtccagtcagtctcagatttacaagcatttaggagcctaggtaaaagctgctagtattcttttaaaagttatatttatgacttgcaatgatagaaaactccttccaattaaatggcattttataatattatgtgtgtacttcacagtgttaaaaataccctcatacgttattgcatttgatcttcacagaaagtgcattttaaccagtactctgggtgcaataaataatatgtagaaatttaagtcctccaattccagcatatccagtgagttttgacagtgtgtttatgtggaatgtttaaggatatacaattgtactttatataaattggttcttgttcttcttaaatgtgacatgaaataattgtgctgctacattatactggaaattaacaggggaaaagggaagagctcttggctcccttgaggttctgctagtggtgttaggagtggttacaactgagcttttagtaaccatttaaccgtatgtaaacttggtttctaattaaaaaaaaatttctttttcca

SEQ ID NO: 31194 - DNA, 4063 bp, Homo sapiens
cggacgcgtgggtcgacccacgcgtctcccggaatatggagccctgggcgcgggggcggcgtgtcaggtggttgcggagctggtaagaatcatattctaagaactcagccactcaggtatccaccatggtgctgggtcctgaacagaagatgtcagatgtcccctggggactcagaggagtacttcgccacttactttaatgagaagatctccattcctgaggaggagtactcttgttttagctttcgtaaactctgggctttcaccggaccaggttttcttatgagcattgcctacctggatccaggaaatattgaatccgatttgcagtctggagcagtggctggatttaagttgctctggatccttctgttggccacccttgtggggctgctgctccagcggcttgcagctagactgggagtggttactgggctgcatcttgctgaagtatgtcaccgtcagtatcccaaggtcccacgagtcatcctgtggctgatggtggagttggctatcatcggctcagacatgcaagaagtcattggctcagccattgctatcaatcttctgtctgtaggaagaattcctctgtggggtggcgttctcatcaccattgcagatacttttgtatttctcttcttggacaaatatggcttgcggaagctagaagcattttttggctttctcatcactattatggccctcacatttggatatgagtatgttacagtgaaacccagccagagccaggtactcaagggcatgttcgtaccatcctgttcaggctgtcgcactccacagattgaacaggctgtgggcatcgtgggagctgtcatcatgccacacaacatgtacctgcattctgccttagtcaagtctagacaggtaaaccggaacaataagcaggaagttcgagaagccaataagtactttttcattgaatcctgcattgcactctttgtttccttcatcatcaatgtctttgttgtctcagtctttgctgaagcattttttgggaaaaccaacgagcaggtggttgaagtctgtacaaataccagcagtcctcatgctggcctctttcctaaagataactcgacactggctgtggacatctacaaagggggtgttgtgctgggatgttactttgggcctgctgcactctacatttgggcagtggggatcctggctgcaggacagagctccaccatgacaggaacctattctggccagtttgtcatggagggattcctgaacctaaagtggtcacgctttgcccgagtggttctgactcgctctattgccatcatccccactctgcttgttgctgtcttccaagatgtagagcatctaacagggatgaatgactttctgaatgttctacagagcttacagcttccctttgctctcatacccatcctcacatttacgagcttgcggccagtaatgagtgactttgccaatggactaggctggcggattgcaggaggaatcttggtccttatcatctgttccatcaatatgtactttgtagtggtttatgtccgggacctagggcatgtggcattatatgtggtggctgctgtggtcagcgtggcttatctgggctttgtgttctacttgggttggcaatgtttgattgcactgggcatgtccttcctggactgtgggcatacggtaagcatctctaaaggcctgctgacagaagaagccacccgtggctacgttaaataacactggattagtctgtcttctgcaggtagccatcagagccagtgtgtttctatggtttactgtgtgaacatagccaaaagtatgtgccgttgcacagactgtgtttatgactcaaccgttggttggaaaagactttgtttcatgtgtatttgaaagatggaattattttttccttcctgacctaaccttagaactggattagggtgggatctttgaaaagctgacatttgctgctatcattccaacactaaattcttaagtagttgcccaagggccagctcagtttatccttcggagagacaaggatatgcatgattcttaaccaggctatatgttaaaaaaaaattggaaaatgcaatacattttttattatacaaactacagaatgagtatgcaagttttatttatcaaaatgtaatggatttttaaaggctgagaaattttccttatacctaccttttcagttattttaattataccaaattatcaactagaatagcttcatccatatgaaatataaaatgaagagacacctagctctatcaggcttaggattctttgaacttatttccactttaatttctcagtggaagttaagaggggtgagaaaacaaagaaggggaaaaactgacaactaacaaaaccagcaccacatcgctaggtggtgcttactaattaccttctcaggattttcctcagattgaaaagcttatgaggatttcttgggagtcttaataacctgcctgttagtacagagctttcctgatgatatttactcttgagcacatgtggttgtaaaaccttaactttctttctccaggagggtggtgatagaaacagatggtagtatttatgaactgatgttctcgtgaaatgttgagggtggggagaaaagactttaagggaggagagccatctattttgttcctaaagccacctctcagcagaatcgtcatgtttttctgatgcaccgctctgcttcatgcccaagatgacttgcgaggcaatctcaggagctgtggacttaaccattgcaaagcacactgtctttctcagcgttctctgcaagtcagtaggtgttagtatggttgcaaagttcactgtctcagcaaagttgaactgggctacctctctacagctgtttcctcagagggaaaaatcttgagaccagatggtggagctctggagtcagaggaaatgggtgtcttcagcacaaagctgctgcttttacttcagccacttctgacatttttacataccgagcctgagattgtgtgattatctcaaatcaaatcactttgatggagataaataatcaaaactgttttatagtcattgatttggtgagaacagtaatggaaaatggtgttgaaggacttctcatttttggagctttccttccagagtcctggctgattggtgttcgctgttcatctgagcccccaaaagcattattactgatacttgcacacagtcaaaagcgcagactggatggatggtcttttataaggcatttaagggtacactactgtgtttcactgaccatacatttttcttagcccctcaagtaatatagcacagagttatgaatgacaattcccctaaccattcctcttcatatctgcctcttccccttaccatcgtaattctccaaactggtcataaaggcactctgtgaagatattggggactgacatcttaagctctcacctggctgcagtaggaaaggccaaactgacgacaaaaaaaaaattctttataaagatgatatggtaacatgtatctttgccctgggtctgggtgggtccagtcagtctcagatttacaagcatttaggagcctaggtaaaagctgctagtattcttttaaaagttatatttatgacttgcaatgatagaaaactccttccaattaaatggcattttataatattatgtgtgtacttcacagtgttaaaaataccctcatacgttattgcatttgatcttcacagaaagtgcattttaaccagtactctgggtgcaataaataatatgtagaaatttaagtcctccaattccagcatatccagtgagttttgacagtgtgtttatgtggaatgtttaaggatatacaattgtactttatataaattggttcttgttcttcttaaatgtgacatgaaataattgtgctgctacattatactggaaattaacaggggaaaagggaagagctcttggctcccttgaggttctgctagtggtgttaggagtggttacaactgagcttttagtaaccatttaaccgtatgtaaacttggtttctaattaaaaaaaaatttctttttcca

SEQ ID NO: 31195 - DNA, 3447 bp, Homo sapiens
cggacgcgtgggtcgacccacgcgtctcccggaatatggagccctgggcgcgggggcggcgtgtcaggtggttgcggagctggtaagaatcatattctaagaactcagccactcaggtatccaccatggtgctgggtcctgaacagaagatgtcagatgacagtgtttctggagatcatggggagtctgccagtcttggtaacatcaaccctgcctatagtaatccctctctttcacagtcccctggggactcagaggagtacttcgccacttactttaatgagaagatctccattcctgaggaggagtactcttgttttagctttcgtaaactctgggctttcaccggaccaggttttcttatgagcattgcctacctggatccaggaaatattgaatccgatttgcagtctggagcagtggctggatttaagttgctctggatccttctgttggccacccttgtggggctgctgctccagcggcttgcagctagactgggagtggttactgggctgcatcttgctgaagtatgtcaccgtcagtatcccaaggtcccacgagtcatcctgtggctgatggtggagttggctatcatcggctcagacatgcaagaagtcattggctcagccattgctatcaatcttctgtctgtaggaagaattcctctgtggggtggcgttctcatcaccattgcagatacttttgtatttctcttcttggacaaatatggcttgcggaagctagaagcattttttggctttctcatcactattatggccctcacatttggatatgagctcacatttacgagcttgcggccagtaatgagtgactttgccaatggactaggctggcggattgcaggaggaatcttggtccttatcatctgttccatcaatatgtactttgtagtggtttatgtccgggacctagggcatgtggcattatatgtggtggctgctgtggtcagcgtggcttatctgggctttgtgttctacttgggttggcaatgtttgattgcactgggcatgtccttcctggactgtgggcatacggtaagcatctctaaaggcctgctgacagaagaagccacccgtggctacgttaaataacactggattagtctgtcttctgcaggtagccatcagagccagtgtgtttctatggtttactgtgtgaacatagccaaaagtatgtgccgttgcacagactgtgtttatgactcaaccgttggttggaaaagactttgtttcatgtgtatttgaaagatggaattattttttccttcctgacctaaccttagaactggattagggtgggatctttgaaaagctgacatttgctgctatcattccaacactaaattcttaagtagttgcccaagggccagctcagtttatccttcggagagacaaggatatgcatgattcttaaccaggctatatgttaaaaaaaaattggaaaatgcaatacattttttattatacaaactacagaatgagtatgcaagttttatttatcaaaatgtaatggatttttaaaggctgagaaattttccttatacctaccttttcagttattttaattataccaaattatcaactagaatagcttcatccatatgaaatataaaatgaagagacacctagctctatcaggcttaggattctttgaacttatttccactttaatttctcagtggaagttaagaggggtgagaaaacaaagaaggggaaaaactgacaactaacaaaaccagcaccacatcgctaggtggtgcttactaattaccttctcaggattttcctcagattgaaaagcttatgaggatttcttgggagtcttaataacctgcctgttagtacagagctttcctgatgatatttactcttgagcacatgtggttgtaaaaccttaactttctttctccaggagggtggtgatagaaacagatggtagtatttatgaactgatgttctcgtgaaatgttgagggtggggagaaaagactttaagggaggagagccatctattttgttcctaaagccacctctcagcagaatcgtcatgtttttctgatgcaccgctctgcttcatgcccaagatgacttgcgaggcaatctcaggagctgtggacttaaccattgcaaagcacactgtctttctcagcgttctctgcaagtcagtaggtgttagtatggttgcaaagttcactgtctcagcaaagttgaactgggctacctctctacagctgtttcctcagagggaaaaatcttgagaccagatggtggagctctggagtcagaggaaatgggtgtcttcagcacaaagctgctgcttttacttcagccacttctgacatttttacataccgagcctgagattgtgtgattatctcaaatcaaatcactttgatggagataaataatcaaaactgttttatagtcattgatttggtgagaacagtaatggaaaatggtgttgaaggacttctcatttttggagctttccttccagagtcctggctgattggtgttcgctgttcatctgagcccccaaaagcattattactgatacttgcacacagtcaaaagcgcagactggatggatggtcttttataaggcatttaagggtacactactgtgtttcactgaccatacatttttcttagcccctcaagtaatatagcacagagttatgaatgacaattcccctaaccattcctcttcatatctgcctcttccccttaccatcgtaattctccaaactggtcataaaggcactctgtgaagatattggggactgacatcttaagctctcacctggctgcagtaggaaaggccaaactgacgacaaaaaaaaaattctttataaagatgatatggtaacatgtatctttgccctgggtctgggtgggtccagtcagtctcagatttacaagcatttaggagcctaggtaaaagctgctagtattcttttaaaagttatatttatgacttgcaatgatagaaaactccttccaattaaatggcattttataatattatgtgtgtacttcacagtgttaaaaataccctcatacgttattgcatttgatcttcacagaaagtgcattttaaccagtactctgggtgcaataaataatatgtagaaatttaagtcctccaattccagcatatccagtgagttttgacagtgtgtttatgtggaatgtttaaggatatacaattgtactttatataaattggttcttgttcttcttaaatgtgacatgaaataattgtgctgctacattatactggaaattaacaggggaaaagggaagagctcttggctcccttgaggttctgctagtggtgttaggagtggttacaactgagcttttagtaaccatttaaccgtatgtaaacttggtttctaattaaaaaaaaatttctttttcca

SEQ ID NO: 31196 - DNA, 4149 bp, Homo sapiens
  misc_feature (3184)..(3184): n is a, c, g, or t
  misc_feature (3193)..(3193): n is a, c, g, or t
  misc_feature (3908)..(3908): n is a, c, g, or t
cggacgcgtgggtcgacccacgcgtctcccggaatatggagccctgggcgcgggggcggcgtgtcaggtggttgcggagctggtaagaatcatattctaagaactcagccactcaggtatccaccatggtgctgggtcctgaacagaagatgtcagatgacagtgtttctggagatcatggggagtctgccagtcttggtaacatcaaccctgcctatagtaatccctctctttcacagtcccctggggactcagaggagtacttcgccacttactttaatgagaagatctccattcctgaggaggagtactcttgttttagctttcgtaaactctgggctttcaccggaccaggttttcttatgagcattgcctacctggatccaggaaatattgaatccgatttgcagtctggagcagtggctggatttaagttgctctggatccttctgttggccacccttgtggggctgctgctccagcggcttgcagctagactgggagtggttactgggctgcatcttgctgaagtatgtcaccgtcagtatcccaaggtcccacgagtcatcctgtggctgatggtggagttggctatcatcggctcagacatgcaagaagtcattggctcagccattgctatcaatcttctgtctgtaggaagaattcctctgtggggtggcgttctcatcaccattgcagatacttttgtatttctcttcttggacaaatatggcttgcggaagctagaagcattttttggctttctcatcactattatggccctcacatttggatatgagtatgttacagtgaaacccagccagagccaggtactcaagggcatgttcgtaccatcctgttcaggctgtcgcactccacagattgaacaggctgtgggcatcgtgggagctgtcatcatgccacacaacatgtacctgcattctgccttagtcaagtctagacaggtaaaccggaacaataagcaggaagttcgagaagccaataagtactttttcattgaatcctgcattgcactctttgtttccttcatcatcaatgtctttgttgtctcagtctttgctgaagcattttttgggaaaaccaacgagcaggtggttgaagtctgtacaaataccagcagtcctcatgctggcctctttcctaaagataactcgacactggctgtggacatctacaaagggggtgttgtgctgggatgttactttgggcctgctgcactctacatttgggcagtggggatcctggctgcaggacagagctccaccatgacaggaacctattctggccagtttgtcatggagggattcctgaacctaaagtggtcacgctttgcccgagtggttctgactcgctctattgccatcatccccactctgcttgttgctgtcttccaagatgtagagcatctaacagggatgaatgactttctgaatgttctacagagcttacagcttccctttgctctcatacccatcctcacatttacgagcttgcggccagtaatgagtgactttgccaatggactaggctggcggattgcaggaggaatcttggtccttatcatctgttccatcaatatgtactttgtagtggtttatgtccgggacctagggcatgtggcattatatgtggtggctgctgtggtcagcgtggcttatctgggctttgtgttctacttgggttggcaatgtttgattgcactgggcatgtccttcctggactgtgggcatacgtgccatctgggattgacagctcagcctgaactctatcttctgaacaccatggacgctgactcacttgtgtctagatgactgacagcctgagagactctataagaacatgtttttctaagccctttttgtgccaggtgtcccgttaacgtctctgttagttcagaggtgagttttgttcagacgttttgaacaaaaggcaaagatttcctcatgggaagggtgttcaaaactgacagctataaatgtaggtcagagacccacccacctcataacagtcatacactcccagagttaaacgattggcctctgatggccacacacccctatgggcttgtgtcttggactctgggatttaaaagatatatatgtatatatatttatgtaaacctgagcatctcagtttgggtagagttttaaggttatatgaaactgatagaacttttgtattttttttttaaatattgttttgatatatcagatatttgttttgtctggatcacaagtgagaaagaaaagagaataatgctctttttcacaatgaactggtcaaattgactatcttgtaaagtgatactttactatgtcagtgaaatttcagtttgattttagtcaaccagattatatcctttgtatctactgatattaacacatcatattaacacatcatttcttaaaaaaacatttcttctgtttggcaatcataattaactctggttatcagcctattttgtaattattgtctttgtcgtcacttttcttgaattgttttctagtcattaaacagatatgaaggcattgccaaagagctttaatatccagtaacaagatccagaaaccaaactttaaccagtgatcagttttccgtgctgcattgtaactcagctcattctggcattcaagttttaggcaaaaaaagaggaaacttctaacatttagcttgtaagtcctgacataagatagtgaagatatttatcttctttctaatatttgtatagtccgccaatgtattttcttcccactattcccattaacataccaaacactgtttctaggtccaaagtctatttctaggagtggccaatatttgtattgttgaatctcctagggaatgctaaatgtttcactttaaaatacctatttataccaagtagcatgagattagtactagagtgagatttggaatattagtccacatatcacaaactgcttgcctacatgtatagattttttttttcacccaccttcctaaccaggaatttgtttccttaaatttgttgttgttgttgttgttgtttgttgttatttttttgagaagagtcttgccctgtcgccaaggcgggaatgcattgacgtgatctcagttcactgtaacctctacctccccggtttaatcgattctcctccttcagcctcctgaatagctgggattncaggcaccncatttttagtggagatggggtttcaccatgttggccaggctggtctcaaactcttgacctcaagtgatctacctgcctcagcctcccaaagtgctgggattacaggtgtgagccactgcacccagcgttttttgttgttaagacagggtcttgctctgttgcccaggctggagtgcagtggtgtgatctcagctcactgcaacttctgccacctgggcttaagccatcctcccacttcagcatcccaaatagctgggactgcaggcacacaccaccacacccagctaatttttgtattttttgtagagacgggatttcaccatgttgcccaggctggtgttgaactcatgagctcaagtaatctgctggccttggcctcccaaagtgctgagattataggcgtgaaccactgcatccagctcactcctcatttctttctagccccaaaggtgttgagtcagcaaatcctgcagcctttgtgtgactttgagcatcactttcccctttcagcattaaatatatgacctctctgccttattttagaacttactacatttcaataaaactttttaaaaaatccagacattgcctatgttcgtttataatcggcccttaaagaggcagggatttttctaaaatgacactttaaaatttcctcatttctacttcagggcctcttgaaacttcagataatgagagcagccaaccctgcaantcaggctatagagtccttctgatcttaaaactgagactgaattcacatcagttttcgcttttacttgaaaaagagactcttaagtgttttggtttctttatacaggacaacaactctagatgaaaccagtgtgttggattttccccgcctccctgggtggttttatttctcagttgtttcattaccagagagtgttggggaaacgaaggtaaaaaataaaaacatcctgttgtgaaactca

SEQ ID NO: 31197 - DNA, 3156 bp, Homo sapiens
gcagagaaacgaaggagcatccagtaaagtttagactgaaagcttctggaatgaggtccggacttgagcctagcttctggcacagtgcccagcacagcacttggtgttggtggtgcatagcaaagaagggagaaatgccacagggaactgctgttttggatattgtctgagcagattattgccacaatcatatccttcctcttggcctctcacagggtgttgtgctgggatgttactttgggcctgctgcactctacatttgggcagtggggatcctggctgcaggacagagctccaccatgacaggaacctattctggccagtttgtcatggagggattcctgaacctaaagtggtcacgctttgcccgagtggttctgactcgctctattgccatcatccccactctgcttgttgctgtcttccaagatgtagagcatctaacagggatgaatgactttctgaatgttctacagagcttacagcttccctttgctctcatacccatcctcacatttacgagcttgcggccagtaatgagtgactttgccaatggactaggctggcggattgcaggaggaatcttggtccttatcatctgttccatcaatatgtactttgtagtggtttatgtccgggacctagggcatgtggcattatatgtggtggctgctgtggtcagcgtggcttatctgggctttgtgttctacttgggttggcaatgtttgattgcactgggcatgtccttcctggactgtgggcatacggtaagcatctctaaaggcctgctgacagaagaagccacccgtggctacgttaaataacactggattagtctgtcttctgcaggtagccatcagagccagtgtgtttctatggtttactgtgtgaacatagccaaaagtatgtgccgttgcacagactgtgtttatgactcaaccgttggttggaaaagactttgtttcatgtgtatttgaaagatggaattattttttccttcctgacctaaccttagaactggattagggtgggatctttgaaaagctgacatttgctgctatcattccaacactaaattcttaagtagttgcccaagggccagctcagtttatccttcggagagacaaggatatgcatgattcttaaccaggctatatgttaaaaaaaaattggaaaatgcaatacattttttattatacaaactacagaatgagtatgcaagttttatttatcaaaatgtaatggatttttaaaggctgagaaattttccttatacctaccttttcagttattttaattataccaaattatcaactagaatagcttcatccatatgaaatataaaatgaagagacacctagctctatcaggcttaggattctttgaacttatttccactttaatttctcagtggaagttaagaggggtgagaaaacaaagaaggggaaaaactgacaactaacaaaaccagcaccacatcgctaggtggtgcttactaattaccttctcaggattttcctcagattgaaaagcttatgaggatttcttgggagtcttaataacctgcctgttagtacagagctttcctgatgatatttactcttgagcacatgtggttgtaaaaccttaactttctttctccaggagggtggtgatagaaacagatggtagtatttatgaactgatgttctcgtgaaatgttgagggtggggagaaaagactttaagggaggagagccatctattttgttcctaaagccacctctcagcagaatcgtcatgtttttctgatgcaccgctctgcttcatgcccaagatgacttgcgaggcaatctcaggagctgtggacttaaccattgcaaagcacactgtctttctcagcgttctctgcaagtcagtaggtgttagtatggttgcaaagttcactgtctcagcaaagttgaactgggctacctctctacagctgtttcctcagagggaaaaatcttgagaccagatggtggagctctggagtcagaggaaatgggtgtcttcagcacaaagctgctgcttttacttcagccacttctgacatttttacataccgagcctgagattgtgtgattatctcaaatcaaatcactttgatggagataaataatcaaaactgttttatagtcattgatttggtgagaacagtaatggaaaatggtgttgaaggacttctcatttttggagctttccttccagagtcctggctgattggtgttcgctgttcatctgagcccccaaaagcattattactgatacttgcacacagtcaaaagcgcagactggatggatggtcttttataaggcatttaagggtacactactgtgtttcactgaccatacatttttcttagcccctcaagtaatatagcacagagttatgaatgacaattcccctaaccattcctcttcatatctgcctcttccccttaccatcgtaattctccaaactggtcataaaggcactctgtgaagatattggggactgacatcttaagctctcacctggctgcagtaggaaaggccaaactgacgacaaaaaaaaaattctttataaagatgatatggtaacatgtatctttgccctgggtctgggtgggtccagtcagtctcagatttacaagcatttaggagcctaggtaaaagctgctagtattcttttaaaagttatatttatgacttgcaatgatagaaaactccttccaattaaatggcattttataatattatgtgtgtacttcacagtgttaaaaataccctcatacgttattgcatttgatcttcacagaaagtgcattttaaccagtactctgggtgcaataaataatatgtagaaatttaagtcctccaattccagcatatccagtgagttttgacagtgtgtttatgtggaatgtttaaggatatacaattgtactttatataaattggttcttgttcttcttaaatgtgacatgaaataattgtgctgctacattatactggaaattaacaggggaaaagggaagagctcttggctcccttgaggttctgctagtggtgttaggagtggttacaactgagcttttagtaaccatttaaccgtatgtaaacttggtttctaattaaaaaaaaatttctttttcca

SEQ ID NO: 31198 - DNA, 2191 bp, Homo sapiens
cggacgcgtgggtcgacccacgcgtctcccggaatatggagccctgggcgcgggggcggcgtgtcaggtggttgcggagctggtaagaatcatattctaagaactcagccactcaggtatccaccatggtgctgggtcctgaacagaagatgtcagatgacagtgtttctggagatcatggggagtctgccagtcttggtaacatcaaccctgcctatagtaatccctctctttcacagtcccctggggactcagaggagtacttcgccacttactttaatgagaagatctccattcctgaggaggagtactcttgttttagctttcgtaaactctgggctttcaccggaccaggttttcttatgagcattgcctacctggatccaggaaatattgaatccgatttgcagtctggagcagtggctggatttaagttgctctggatccttctgttggccacccttgtggggctgctgctccagcggcttgcagctagactgggagtggttactgggctgcatcttgctgaagtatgtcaccgtcagtatcccaaggtcccacgagtcatcctgtggctgatggtggagttggctatcatcggctcagacatgcaagaagtcattggctcagccattgctatcaatcttctgtctgtaggaagaattcctctgtggggtggcgttctcatcaccattgcagatacttttgtatttctcttcttggacaaatatggcttgcggaagctagaagcattttttggctttctcatcactattatggccctcacatttggatatgagtatgttacagtgaaacccagccagagccaggtactcaagggcatgttcgtaccatcctgttcaggctgtcgcactccacagattgaacaggctgtgggcatcgtgggagctgtcatcatgccacacaacatgtacctgcattctgccttagtcaagtctagacaggtaaaccggaacaataagcaggaagttcgagaagccaataagtactttttcattgaatcctgcattgcactctttgtttccttcatcatcaatgtctttgttgtctcagtctttgctgaagcattttttgggaaaaccaacgagcaggtggttgaagtctgtacaaataccagcagtcctcatgctggcctctttcctaaagataactcgacactggctgtggacatctacaaagggggtgttgtgctgggatgttactttgggcctgctgcactctacatttgggcagtggggatcctggctgcaggacagagctccaccatgacaggaacctattctggccagtttgtcatggagggattcctgaacctaaagtggtcacgctttgcccgagtggttctgactcgctctattgccatcatccccactctgcttgttgctgtcttccaagatgtagagcatctaacagggatgaatgactttctgaatgttctacagagcttacagcttccctttgctctcatacccatcctcacatttacgagcttgcggccagtaatgagtgactttgccaatggactaggctggcggattgcaggaggaatcttggtccttatcatctgttccatcaatatgtactttgtagtggtttatgtccgggacctagggcatgtggcattatatgtggtggctgctgtggtcagcgtggcttatctgggctttgtgttctacttgggttggcaatgtttgattgcactgggcatgtccttcctggactgtgggcatacggtaagcatctctaaaggcctgctgacagaagaagccacccgtggctacgttaaataacactggattagtctgtcttctgcaggtagccatcagagccagtgtgtttctatggtttactgtgtgaacatagccaaaagtatgtgccgttgcacagactgtgtttatgactcaaccgttggttggaaaagactttgtttcatgtgtatttgaaagatggaattattttttccttcctgacctaaccttagaactggattagggtgggatctttgaaaagctgacatttgctgctatcattccaacactaaattcttaagtagttgcccaagggccagctcagtttatccttcggagagacaaggatatgcatgattcttaaccaggctatatgttaaaaaaaaattggaaaatgcaatacattttttattatacaaact

SEQ ID NO: 31199 - DNA, 2055 bp, Homo sapiens
cggacgcgtgggtcgacccacgcgtctcccggaatatggagccctgggcgcgggggcggcgtgtcaggtggttgcggagctggtaagaatcatattctaagaactcagccactcaggtatccaccatggtgctgggtcctgaacagaagatgtcagatgacagtgtttctggagatcatggggagtctgccagtcttggtaacatcaaccctgcctatagtaatccctctctttcacagtcccctggggactcagaggagtacttcgccacttactttaatgagaagatctccattcctgaggaggagtactcttgttttagctttcgtaaactctgggctttcaccggaccaggttttcttatgagcattgcctacctggatccaggaaatattgaatccgatttgcagtctggagcagtggctggatttaagttgctctggatccttctgttggccacccttgtggggctgctgctccagcggcttgcagctagactgggagtggttactgggctgcatcttgctgaagtatgtcaccgtcagtatcccaaggtcccacgagtcatcctgtggctgatggtggagttggctatcatcggctcagacatgcaagaagtcattggctcagccattgctatcaatcttctgtctgtaggaagaattcctctgtggggtggcgttctcatcaccattgcagatacttttgtatttctcttcttggacaaatatggcttgcggaagctagaagcattttttggctttctcatcactattatggccctcacatttggatatgagtatgttacagtgaaacccagccagagccaggtactcaagggcatgttcgtaccatcctgttcaggctgtcgcactccacagattgaacaggctgtgggcatcgtgggagctgtcatcatgccacacaacatgtacctgcattctgccttagtcaagtctagacaggtaaaccggaacaataagcaggaagttcgagaagccaataagtactttttcattgaatcctgcattgcactctttgtttccttcatcatcaatgtctttgttgtctcagtctttgctgaagcattttttgggaaaaccaacgagcaggtggttgaagtctgtacaaataccagcagtcctcatgctggcctctttcctaaagataactcgacactggctgtggacatctacaaagggggtgttgtgctgggatgttactttgggcctgctgcactctacatttgggcagtggggatcctggctgcaggacagagctccaccatgacaggaacctattctggccagtttgtcatggagggattcctgaacctaaagtggtcacgctttgcccgagtggttctgactcgctctattgccatcatccccactctgcttgttgctgtcttccaagatgtagagcatctaacagggatgaatgactttctgaatgttctacagagcttacagcttccctttgctctcatacccatcctcacatttacgagcttgcggccagtaatgagtgactttgccaatggactaggctggcggattgcaggaggaatcttggtccttatcatctgttccatcaatatgtactttgtagtggtttatgtccgggacctagggcatgtggcattatatgtggtggctgctgtggtcagcgtggcttatctgggctttgtgttctacttgggttggcaatgtttgattgcactgggcatgtccttcctggactgtgggcatacgtgccatctgggattgacagctcagcctgaactctatcttctgaacaccatggacgctgactcacttgtgtctagatgactgacagcctgagagactctataagaacatgtttttctaagccctttttgtgccaggtgtcccgttaacgtctctgttagttcagaggacaacaactctagatgaaaccagtgtgttggattttccccgcctccctgggtggttttatttctcagttgtttcattaccagagagtgttggggaaacgaaggtaaaaaataaaaacatcctgttgtgaaactca

SEQ ID NO: 31200 - DNA, 480 bp, Homo sapiens
cggacgcgtgggtcgacccacgcgtctcccggaatatggagccctgggcgcgggggcggcgtgtcaggtggttgcggagctggtaagaatcatattctaagaactcagccactcaggtatccaccatggtgctgggtcctgaacagaagatgtcagatgacagtgtttctggagatcatggggagtctgccagtcttggtaacatcaaccctgcctatagtaatccctctctttcacagtcccctggggactcagaggagtacttcgccacttactttaatgagaagatctccattcctgaggaggagtactcttgttttagctttcgtaaactctgggctttcaccggaccaggttttcttatgagcattgcctacctggatccaggaaatattgaatccgatttgcagtctggagcagtggctggatttaagttgctctggatccttctgttgccacctcgatactcggtccagcgcc

SEQ ID NO: 31201 - DNA, 422 bp, Homo sapiens
ctgcttacgtaagcagctaaaggaaagcagccctaatgaattggtatcccatttcagttattgttaaaatatacaccatgacattcaatattcagtgttttttgaaatggtttaagcataactctttaataagatcttaaatgcccattcttatttaaagtcatttttggttttcacactaaattacgctttttttccctttacttttgcatctattaactctattccttaaattattattatttttacttttgtttctcaaggagttatctcaattttgaggaatcatgctggggcaaggattgcagttgaagtattttgcttttggagtgtataatagtatgaataattttgtgatgttttggggtttggattactttgggaagatctgtgtcattaaacatcataaaaagaattcccat

SEQ ID NO: 31202 - DNA, 456 bp, Homo sapiens
ctatagactgagcaccgaggaatcagttgtggaggaggtgtgacttaaactgggatatgggcagaagttgcataaggcttgtggccagtagctgagccagactccaatcccatgtccttttaatactatgacctctatcacatctatgagtttaaaagacaaaacaccgggcgcggtggctcatgcctgtaatcccagcactttgggaggctgaggtgggtggatcacctgaggtcgggagttcgagaccagcctgaccaacatggagaaaccccgtctctactaaaaatacaaaattagccgggcgtggtggcacatgcctgtaatcccagttactagggaggctgaggcaggagaatcacttgaacctgggaggcagaggttgcagtgagccgagatcgtgccattgcactccagcctgggcaacaagagcaaaactctatctcaaaaaaaaaa

SEQ ID NO: 31203 - DNA, 278 bp, Homo sapiens
aggcgtggcctgtgtggtgcttttggcacttacacgtggtcttgtctggccagttgtctggtcctgtcggtttctgcctttcctctttctccagggaaaacctaagctttccttgtttgtcctcatcttgtgtttttctgggtccatgggcagagtagagttctggaacggtttcctaaagcagacaaaccctacccattgttttttttttgttgttgttgttttttgagacagagtctcgcactgttgccaagctggtgtgcagtggtgcagtctcg

SEQ ID NO: 31204 - DNA, 397 bp, Homo sapiens
ttatggtattttgattccatttacatagttttaatttttatgcagttaagtgttcgacatcttccttcacggctcctgggaatgaaaatatttacacagtgcattttgtgcaggctttccacacattatcatagttaattctcacagcagccttggaagcgaggcagggtgggaatttttagcttcagttccattttaaggatgagttcaaatgagtctcagaaaagtcgtgggacttgcccaggtccaacagattctaaaacctttgtcattctcacttcctcacctgccttccaaccagccaggtgacctactcctggcactgacaacaaaagtatatggcttctcagggactgcatttttaaatattaaaactacaagcatcttatcttccctt

SEQ ID NO: 31205 - DNA, 3192 bp, Homo sapiens
gagagagagagagagagagaactagtctcgaggtcgacgcggccgcgaattcgcggccgcgtcgaccgaagacgcaggctctatttagagccgggtaggggagcgcagcggccagatacctcagcgctacctggcggaactggatttctctcccgcctgccggcctgcctgccacagccggactccgccactccggtagcctcatggctgcaacctgtgagattagcaacatttttagcaactacttcagtgcgatgtacagctcggaggactccaccctggcctctgttccccctgctgccacctttggggccgatgacttggtactgaccctgagcaacccccagatgtcattggagggtacagagaaggccagctggttgggggaacagccccagttctggtcgaagacgcaggttctggactggatcagctaccaagtggagaagaacaagtacgacgcaagcgccattgacttctcacgatgtgacatggatggcgccaccctctgcaattgtgcccttgaggagctgcgtctggtctttgggcctctgggggaccaactccatgcccagctgcgagacctcacttccagctcttctgatgagctcagttggatcattgagctgctggagaaggatggcatggccttccaggaggccctagacccagggccctttgaccagggcagcccctttgcccaggagctgctggacgacggtcagcaagccagcccctaccaccccggcagctgtggcgcaggagccccctcccccggcagctctgacgtctccaccgcagggactggtgcttctcggagctcccactcctcagactccggtggaagtgacgtggacctggatcccactgatggcaagctcttccccagcgatggttttcgtgactgcaagaagggggatcccaagcacgggaagcggaaacgaggccggccccgaaagctgagcaaagagtactgggactgtctcgagggcaagaagagcaagcacgcgcccagaggcacccacctgtgggagttcatccgggacatcctcatccacccggagctcaacgagggcctcatgaagtgggagaatcggcatgaaggcgtcttcaagttcctgcgctccgaggctgtggcccaactatggggccaaaagaaaaagaacagcaacatgacctacgagaagctgagccgggccatgaggtactactacaaacgggagatcctggaacgggtggatggccggcgactcgtctacaagtttggcaaaaactcaagcggctggaaggaggaagaggttctccagagtcggaactgagggttggaactatacccgggaccaaactcacggaccactcgaggcctgcaaaccttcctgggaggacaggcaggccagatggcccctccactggggaatgctcccagctgtgctgtggagagaagctgatgttttggtgtattgtcagccatcgtcctgggactcggagactatggcctcgcctccccaccctcctcttggaattacaagccctggggtttgaagctgactttatagctgcaagtgtatctccttttatctggtgcctcctcaaacccagtctcagacactaaatgcagacaacaccttcctcctgcagacacctggactgagccaaggaggcctggggaggccctaggggagcaccgtgatggagaggacagagcaggggctccagcaccttctttctggactggcgttcacctccctgctcagtgcttgggctccacgggcaggggtcagagcactccctaatttatgtgctatataaatatgtcagatgtacatagagatctattttttctaaaacattcccctccccactcctctcccacagagtgctggactgttccaggccctccagtgggctgatgctgggacccttaggatggggctcccagctcctttctcctgtgaatggaggcagagacctccaataaagtgccttctgggctttttctaacctttgtcttagctacctgtgtactgaaatttgggcctttggatcgaatatggtcaagaggttggaggggaggaaaatgaaggtctaccaggctgagggtgagggcaaaggctgacgaagaggggagttacagatttcctgtagcaggtgtgggcttacagacacatggactgggctgggaggcgagcaaaggaagcagctgagactgttggagaacgcttacaagacttcatgcaagcaaggacatgaactcagaacactgaggtcagaagcatcctgctgtcatgacaccgctcgagtgaccttgaccttgaccaagtctgtcctgtttaggactgatttttcctattaggctagggtttggacctgatgttctcaagatgtctagaattgcatggctggccttgtggaatagatggttttgcattccagccaagtgtgctgtaaactgtatatctgtaatatgaatcccagcttttgagtctgacaaaatcagagttaggatcttgtaaaggaaaaaaaaaaaaaacaaaacaaaatggagatgagtacttgctgagaaagaatgagggaaggagttggcatttgttgaaagtatagtctttttctcttttttttttaattgcaacttttactttagatttaggaggtcgtgcgcaggtttgttacatgggtatattgtgtgatgctgagcttgggatgcgaatgatcctgtcacccaggtagtgagtatagcacccagtgaaactgtagtctcatgccaggcactgtgctagcccactctggctcatttaatcctctcctaagaagagaggagacacagcgtccccatttgacagatgcagaaagaggttccacaggtgtgccttgattctgtcctaaaaccgtttcccggaagcttttcctggtgtgggcgcttctaacctaatcctcaatcgattccagaactattactctgtttccacagtgatactgtgtctaggttttagggaggacagttcattgatgttacttaagaatgctttccaggtggaaagttccttaagtttgaggcttcaaattccatacagcacattaaaatcccattcatgagtttgaaatactgctctgttgtcttggaaataccaatcagattgttggctgaagtgatgtggataaagaagggatcttagaaaaactaaagcttgtgtg

SEQ ID NO: 31206 - DNA, 1976 bp, Homo sapiens
aagacaacgcacaaaaaactgacaactagataggtacgaggccggtgtttgagctctatttagagccgggtaggggagcgcagcggccagatacctcagcgctacctggcggaactggatttctctcccgcctgccggcctgcctgccacagccggactccgccactccggtagcctcatggctgcaacctgtgagattagcaacatttttagcaactacttcagtgcgatgtacagctcggaggactccaccctggcctctgttccccctgctgccacctttggggccgatgacttggtactgaccctgagcaacccccagatgtcattggagggtacagagaaggccagctggttgggggaacagccccagttctggtcgaagacgcaggttctggactggatcagctaccaagtggagaagaacaagtacgacgcaagcgccattgacttctcacgatgtgacatggatggcgccaccctctgcaattgtgcccttgaggagctgcgtctggtctttgggcctctgggggaccaactccatgcccagctgcgagacctcacttccagctcttctgatgagctcagttggatcattgagctgctggagaaggatggcatggccttccaggaggccctagacccagggccctttgaccagggcagcccctttgcccaggagctgctggacgacggtcagcaagccagcccctaccaccccggcagctgtggcgcaggagccccctcccccggcagctctgacgtctccaccgcagggactggtgcttctcggagctcccactcctcagactccggtggaagtgacgtggacctggatcccactgatggcaagctcttccccagcgatggttttcgtgactgcaagaagggggatcccaagcacgggaagcggaaacgaggccggccccgaaagctgagcaaagagtactgggactgtctcgagggcaagaagagcaagcacgcgcccagaggcacccacctgtgggagttcatccgggacatcctcatccacccggagctcaacgagggcctcatgaagtgggagaatcggcatgaaggcgtcttcaagttcctgcgctccgaggctgtggcccaactatggggccaaaagaaaaagaacagcaacatgacctacgagaagctgagccgggccatgaggtactactacaaacgggagatcctggaacgggtggatggccggcgactcgtctacaagtttggcaaaaactcaagcggctggaaggaggaagaggttctccagagtcggaactgagggttggaactatacccgggaccaaactcacggaccactcgaggcctgcaaaccttcctgggaggacaggcaggccagatggcccctccactggggaatgctcccagctgtgctgtggagagaagctgatgttttggtgtattgtcagccatcgtcctgggactcggagactatggcctcgcctccccaccctcctcttggaattacaagccctggggtttgaagctgactttatagctgcaagtgtatctccttttatctggtgcctcctcaaacccagtctcagacactaaatgcagacaacaccttcctcctgcagacacctggactgagccaaggaggcctggggaggccctaggggagcaccgtgatggagaggacagagcaggggctccagcaccttctttctggactggcgttcacctccctgctcagtgcttgggctccacgggcaggggtcagagcactccctaatttatgtgctatataaatatgtcagatgtacatagagatctattttttctaaaacattcccctccccactcctctcccacagagtgctggactgttccaggccctccagtgggctgatgctgggacccttaggatggggctcccagctcctttctcctgtgaatggaggcagagacctccaataaagtgccttctgggctttttctaa

SEQ ID NO: 31207 - DNA, 3306 bp, Homo sapiens
gagagagagagagagagagaactagtctcgaggtcgacgcggccgcgaattcgcggccgcgtcgaccgaagacgcaggctctatttagagccgggtaggggagcgcagcggccagatacctcagcgctacctggcggaactggatttctctcccgcctgccggcctgcctgccacagccggactccgccactccggtaggattccccgcctgtcattccctagcccagctcttgggaaactgcagaggggtccagaggatttgcagttctgaacctgcacactccagtctaggatctccgagcaagagcgtagcctcatggctgcaacctgtgagattagcaacatttttagcaactacttcagtgcgatgtacagctcggaggactccaccctggcctctgttccccctgctgccacctttggggccgatgacttggtactgaccctgagcaacccccagatgtcattggagggtacagagaaggccagctggttgggggaacagccccagttctggtcgaagacgcaggttctggactggatcagctaccaagtggagaagaacaagtacgacgcaagcgccattgacttctcacgatgtgacatggatggcgccaccctctgcaattgtgcccttgaggagctgcgtctggtctttgggcctctgggggaccaactccatgcccagctgcgagacctcacttccagctcttctgatgagctcagttggatcattgagctgctggagaaggatggcatggccttccaggaggccctagacccagggccctttgaccagggcagcccctttgcccaggagctgctggacgacggtcagcaagccagcccctaccaccccggcagctgtggcgcaggagccccctcccccggcagctctgacgtctccaccgcagggactggtgcttctcggagctcccactcctcagactccggtggaagtgacgtggacctggatcccactgatggcaagctcttccccagcgatggttttcgtgactgcaagaagggggatcccaagcacgggaagcggaaacgaggccggccccgaaagctgagcaaagagtactgggactgtctcgagggcaagaagagcaagcacgcgcccagaggcacccacctgtgggagttcatccgggacatcctcatccacccggagctcaacgagggcctcatgaagtgggagaatcggcatgaaggcgtcttcaagttcctgcgctccgaggctgtggcccaactatggggccaaaagaaaaagaacagcaacatgacctacgagaagctgagccgggccatgaggtactactacaaacgggagatcctggaacgggtggatggccggcgactcgtctacaagtttggcaaaaactcaagcggctggaaggaggaagaggttctccagagtcggaactgagggttggaactatacccgggaccaaactcacggaccactcgaggcctgcaaaccttcctgggaggacaggcaggccagatggcccctccactggggaatgctcccagctgtgctgtggagagaagctgatgttttggtgtattgtcagccatcgtcctgggactcggagactatggcctcgcctccccaccctcctcttggaattacaagccctggggtttgaagctgactttatagctgcaagtgtatctccttttatctggtgcctcctcaaacccagtctcagacactaaatgcagacaacaccttcctcctgcagacacctggactgagccaaggaggcctggggaggccctaggggagcaccgtgatggagaggacagagcaggggctccagcaccttctttctggactggcgttcacctccctgctcagtgcttgggctccacgggcaggggtcagagcactccctaatttatgtgctatataaatatgtcagatgtacatagagatctattttttctaaaacattcccctccccactcctctcccacagagtgctggactgttccaggccctccagtgggctgatgctgggacccttaggatggggctcccagctcctttctcctgtgaatggaggcagagacctccaataaagtgccttctgggctttttctaacctttgtcttagctacctgtgtactgaaatttgggcctttggatcgaatatggtcaagaggttggaggggaggaaaatgaaggtctaccaggctgagggtgagggcaaaggctgacgaagaggggagttacagatttcctgtagcaggtgtgggcttacagacacatggactgggctgggaggcgagcaaaggaagcagctgagactgttggagaacgcttacaagacttcatgcaagcaaggacatgaactcagaacactgaggtcagaagcatcctgctgtcatgacaccgctcgagtgaccttgaccttgaccaagtctgtcctgtttaggactgatttttcctattaggctagggtttggacctgatgttctcaagatgtctagaattgcatggctggccttgtggaatagatggttttgcattccagccaagtgtgctgtaaactgtatatctgtaatatgaatcccagcttttgagtctgacaaaatcagagttaggatcttgtaaaggaaaaaaaaaaaaaacaaaacaaaatggagatgagtacttgctgagaaagaatgagggaaggagttggcatttgttgaaagtatagtctttttctcttttttttttaattgcaacttttactttagatttaggaggtcgtgcgcaggtttgttacatgggtatattgtgtgatgctgagcttgggatgcgaatgatcctgtcacccaggtagtgagtatagcacccagtgaaactgtagtctcatgccaggcactgtgctagcccactctggctcatttaatcctctcctaagaagagaggagacacagcgtccccatttgacagatgcagaaagaggttccacaggtgtgccttgattctgtcctaaaaccgtttcccggaagcttttcctggtgtgggcgcttctaacctaatcctcaatcgattccagaactattactctgtttccacagtgatactgtgtctaggttttagggaggacagttcattgatgttacttaagaatgctttccaggtggaaagttccttaagtttgaggcttcaaattccatacagcacattaaaatcccattcatgagtttgaaatactgctctgttgtcttggaaataccaatcagattgttggctgaagtgatgtggataaagaagggatcttagaaaaactaaagcttgtgtg

SEQ ID NO: 31208 - DNA, 3191 bp, Homo sapiens
ggaggctcctgtggtcctgccctggtctgagatcttggagcccttcttgaagagagggtgtccgcagagttgctgatcttcctgcccctgggggctactcttgcccagggttgggcaaagcagagtagctgggagtgtaaggagaggaccctcgtcccctcaccaacctcatcctctctccccctacccacagggtagcctcatggctgcaacctgtgagattagcaacatttttagcaactacttcagtgcgatgtacagctcggaggactccaccctggcctctgttccccctgctgccacctttggggccgatgacttggtactgaccctgagcaacccccagatgtcattggagggtacagagaaggccagctggttgggggaacagccccagttctggtcgaagacgcaggttctggactggatcagctaccaagtggagaagaacaagtacgacgcaagcgccattgacttctcacgatgtgacatggatggcgccaccctctgcaattgtgcccttgaggagctgcgtctggtctttgggcctctgggggaccaactccatgcccagctgcgagacctcacttccagctcttctgatgagctcagttggatcattgagctgctggagaaggatggcatggccttccaggaggccctagacccagggccctttgaccagggcagcccctttgcccaggagctgctggacgacggtcagcaagccagcccctaccaccccggcagctgtggcgcaggagccccctcccccggcagctctgacgtctccaccgcagggactggtgcttctcggagctcccactcctcagactccggtggaagtgacgtggacctggatcccactgatggcaagctcttccccagcgatggttttcgtgactgcaagaagggggatcccaagcacgggaagcggaaacgaggccggccccgaaagctgagcaaagagtactgggactgtctcgagggcaagaagagcaagcacgcgcccagaggcacccacctgtgggagttcatccgggacatcctcatccacccggagctcaacgagggcctcatgaagtgggagaatcggcatgaaggcgtcttcaagttcctgcgctccgaggctgtggcccaactatggggccaaaagaaaaagaacagcaacatgacctacgagaagctgagccgggccatgaggtactactacaaacgggagatcctggaacgggtggatggccggcgactcgtctacaagtttggcaaaaactcaagcggctggaaggaggaagaggttctccagagtcggaactgagggttggaactatacccgggaccaaactcacggaccactcgaggcctgcaaaccttcctgggaggacaggcaggccagatggcccctccactggggaatgctcccagctgtgctgtggagagaagctgatgttttggtgtattgtcagccatcgtcctgggactcggagactatggcctcgcctccccaccctcctcttggaattacaagccctggggtttgaagctgactttatagctgcaagtgtatctccttttatctggtgcctcctcaaacccagtctcagacactaaatgcagacaacaccttcctcctgcagacacctggactgagccaaggaggcctggggaggccctaggggagcaccgtgatggagaggacagagcaggggctccagcaccttctttctggactggcgttcacctccctgctcagtgcttgggctccacgggcaggggtcagagcactccctaatttatgtgctatataaatatgtcagatgtacatagagatctattttttctaaaacattcccctccccactcctctcccacagagtgctggactgttccaggccctccagtgggctgatgctgggacccttaggatggggctcccagctcctttctcctgtgaatggaggcagagacctccaataaagtgccttctgggctttttctaacctttgtcttagctacctgtgtactgaaatttgggcctttggatcgaatatggtcaagaggttggaggggaggaaaatgaaggtctaccaggctgagggtgagggcaaaggctgacgaagaggggagttacagatttcctgtagcaggtgtgggcttacagacacatggactgggctgggaggcgagcaaaggaagcagctgagactgttggagaacgcttacaagacttcatgcaagcaaggacatgaactcagaacactgaggtcagaagcatcctgctgtcatgacaccgctcgagtgaccttgaccttgaccaagtctgtcctgtttaggactgatttttcctattaggctagggtttggacctgatgttctcaagatgtctagaattgcatggctggccttgtggaatagatggttttgcattccagccaagtgtgctgtaaactgtatatctgtaatatgaatcccagcttttgagtctgacaaaatcagagttaggatcttgtaaaggaaaaaaaaaaaaaacaaaacaaaatggagatgagtacttgctgagaaagaatgagggaaggagttggcatttgttgaaagtatagtctttttctcttttttttttaattgcaacttttactttagatttaggaggtcgtgcgcaggtttgttacatgggtatattgtgtgatgctgagcttgggatgcgaatgatcctgtcacccaggtagtgagtatagcacccagtgaaactgtagtctcatgccaggcactgtgctagcccactctggctcatttaatcctctcctaagaagagaggagacacagcgtccccatttgacagatgcagaaagaggttccacaggtgtgccttgattctgtcctaaaaccgtttcccggaagcttttcctggtgtgggcgcttctaacctaatcctcaatcgattccagaactattactctgtttccacagtgatactgtgtctaggttttagggaggacagttcattgatgttacttaagaatgctttccaggtggaaagttccttaagtttgaggcttcaaattccatacagcacattaaaatcccattcatgagtttgaaatactgctctgttgtcttggaaataccaatcagattgttggctgaagtgatgtggataaagaagggatcttagaaaaactaaagcttgtgtg

SEQ ID NO: 31209 - DNA, 3043 bp, Homo sapiens
tgcgtaggcgacggcgcttgcgtcgtacttggactccgccactccggtagcctcatggctgcaacctgtgagattagcaacatttttagcaactacttcagtgcgatgtacagctcggaggactccaccctggcctctgttccccctgctgccacctttggggccgatgacttggtactgaccctgagcaacccccagatgtcattggagggtacagagaaggccagctggttgggggaacagccccagttctggtcgaagacgcaggttctggactggatcagctaccaagtggagaagaacaagtacgacgcaagcgccattgacttctcacgatgtgacatggatggcgccaccctctgcaattgtgcccttgaggagctgcgtctggtctttgggcctctgggggaccaactccatgcccagctgcgagacctcacttccagctcttctgatgagctcagttggatcattgagctgctggagaaggatggcatggccttccaggaggccctagacccagggccctttgaccagggcagcccctttgcccaggagctgctggacgacggtcagcaagccagcccctaccaccccggcagctgtggcgcaggagccccctcccccggcagctctgacgtctccaccgcagggactggtgcttctcggagctcccactcctcagactccggtggaagtgacgtggacctggatcccactgatggcaagctcttccccagcgatggttttcgtgactgcaagaagggggatcccaagcacgggaagcggaaacgaggccggccccgaaagctgagcaaagagtactgggactgtctcgagggcaagaagagcaagcacgcgcccagaggcacccacctgtgggagttcatccgggacatcctcatccacccggagctcaacgagggcctcatgaagtgggagaatcggcatgaaggcgtcttcaagttcctgcgctccgaggctgtggcccaactatggggccaaaagaaaaagaacagcaacatgacctacgagaagctgagccgggccatgaggtactactacaaacgggagatcctggaacgggtggatggccggcgactcgtctacaagtttggcaaaaactcaagcggctggaaggaggaagaggttctccagagtcggaactgagggttggaactatacccgggaccaaactcacggaccactcgaggcctgcaaaccttcctgggaggacaggcaggccagatggcccctccactggggaatgctcccagctgtgctgtggagagaagctgatgttttggtgtattgtcagccatcgtcctgggactcggagactatggcctcgcctccccaccctcctcttggaattacaagccctggggtttgaagctgactttatagctgcaagtgtatctccttttatctggtgcctcctcaaacccagtctcagacactaaatgcagacaacaccttcctcctgcagacacctggactgagccaaggaggcctggggaggccctaggggagcaccgtgatggagaggacagagcaggggctccagcaccttctttctggactggcgttcacctccctgctcagtgcttgggctccacgggcaggggtcagagcactccctaatttatgtgctatataaatatgtcagatgtacatagagatctattttttctaaaacattcccctccccactcctctcccacagagtgctggactgttccaggccctccagtgggctgatgctgggacccttaggatggggctcccagctcctttctcctgtgaatggaggcagagacctccaataaagtgccttctgggctttttctaacctttgtcttagctacctgtgtactgaaatttgggcctttggatcgaatatggtcaagaggttggaggggaggaaaatgaaggtctaccaggctgagggtgagggcaaaggctgacgaagaggggagttacagatttcctgtagcaggtgtgggcttacagacacatggactgggctgggaggcgagcaaaggaagcagctgagactgttggagaacgcttacaagacttcatgcaagcaaggacatgaactcagaacactgaggtcagaagcatcctgctgtcatgacaccgctcgagtgaccttgaccttgaccaagtctgtcctgtttaggactgatttttcctattaggctagggtttggacctgatgttctcaagatgtctagaattgcatggctggccttgtggaatagatggttttgcattccagccaagtgtgctgtaaactgtatatctgtaatatgaatcccagcttttgagtctgacaaaatcagagttaggatcttgtaaaggaaaaaaaaaaaaaacaaaacaaaatggagatgagtacttgctgagaaagaatgagggaaggagttggcatttgttgaaagtatagtctttttctcttttttttttaattgcaacttttactttagatttaggaggtcgtgcgcaggtttgttacatgggtatattgtgtgatgctgagcttgggatgcgaatgatcctgtcacccaggtagtgagtatagcacccagtgaaactgtagtctcatgccaggcactgtgctagcccactctggctcatttaatcctctcctaagaagagaggagacacagcgtccccatttgacagatgcagaaagaggttccacaggtgtgccttgattctgtcctaaaaccgtttcccggaagcttttcctggtgtgggcgcttctaacctaatcctcaatcgattccagaactattactctgtttccacagtgatactgtgtctaggttttagggaggacagttcattgatgttacttaagaatgctttccaggtggaaagttccttaagtttgaggcttcaaattccatacagcacattaaaatcccattcatgagtttgaaatactgctctgttgtcttggaaataccaatcagattgttggctgaagtgatgtggataaagaagggatcttagaaaaactaaagcttgtgtg

SEQ ID NO: 31210 - DNA, 3357 bp, Homo sapiens
gagagagagagagagagagaactagtctcgaggtcgacgcggccgcgaattcgcggccgcgtcgaccgaagacgcaggctctatttagagccgggtaggggagcgcagcggccagatacctcagcgctacctggcggaactggatttctctcccgcctgccggcctgcctgccacagccggactccgccactccggtagcctcatggctgcaacctgtgagattagcaacatttttagcaactacttcagtgcgatgtacagctcggaggactccaccctggcctctgttccccctgctgccacctttggggccgatgacttggtactgaccctgagcaacccccagatgtcattggagggtacagagaaggccagctggttgggggaacagccccagttctggtcgaagacgcaggttctggactggatcagctaccaagtggagaagaacaagtacgacgcaagcgccattgacttctcacgatgtgacatggatggcgccaccctctgcaattgtgcccttgaggagctgcgtctggtctttgggcctctgggggaccaactccatgcccagctgcgagacctcagtgagtccaggcccctggaggctggggagcagctccacatgttgagcccagtcgagttcagtgtggccgtaggcaggccctggagctctgggccagctgcacagccagagagagcccttgagggagggattaggggagtgtgacccttccttccttccttgtcagcttccagctcttctgatgagctcagttggatcattgagctgctggagaaggatggcatggccttccaggaggccctagacccagggccctttgaccagggcagcccctttgcccaggagctgctggacgacggtcagcaagccagcccctaccaccccggcagctgtggcgcaggagccccctcccccggcagctctgacgtctccaccgcagggactggtgcttctcggagctcccactcctcagactccggtggaagtgacgtggacctggatcccactgatggcaagctcttccccagcgatggttttcgtgactgcaagaagggggatcccaagcacgggaagcggaaacgaggccggccccgaaagctgagcaaagagtactgggactgtctcgagggcaagaagagcaagcacgcgcccagaggcacccacctgtgggagttcatccgggacatcctcatccacccggagctcaacgagggcctcatgaagtgggagaatcggcatgaaggcgtcttcaagttcctgcgctccgaggctgtggcccaactatggggccaaaagaaaaagaacagcaacatgacctacgagaagctgagccgggccatgaggtactactacaaacgggagatcctggaacgggtggatggccggcgactcgtctacaagtttggcaaaaactcaagcggctggaaggaggaagaggttctccagagtcggaactgagggttggaactatacccgggaccaaactcacggaccactcgaggcctgcaaaccttcctgggaggacaggcaggccagatggcccctccactggggaatgctcccagctgtgctgtggagagaagctgatgttttggtgtattgtcagccatcgtcctgggactcggagactatggcctcgcctccccaccctcctcttggaattacaagccctggggtttgaagctgactttatagctgcaagtgtatctccttttatctggtgcctcctcaaacccagtctcagacactaaatgcagacaacaccttcctcctgcagacacctggactgagccaaggaggcctggggaggccctaggggagcaccgtgatggagaggacagagcaggggctccagcaccttctttctggactggcgttcacctccctgctcagtgcttgggctccacgggcaggggtcagagcactccctaatttatgtgctatataaatatgtcagatgtacatagagatctattttttctaaaacattcccctccccactcctctcccacagagtgctggactgttccaggccctccagtgggctgatgctgggacccttaggatggggctcccagctcctttctcctgtgaatggaggcagagacctccaataaagtgccttctgggctttttctaacctttgtcttagctacctgtgtactgaaatttgggcctttggatcgaatatggtcaagaggttggaggggaggaaaatgaaggtctaccaggctgagggtgagggcaaaggctgacgaagaggggagttacagatttcctgtagcaggtgtgggcttacagacacatggactgggctgggaggcgagcaaaggaagcagctgagactgttggagaacgcttacaagacttcatgcaagcaaggacatgaactcagaacactgaggtcagaagcatcctgctgtcatgacaccgctcgagtgaccttgaccttgaccaagtctgtcctgtttaggactgatttttcctattaggctagggtttggacctgatgttctcaagatgtctagaattgcatggctggccttgtggaatagatggttttgcattccagccaagtgtgctgtaaactgtatatctgtaatatgaatcccagcttttgagtctgacaaaatcagagttaggatcttgtaaaggaaaaaaaaaaaaaacaaaacaaaatggagatgagtacttgctgagaaagaatgagggaaggagttggcatttgttgaaagtatagtctttttctcttttttttttaattgcaacttttactttagatttaggaggtcgtgcgcaggtttgttacatgggtatattgtgtgatgctgagcttgggatgcgaatgatcctgtcacccaggtagtgagtatagcacccagtgaaactgtagtctcatgccaggcactgtgctagcccactctggctcatttaatcctctcctaagaagagaggagacacagcgtccccatttgacagatgcagaaagaggttccacaggtgtgccttgattctgtcctaaaaccgtttcccggaagcttttcctggtgtgggcgcttctaacctaatcctcaatcgattccagaactattactctgtttccacagtgatactgtgtctaggttttagggaggacagttcattgatgttacttaagaatgctttccaggtggaaagttccttaagtttgaggcttcaaattccatacagcacattaaaatcccattcatgagtttgaaatactgctctgttgtcttggaaataccaatcagattgttggctgaagtgatgtggataaagaagggatcttagaaaaactaaagcttgtgtg

SEQ ID NO: 31211 - DNA, 1920 bp, Homo sapiens
gagagagagagagagagagaactagtctcgaggtcgacgcggccgcgaattcgcggccgcgtcgaccgaagacgcaggctctatttagagccgggtaggggagcgcagcggccagatacctcagcgctacctggcggaactggatttctctcccgcctgccggcctgcctgccacagccggactccgccactccggtagcctcatggctgcaacctgtgagattagcaacatttttagcaactacttcagtgcgatgtacagctcggaggactccaccctggcctctgttccccctgctgccacctttggggccgatgacttggtactgaccctgagcaacccccagatgtcattggagggtacagagaaggccagctggttgggggaacagccccagttctggtcgaagacgcaggttctggactggatcagctaccaagtggagaagaacaagtacgacgcaagcgccattgacttctcacgatgtgacatggatggcgccaccctctgcaattgtgcccttgaggagctgcgtctggtctttgggcctctgggggaccaactccatgcccagctgcgagacctcacttccagctcttctgatgagctcagttggatcattgagctgctggagaaggatggcatggccttccaggaggccctagacccagggccctttgaccagggcagcccctttgcccaggagctgctggacgacgggactggtgcttctcggagctcccactcctcagactccggtggaagtgacgtggacctggatcccactgatggcaagctcttccccagcgatggttttcgtgactgcaagaagggggatcccaagcacgggaagcggaaacgaggccggccccgaaagctgagcaaagagtactgggactgtctcgagggcaagaagagcaagcacgcgcccagaggcacccacctgtgggagttcatccgggacatcctcatccacccggagctcaacgagggcctcatgaagtgggagaatcggcatgaaggcgtcttcaagttcctgcgctccgaggctgtggcccaactatggggccaaaagaaaaagaacagcaacatgacctacgagaagctgagccgggccatgaggtactactacaaacgggagatcctggaacgggtggatggccggcgactcgtctacaagtttggcaaaaactcaagcggctggaaggaggaagaggttctccagagtcggaactgagggttggaactatacccgggaccaaactcacggaccactcgaggcctgcaaaccttcctgggaggacaggcaggccagatggcccctccactggggaatgctcccagctgtgctgtggagagaagctgatgttttggtgtattgtcagccatcgtcctgggactcggagactatggcctcgcctccccaccctcctcttggaattacaagccctggggtttgaagctgactttatagctgcaagtgtatctccttttatctggtgcctcctcaaacccagtctcagacactaaatgcagacaacaccttcctcctgcagacacctggactgagccaaggaggcctggggaggccctaggggagcaccgtgatggagaggacagagcaggggctccagcaccttctttctggactggcgttcacctccctgctcagtgcttgggctccacgggcaggggtcagagcactccctaatttatgtgctatataaatatgtcagatgtacatagagatctattttttctaaaacattcccctccccactcctctcccacagagtgctggactgttccaggccctccagtgggctgatgctgggacccttaggatggggctcccagctcctttctcctgtgaatggaggcagagacctccaataaagtgccttctgggctttttctaa

SEQ ID NO: 31212 - DNA, 3560 bp, Homo sapiens
gagagagagagagagagagaactagtctcgaggtcgacgcggccgcgaattcgcggccgcgtcgaccgaagacgcaggctctatttagagccgggtaggggagcgcagcggccagatacctcagcgctacctggcggaactggatttctctcccgcctgccggcctgcctgccacagccggactccgccactccggtagcctcatggctgcaacctgtgagattagcaacatttttagcaactacttcagtgcgatgtacagctcggaggactccaccctggcctctgttccccctgctgccacctttggggccgatgacttggtactgaccctgagcaacccccagatgtcattggagggtacagagaaggccagctggttgggggaacagccccagttctggtcgaagacgcaggttctggactggatcagctaccaagtggagaagaacaagtacgacgcaagcgccattgacttctcacgatgtgacatggatggcgccaccctctgcaattgtgcccttgaggagctgcgtctggtctttgggcctctgggggaccaactccatgcccagctgcgagacctcagtgagtccaggcccctggaggctggggagcagctccacatgttgagcccagtcgagttcagtgtggccgtaggcaggccctggagctctgggccagctgcacagccagagagagcccttgagggagggattaggggagtgtgacccttccttccttccttgtcagcttccagctcttctgatgagctcagttggatcattgagctgctggagaaggatggcatggccttccaggaggccctagacccagggccctttggtgagaacccgttttctccttccttccccagcctgtcttgtcccatccctgcccctccacagagtgctagagatgaccccctccccagacttcttcctccctcaattagaaaaattgcagcaggtcatcagacccatgggcagcatcacctgtcctggtctggtcccctgagccctctctgagttctcacctcctcttcccagaccagggcagcccctttgcccaggagctgctggacgacggtcagcaagccagcccctaccaccccggcagctgtggcgcaggagccccctcccccggcagctctgacgtctccaccgcagggactggtgcttctcggagctcccactcctcagactccggtggaagtgacgtggacctggatcccactgatggcaagctcttccccagcgatggttttcgtgactgcaagaagggggatcccaagcacgggaagcggaaacgaggccggccccgaaagctgagcaaagagtactgggactgtctcgagggcaagaagagcaagcacgcgcccagaggcacccacctgtgggagttcatccgggacatcctcatccacccggagctcaacgagggcctcatgaagtgggagaatcggcatgaaggcgtcttcaagttcctgcgctccgaggctgtggcccaactatggggccaaaagaaaaagaacagcaacatgacctacgagaagctgagccgggccatgaggtactactacaaacgggagatcctggaacgggtggatggccggcgactcgtctacaagtttggcaaaaactcaagcggctggaaggaggaagaggttctccagagtcggaactgagggttggaactatacccgggaccaaactcacggaccactcgaggcctgcaaaccttcctgggaggacaggcaggccagatggcccctccactggggaatgctcccagctgtgctgtggagagaagctgatgttttggtgtattgtcagccatcgtcctgggactcggagactatggcctcgcctccccaccctcctcttggaattacaagccctggggtttgaagctgactttatagctgcaagtgtatctccttttatctggtgcctcctcaaacccagtctcagacactaaatgcagacaacaccttcctcctgcagacacctggactgagccaaggaggcctggggaggccctaggggagcaccgtgatggagaggacagagcaggggctccagcaccttctttctggactggcgttcacctccctgctcagtgcttgggctccacgggcaggggtcagagcactccctaatttatgtgctatataaatatgtcagatgtacatagagatctattttttctaaaacattcccctccccactcctctcccacagagtgctggactgttccaggccctccagtgggctgatgctgggacccttaggatggggctcccagctcctttctcctgtgaatggaggcagagacctccaataaagtgccttctgggctttttctaacctttgtcttagctacctgtgtactgaaatttgggcctttggatcgaatatggtcaagaggttggaggggaggaaaatgaaggtctaccaggctgagggtgagggcaaaggctgacgaagaggggagttacagatttcctgtagcaggtgtgggcttacagacacatggactgggctgggaggcgagcaaaggaagcagctgagactgttggagaacgcttacaagacttcatgcaagcaaggacatgaactcagaacactgaggtcagaagcatcctgctgtcatgacaccgctcgagtgaccttgaccttgaccaagtctgtcctgtttaggactgatttttcctattaggctagggtttggacctgatgttctcaagatgtctagaattgcatggctggccttgtggaatagatggttttgcattccagccaagtgtgctgtaaactgtatatctgtaatatgaatcccagcttttgagtctgacaaaatcagagttaggatcttgtaaaggaaaaaaaaaaaaaacaaaacaaaatggagatgagtacttgctgagaaagaatgagggaaggagttggcatttgttgaaagtatagtctttttctcttttttttttaattgcaacttttactttagatttaggaggtcgtgcgcaggtttgttacatgggtatattgtgtgatgctgagcttgggatgcgaatgatcctgtcacccaggtagtgagtatagcacccagtgaaactgtagtctcatgccaggcactgtgctagcccactctggctcatttaatcctctcctaagaagagaggagacacagcgtccccatttgacagatgcagaaagaggttccacaggtgtgccttgattctgtcctaaaaccgtttcccggaagcttttcctggtgtgggcgcttctaacctaatcctcaatcgattccagaactattactctgtttccacagtgatactgtgtctaggttttagggaggacagttcattgatgttacttaagaatgctttccaggtggaaagttccttaagtttgaggcttcaaattccatacagcacattaaaatcccattcatgagtttgaaatactgctctgttgtcttggaaataccaatcagattgttggctgaagtgatgtggataaagaagggatcttagaaaaactaaagcttgtgtg

SEQ ID NO: 31213 - DNA, 3153 bp, Homo sapiens
gagagagagagagagagagaactagtctcgaggtcgacgcggccgcgaattcgcggccgcgtcgaccgaagacgcaggctctatttagagccgggtaggggagcgcagcggccagatacctcagcgctacctggcggaactggatttctctcccgcctgccggcctgcctgccacagccggactccgccactccggtagcctcatggctgcaacctgtgagattagcaacatttttagcaactacttcagtgcgatgtacagctcggaggactccaccctggcctctgttccccctgctgccacctttggggccgatgacttggtactgaccctgagcaacccccagatgtcattggagggtacagagaaggccagctggttgggggaacagccccagttctggtcgaagacgcaggttctggactggatcagctaccaagtggagaagaacaagtacgacgcaagcgccattgacttctcacgatgtgacatggatggcgccaccctctgcaattgtgcccttgaggagctgcgtctggtctttgggcctctgggggaccaactccatgcccagctgcgagacctcacttccagctcttctgatgagctcagttggatcattgagctgctggagaaggatggcatggccttccaggaggccctagacccagggccctttgaccagggcagcccctttgcccaggagctgctggacgacggtcagcaagccagcccctaccaccccggcagctgtggcgcagggactggtgcttctcggagctcccactcctcagactccggtggaagtgacgtggacctggatcccactgatggcaagctcttccccagcgatggttttcgtgactgcaagaagggggatcccaagcacgggaagcggaaacgaggccggccccgaaagctgagcaaagagtactgggactgtctcgagggcaagaagagcaagcacgcgcccagaggcacccacctgtgggagttcatccgggacatcctcatccacccggagctcaacgagggcctcatgaagtgggagaatcggcatgaaggcgtcttcaagttcctgcgctccgaggctgtggcccaactatggggccaaaagaaaaagaacagcaacatgacctacgagaagctgagccgggccatgaggtactactacaaacgggagatcctggaacgggtggatggccggcgactcgtctacaagtttggcaaaaactcaagcggctggaaggaggaagaggttctccagagtcggaactgagggttggaactatacccgggaccaaactcacggaccactcgaggcctgcaaaccttcctgggaggacaggcaggccagatggcccctccactggggaatgctcccagctgtgctgtggagagaagctgatgttttggtgtattgtcagccatcgtcctgggactcggagactatggcctcgcctccccaccctcctcttggaattacaagccctggggtttgaagctgactttatagctgcaagtgtatctccttttatctggtgcctcctcaaacccagtctcagacactaaatgcagacaacaccttcctcctgcagacacctggactgagccaaggaggcctggggaggccctaggggagcaccgtgatggagaggacagagcaggggctccagcaccttctttctggactggcgttcacctccctgctcagtgcttgggctccacgggcaggggtcagagcactccctaatttatgtgctatataaatatgtcagatgtacatagagatctattttttctaaaacattcccctccccactcctctcccacagagtgctggactgttccaggccctccagtgggctgatgctgggacccttaggatggggctcccagctcctttctcctgtgaatggaggcagagacctccaataaagtgccttctgggctttttctaacctttgtcttagctacctgtgtactgaaatttgggcctttggatcgaatatggtcaagaggttggaggggaggaaaatgaaggtctaccaggctgagggtgagggcaaaggctgacgaagaggggagttacagatttcctgtagcaggtgtgggcttacagacacatggactgggctgggaggcgagcaaaggaagcagctgagactgttggagaacgcttacaagacttcatgcaagcaaggacatgaactcagaacactgaggtcagaagcatcctgctgtcatgacaccgctcgagtgaccttgaccttgaccaagtctgtcctgtttaggactgatttttcctattaggctagggtttggacctgatgttctcaagatgtctagaattgcatggctggccttgtggaatagatggttttgcattccagccaagtgtgctgtaaactgtatatctgtaatatgaatcccagcttttgagtctgacaaaatcagagttaggatcttgtaaaggaaaaaaaaaaaaaacaaaacaaaatggagatgagtacttgctgagaaagaatgagggaaggagttggcatttgttgaaagtatagtctttttctcttttttttttaattgcaacttttactttagatttaggaggtcgtgcgcaggtttgttacatgggtatattgtgtgatgctgagcttgggatgcgaatgatcctgtcacccaggtagtgagtatagcacccagtgaaactgtagtctcatgccaggcactgtgctagcccactctggctcatttaatcctctcctaagaagagaggagacacagcgtccccatttgacagatgcagaaagaggttccacaggtgtgccttgattctgtcctaaaaccgtttcccggaagcttttcctggtgtgggcgcttctaacctaatcctcaatcgattccagaactattactctgtttccacagtgatactgtgtctaggttttagggaggacagttcattgatgttacttaagaatgctttccaggtggaaagttccttaagtttgaggcttcaaattccatacagcacattaaaatcccattcatgagtttgaaatactgctctgttgtcttggaaataccaatcagattgttggctgaagtgatgtggataaagaagggatcttagaaaaactaaagcttgtgtg

SEQ ID NO: 31214 - DNA, 2427 bp, Homo sapiens
gagagagagagagagagagaactagtctcgaggtcgacgcggccgcgaattcgcggccgcgtcgaccgaagacgcaggctctatttagagccgggtaggggagcgcagcggccagatacctcagcgctacctggcggaactggatttctctcccgcctgccggcctgcctgccacagccggactccgccactccggtagcctcatggctgcaacctgtgagattagcaacatttttagcaactacttcagtgcgatgtacagctcggaggactccaccctggcctctgttccccctgctgccacctttggggccgatgacttggtactgaccctgagcaacccccagatgtcattggagggtacagagaaggccagctggttgggggaacagccccagttctggtcgaagacgcaggttctggactggatcagctaccaagtggagaagaacaagtacgacgcaagcgccattgacttctcacgatgtgacatggatggcgccaccctctgcaattgtgcccttgaggagctgcgtctggtctttgggcctctgggggaccaactccatgcccagctgcgagacctcacttccagctcttctgatgagctcagttggatcattgagctgctggagaaggatggcatggccttccaggaggccctagacccagggccctttgaccagggcagcccctttgcccaggagctgctggacgacggtcagcaagccagcccctaccaccccggcagctgtggcgcaggagccccctcccccggcagctctgacgtctccaccgcagggactggtgcttctcggagctcccactcctcagactccggtggaagtgacgtggacctggatcccactgatggcaagctcttccccagcgatggttttcgtgactgcaagaagggggatcccaagcacgggaagcggaaacgaggccggccccgaaagctgagcaaagagtactgggactgtctcgagggcaagaagagcaagcacgcgcccagaggcacccacctgtgggagttcatccgggacatcctcatccacccggagctcaacgagggcctcatgaagtgggagaatcggcatgaaggcgtcttcaagttcctgcgctccgaggctgtggcccaactatggggccaaaagaaaaagaacagcaacatgacctacgagaagctgagccgggccatgaggtactactacaaacgggagatcctggaacgggtggatggccggcgactcgtctacaagtttggcaaaaactcaagcggctggaaggaggaagaggttctccagagtcggaactgagggttggaactatacccgggaccaaactcacggaccactcgaggcctgcaaaccttcctgggaggacaggcaggccagatggcccctccactggggaatgctcccagctgtgctgtggagagaagctgatgttttggtgtattgtcagccatcgtcctgggactcggagactatggcctcgcctccccaccctcctcttggaattacaagccctggggtttgaagctgactttatagctgcaagtgtatctccttttatctggtgcctcctcaaacccagtctcagacactaaatgcagacaacaccttcctcctgcagacacctggactgagccaaggaggcctggggaggccctaggggagcaccgtgatggagaggacagagcaggggctccagcaccttctttctggactggcgttcacctccctgctcagtgcttgggctccacgggcaggggtcagagcactccctaatttatgtgctatataaatatgtcagatgtacatagagatctattttttctaaaacattcccctccccactcctctcccacagagtgctggactgttccaggccctccagtgggctgatgctgggacccttaggatggggctcccagctcctttctcctgtgaatggaggcagagacctccaataaagtgccttctgggctttttctaaaaaaaaaaaaaaaaaaaaaaaaaaaaaaaaaaaaaaaaaaaaaaagaggggggggggggcatagaaaggattcccgggggggggcaaaagtttgggcgggtaccccagttttttgggtgacaaggggggcccccaataaggggggggggtaataattaagcaagaggcaagggaggacggcagtagttaacacaacgtgctcggaggggggaaacaacggtgtaatcagaggcggaatatttgggagggaggaaaccacaatctcggtgggggggggaccataatggtgggcaacaatccccagggggaatattaagagcctagagggggaaaatatacatcttaggggtttaagtggtgtgcacacagcgcaatagtttggggcctaaaaaattggccctggggaattgattagcatcatttttg

SEQ ID NO: 31215 - DNA, 2438 bp, Homo sapiens
tcccgtgcttgggatcccccttcttgcagtcacgaaaaccatcgcagggactggtgcttctcggagctcccactcctcagactccggtggaagtgacgtggacctggatcccactgatggcaagctcttccccagcgatggttttcgtgactgcaagaagggggatcccaagcacgggaagcggaaacgaggccggccccgaaagctgagcaaagagtactgggactgtctcgagggcaagaagagcaagcacgcgcccagaggcacccacctgtgggagttcatccgggacatcctcatccacccggagctcaacgagggcctcatgaagtgggagaatcggcatgaaggcgtcttcaagttcctgcgctccgaggctgtggcccaactatggggccaaaagaaaaagaacagcaacatgacctacgagaagctgagccgggccatgaggtactactacaaacgggagatcctggaacgggtggatggccggcgactcgtctacaagtttggcaaaaactcaagcggctggaaggaggaagaggttctccagagtcggaactgagggttggaactatacccgggaccaaactcacggaccactcgaggcctgcaaaccttcctgggaggacaggcaggccagatggcccctccactggggaatgctcccagctgtgctgtggagagaagctgatgttttggtgtattgtcagccatcgtcctgggactcggagactatggcctcgcctccccaccctcctcttggaattacaagccctggggtttgaagctgactttatagctgcaagtgtatctccttttatctggtgcctcctcaaacccagtctcagacactaaatgcagacaacaccttcctcctgcagacacctggactgagccaaggaggcctggggaggccctaggggagcaccgtgatggagaggacagagcaggggctccagcaccttctttctggactggcgttcacctccctgctcagtgcttgggctccacgggcaggggtcagagcactccctaatttatgtgctatataaatatgtcagatgtacatagagatctattttttctaaaacattcccctccccactcctctcccacagagtgctggactgttccaggccctccagtgggctgatgctgggacccttaggatggggctcccagctcctttctcctgtgaatggaggcagagacctccaataaagtgccttctgggctttttctaacctttgtcttagctacctgtgtactgaaatttgggcctttggatcgaatatggtcaagaggttggaggggaggaaaatgaaggtctaccaggctgagggtgagggcaaaggctgacgaagaggggagttacagatttcctgtagcaggtgtgggcttacagacacatggactgggctgggaggcgagcaaaggaagcagctgagactgttggagaacgcttacaagacttcatgcaagcaaggacatgaactcagaacactgaggtcagaagcatcctgctgtcatgacaccgctcgagtgaccttgaccttgaccaagtctgtcctgtttaggactgatttttcctattaggctagggtttggacctgatgttctcaagatgtctagaattgcatggctggccttgtggaatagatggttttgcattccagccaagtgtgctgtaaactgtatatctgtaatatgaatcccagcttttgagtctgacaaaatcagagttaggatcttgtaaaggaaaaaaaaaaaaaacaaaacaaaatggagatgagtacttgctgagaaagaatgagggaaggagttggcatttgttgaaagtatagtctttttctcttttttttttaattgcaacttttactttagatttaggaggtcgtgcgcaggtttgttacatgggtatattgtgtgatgctgagcttgggatgcgaatgatcctgtcacccaggtagtgagtatagcacccagtgaaactgtagtctcatgccaggcactgtgctagcccactctggctcatttaatcctctcctaagaagagaggagacacagcgtccccatttgacagatgcagaaagaggttccacaggtgtgccttgattctgtcctaaaaccgtttcccggaagcttttcctggtgtgggcgcttctaacctaatcctcaatcgattccagaactattactctgtttccacagtgatactgtgtctaggttttagggaggacagttcattgatgttacttaagaatgctttccaggtggaaagttccttaagtttgaggcttcaaattccatacagcacattaaaatcccattcatgagtttgaaatactgctctgttgtcttggaaataccaatcagattgttggctgaagtgatgtggataaagaagggatcttagaaaaactaaagcttgtgtg

SEQ ID NO: 31216 - DNA, 2235 bp, Homo sapiens
tgggtgagaggggacacctggatggcaaactgatggaggctggccttgcagcgcccagaggcacccacctgtgggagttcatccgggacatcctcatccacccggagctcaacgagggcctcatgaagtgggagaatcggcatgaaggcgtcttcaagttcctgcgctccgaggctgtggcccaactatggggccaaaagaaaaagaacagcaacatgacctacgagaagctgagccgggccatgaggtactactacaaacgggagatcctggaacgggtggatggccggcgactcgtctacaagtttggcaaaaactcaagcggctggaaggaggaagaggttctccagagtcggaactgagggttggaactatacccgggaccaaactcacggaccactcgaggcctgcaaaccttcctgggaggacaggcaggccagatggcccctccactggggaatgctcccagctgtgctgtggagagaagctgatgttttggtgtattgtcagccatcgtcctgggactcggagactatggcctcgcctccccaccctcctcttggaattacaagccctggggtttgaagctgactttatagctgcaagtgtatctccttttatctggtgcctcctcaaacccagtctcagacactaaatgcagacaacaccttcctcctgcagacacctggactgagccaaggaggcctggggaggccctaggggagcaccgtgatggagaggacagagcaggggctccagcaccttctttctggactggcgttcacctccctgctcagtgcttgggctccacgggcaggggtcagagcactccctaatttatgtgctatataaatatgtcagatgtacatagagatctattttttctaaaacattcccctccccactcctctcccacagagtgctggactgttccaggccctccagtgggctgatgctgggacccttaggatggggctcccagctcctttctcctgtgaatggaggcagagacctccaataaagtgccttctgggctttttctaacctttgtcttagctacctgtgtactgaaatttgggcctttggatcgaatatggtcaagaggttggaggggaggaaaatgaaggtctaccaggctgagggtgagggcaaaggctgacgaagaggggagttacagatttcctgtagcaggtgtgggcttacagacacatggactgggctgggaggcgagcaaaggaagcagctgagactgttggagaacgcttacaagacttcatgcaagcaaggacatgaactcagaacactgaggtcagaagcatcctgctgtcatgacaccgctcgagtgaccttgaccttgaccaagtctgtcctgtttaggactgatttttcctattaggctagggtttggacctgatgttctcaagatgtctagaattgcatggctggccttgtggaatagatggttttgcattccagccaagtgtgctgtaaactgtatatctgtaatatgaatcccagcttttgagtctgacaaaatcagagttaggatcttgtaaaggaaaaaaaaaaaaaacaaaacaaaatggagatgagtacttgctgagaaagaatgagggaaggagttggcatttgttgaaagtatagtctttttctcttttttttttaattgcaacttttactttagatttaggaggtcgtgcgcaggtttgttacatgggtatattgtgtgatgctgagcttgggatgcgaatgatcctgtcacccaggtagtgagtatagcacccagtgaaactgtagtctcatgccaggcactgtgctagcccactctggctcatttaatcctctcctaagaagagaggagacacagcgtccccatttgacagatgcagaaagaggttccacaggtgtgccttgattctgtcctaaaaccgtttcccggaagcttttcctggtgtgggcgcttctaacctaatcctcaatcgattccagaactattactctgtttccacagtgatactgtgtctaggttttagggaggacagttcattgatgttacttaagaatgctttccaggtggaaagttccttaagtttgaggcttcaaattccatacagcacattaaaatcccattcatgagtttgaaatactgctctgttgtcttggaaataccaatcagattgttggctgaagtgatgtggataaagaagggatcttagaaaaactaaagcttgtgtg

SEQ ID NO: 31217 - DNA, 1941 bp, Homo sapiens
gatgctatgactgcgagaaggagagagaccgcgagagtaaggaagaggttctccagagtcggaactgagggttggaactatacccgggaccaaactcacggaccactcgaggcctgcaaaccttcctgggaggacaggcaggccagatggcccctccactggggaatgctcccagctgtgctgtggagagaagctgatgttttggtgtattgtcagccatcgtcctgggactcggagactatggcctcgcctccccaccctcctcttggaattacaagccctggggtttgaagctgactttatagctgcaagtgtatctccttttatctggtgcctcctcaaacccagtctcagacactaaatgcagacaacaccttcctcctgcagacacctggactgagccaaggaggcctggggaggccctaggggagcaccgtgatggagaggacagagcaggggctccagcaccttctttctggactggcgttcacctccctgctcagtgcttgggctccacgggcaggggtcagagcactccctaatttatgtgctatataaatatgtcagatgtacatagagatctattttttctaaaacattcccctccccactcctctcccacagagtgctggactgttccaggccctccagtgggctgatgctgggacccttaggatggggctcccagctcctttctcctgtgaatggaggcagagacctccaataaagtgccttctgggctttttctaacctttgtcttagctacctgtgtactgaaatttgggcctttggatcgaatatggtcaagaggttggaggggaggaaaatgaaggtctaccaggctgagggtgagggcaaaggctgacgaagaggggagttacagatttcctgtagcaggtgtgggcttacagacacatggactgggctgggaggcgagcaaaggaagcagctgagactgttggagaacgcttacaagacttcatgcaagcaaggacatgaactcagaacactgaggtcagaagcatcctgctgtcatgacaccgctcgagtgaccttgaccttgaccaagtctgtcctgtttaggactgatttttcctattaggctagggtttggacctgatgttctcaagatgtctagaattgcatggctggccttgtggaatagatggttttgcattccagccaagtgtgctgtaaactgtatatctgtaatatgaatcccagcttttgagtctgacaaaatcagagttaggatcttgtaaaggaaaaaaaaaaaaaacaaaacaaaatggagatgagtacttgctgagaaagaatgagggaaggagttggcatttgttgaaagtatagtctttttctcttttttttttaattgcaacttttactttagatttaggaggtcgtgcgcaggtttgttacatgggtatattgtgtgatgctgagcttgggatgcgaatgatcctgtcacccaggtagtgagtatagcacccagtgaaactgtagtctcatgccaggcactgtgctagcccactctggctcatttaatcctctcctaagaagagaggagacacagcgtccccatttgacagatgcagaaagaggttccacaggtgtgccttgattctgtcctaaaaccgtttcccggaagcttttcctggtgtgggcgcttctaacctaatcctcaatcgattccagaactattactctgtttccacagtgatactgtgtctaggttttagggaggacagttcattgatgttacttaagaatgctttccaggtggaaagttccttaagtttgaggcttcaaattccatacagcacattaaaatcccattcatgagtttgaaatactgctctgttgtcttggaaataccaatcagattgttggctgaagtgatgtggataaagaagggatcttagaaaaactaaagcttgtgtg

SEQ ID NO: 31218 - DNA, 1600 bp, Homo sapiens
gagagagagagagagagagaactagtctcgaggtcgacgcggccgcgaattcgcggccgcgtcgaccgaagacgcaggctctatttagagccgggtaggggagcgcagcggccagatacctcagcgctacctggcggaactggatttctctcccgcctgccggcctgcctgccacagccggactccgccactccggtagcctcatggctgcaacctgtgagattagcaacatttttagcaactacttcagtgcgatgtacagctcggaggactccaccctggcctctgttccccctgctgccacctttggggccgatgacttggtactgaccctgagcaacccccagatgtcattggagggtacagagaaggccagctggttgggggaacagccccagttctggtcgaagacgcaggttctggactggatcagctaccaagtggagaagaacaagtacgacgcaagcgccattgacttctcacgatgtgacatggatggcgccaccctctgcaattgtgcccttgaggagctgcgtctggtctttgggcctctgggggaccaactccatgcccagctgcgagacctcacttccagctcttctgatgagctcagttggatcattgagctgctggagaaggatggcatggccttccaggaggccctagacccagggccctttgaccagggcagcccctttgcccaggagctgctggacgacggtcagcaagccagcccctaccaccccggcagctgtggcgcaggagccccctcccccggcagctctgacgtctccaccgcagggactggtgcttctcggagctcccactcctcagactccggtggaagtgacgtggacctggatcccactgatggcaagctcttccccagcgatggttttcgtgactgcaagaagggggatcccaagcacgggaagcggaaacgaggccggccccgaaagctgagcaaagagtactgggactgtctcgagggcaagaagagcaagcacgcgcccagaggcacccacctgtgggagttcatccgggacatcctcatccacccggagctcaacgagggcctcatgaagtgggagaatcggcatgaaggcgtcttcaagttcctgcgctccgaggctgtggcccaactatggggccaaaagaaaaagaacagcaacatgacctacgagaagctgagccgggccatgaggtactactacaaacgggagatcctggaacgggtggatggccggcgactcgtctacaagtttggcaaaaactcaagcggctggaaggaggaagaggttctccagagtcggaactgagggttggaactatacccgggaccaaactcacggaccactcgaggcctgcaaaccttcctgggaggacaggcaggccagatggcccctccactggggaatgctcccagctgtgctgtggagagaagctgatgttttggtgtattgtcagccatcgtcctgggactcggagactatggcctcgcctccccaccctcctcttggaattacaagccctggggtttgaagctgactttatagccgcgtagtctctcgagccgcgtagtagccgcgtagtctcatcg

SEQ ID NO: 31219 - DNA, 1035 bp, Homo sapiens
gagagagagagagagagagaactagtctcgaggtcgacgcggccgcgaattcgcggccgcgtcgaccgaagacgcaggctctatttagagccgggtaggggagcgcagcggccagatacctcagcgctacctggcggaactggatttctctcccgcctgccggcctgcctgccacagccggactccgccactccggtagcctcatggctgcaacctgtgagattagcaacatttttagcaactacttcagtgcgatgtacagctcggaggactccaccctggcctctgttccccctgctgccacctttggggccgatgacttggtactgaccctgagcaacccccagatgtcattggagggtacagagaaggccagctggttgggggaacagccccagttctggtcgaagacgcaggttctggactggatcagctaccaagtggagaagaacaagtacgacgcaagcgccattgacttctcacgatgtgacatggatggcgccaccctctgcaattgtgcccttgaggagctgcgtctggtctttgggcctctgggggaccaactccatgcccagctgcgagacctcacttccagctcttctgatgagctcagttggatcattgagctgctggagaaggatggcatggccttccaggaggccctagacccagggccctttgaccagggcagcccctttgcccaggagctgctggacgacggtcagcaagccagcccctaccaccccggcagctgtggcgcaggagccccctcccccggcagctctgacgtctccaccgcagggactggtgcttctcggagctcccactcctcagactccggtggaagtgacgtggacctggatcccactgatggcaagctcttccccagcgatggttttcgtgactgcaagaagggggatcccaagcacgggaagcggaaacgaggccggccccgaaagctgagcaaagagtactgggactgtctcgagggcaagaagagcaagcacgagcctggcttggtggtcctggagagga

SEQ ID NO: 31220 - DNA, 914 bp, Homo sapiens
  misc_feature (905)..(905): n is a, c, g, or t
gagagagagagagagagagaactagtctcgaggtcgacgcggccgcgaattcgcggccgcgtcgaccgaagacgcaggctctatttagagccgggtaggggagcgcagcggccagatacctcagcgctacctggcggaactggatttctctcccgcctgccggcctgcctgccacagccggactccgccactccggtagcctcatggctgcaacctgtgagattagcaacatttttagcaactacttcagtgcgatgtacagctcggaggactccaccctggcctctgttccccctgctgccacctttggggccgatgacttggtactgaccctgagcaacccccagatgtcattggagggtacagagaaggccagctggttgggggaacagccccagttctggtcgaagacgcaggttctggactggatcagctaccaagtggagaagaacaagtacgacgcaagcgccattgacttctcacgatgtgacatggatggcgccaccctctgcaattgtgcccttgaggagctgcgtctggtctttgggcctctgggggaccaactccatgcccagctgcgagacctcacttccagctcttctgatgagctcagttggatcattgagctgctggagaaggatggcatggccttccaggaggccctagacccagggccctttgaccagggcagcccctttgcccaggagctgctggacgacggtcagcaagccagcccctaccaccccggcagctgtggcgcaggagccccctcccccggcagctctgacgtctccaccgcagggactggtgcttctcggagctcccactcctcagactccggtggaagtgacgtggacctggatcccactgatggcaagctcttccccagcgttcccccccccccnaaaaaggcc

SEQ ID NO: 31221 - DNA, 695 bp, Homo sapiens
  misc_feature (695)..(695): n is a, c, g, or t
gagagagagagagagagagaactagtctcgaggtcgacgcggccgcgaattcgcggccgcgtcgaccgaagacgcaggctctatttagagccgggtaggggagcgcagcggccagatacctcagcgctacctggcggaactggatttctctcccgcctgccggcctgcctgccacagccggactccgccactccggtagcctcatggctgcaacctgtgagattagcaacatttttagcaactacttcagtgcgatgtacagctcggaggactccaccctggcctctgttccccctgctgccacctttggggccgatgacttggtactgaccctgagcaacccccagatgtcattggagggtacagagaaggccagctggttgggggaacagccccagttctggtcgaagacgcaggttctggactggatcagctaccaagtggagaagaacaagtacgacgcaagcgccattgacttctcacgatgtgacatggatggcgccaccctctgcaattgtgcccttgaggagctgcgtctggtctttgggcctctgggggaccaactccatgcccagctgcgagacctcaccttcacaagccactatctagaatgacgccacaagtttggattcaatttgaagctagcttggaagaaaggataggcattgggcctttccaaggaaggcccctaagan

SEQ ID NO: 31222 - DNA, 194 bp, Homo sapiens
catccaatgagacaccagctcaggttactgcaggggacacactataaagccctgagctcagggaggagctccctccaggctctagctctatttagagccgggtaggggagcgcagcggccagatacctcagcgctacctggcggaactggatttctctcccgcctgccggcctgcctgccacagccggactccg

SEQ ID NO: 31223 - DNA, 2001 bp, Homo sapiens
gagagagagagagagagagaactagtctcgaggtcgacgcggccgcgaattcgcggccgcgtcgaccgaagacgcaggctctatttagagccgggtaggggagcgcagcggccagatacctcagcgctacctggcggaactggatttctctcccgcctgccggcctgcctgccacagccggactccgccactccggtagcctcatggctgcaacctgtgagattagcaacatttttagcaactacttcagtgcgatgtacagctcggaggactccaccctggcctctgttccccctgctgccacctttggggccgatgacttggtactgaccctgagcaacccccagatgtcattggagggtacagagaaggccagctggttgggggaacagccccagttctggtcgaagacgcaggttctggactggatcagctaccaagtggagaagaacaagtacgacgcaagcgccattgacttctcacgatgtgacatggatggcgccaccctctgcaattgtgcccttgaggagctgcgtctggtctttgggcctctgggggaccaactccatgcccagctgcgagacctcacttccagctcttctgatgagctcagttggatcattgagctgctggagaaggatggcatggccttccaggaggccctagacccagggccctttgaccagggcagcccctttgcccaggagctgctggacgacggtcagcaagccagcccctaccaccccggcagctgtggcgcaggagccccctcccccggcagctctgacgtctccaccgcagggactggtgcttctcggagctcccactcctcagactccggtggaagtgacgtggacctggatcccactgatggcaagctcttccccagcgatggttttcgtgactgcaagaagggggatcccaagcacgggaagcggaaacgaggccggccccgaaagctgagcaaagagtactgggactgtctcgagggcaagaagagcaagcacgcgcccagaggcacccacctgtgggagttcatccgggacatcctcatccacccggagctcaacgagggcctcatgaagtgggagaatcggcatgaaggcgtcttcaagttcctgcgctccgaggctgtggcccaactatggggccaaaagaaaaagaacagcaacatgacctacgagaagctgagccgggccatgaggtactactacaaacgggagatcctggaacgggtggatggccggcgactcgtctacaagtttggcaaaaactcaagcggctggaaggaggaagaggttctccagagtcggaactgagggttggaactatacccgggaccaaactcacggaccactcgaggcctgcaaaccttcctgggaggacaggcaggccagatggcccctccactggggaatgctcccagctgtgctgtggagagaagctgatgttttggtgtattgtcagccatcgtcctgggactcggagactatggcctcgcctccccaccctcctcttggaattacaagccctggggtttgaagctgactttatagctgcaagtgtatctccttttatctggtgcctcctcaaacccagtctcagacactaaatgcagacaacaccttcctcctgcagacacctggactgagccaaggaggcctggggaggccctaggggagcaccgtgatggagaggacagagcaggggctccagcaccttctttctggactggcgttcacctccctgctcagtgcttgggctccacgggcaggggtcagagcactccctaatttatgtgctatataaatatgtcagatgtacatagagatctattttttctaaaacattcccctccccactcctctcccacagagtgctggactgttccaggccctccagtgggctgatgctgggacccttaggatggggctcccagctcctttctcctgtgaatggaggcagagacctccaataaagtgccttctgggctttttctaa

SEQ ID NO: 31224 - DNA, 3337 bp, Homo sapiens
gagagagagagagagagagaactagtctcgaggtcgacgcggccgcgaattcgcggccgcgtcgaccgaagacgcaggctctatttagagccgggtaggggagcgcagcggccagatacctcagcgctacctggcggaactggatttctctcccgcctgccggcctgcctgccacagccggactccgccactccggtagcctcatggctgcaacctgtgagattagcaacatttttagcaactacttcagtgcgatgtacagctcggaggactccaccctggcctctgttccccctgctgccacctttggggccgatgacttggtactgaccctgagcaacccccagatgtcattggagggtacagagaaggccagctggttgggggaacagccccagttctggtcgaagacgcaggttctggactggatcagctaccaagtggagaagaacaagtacgacgcaagcgccattgacttctcacgatgtgacatggatggcgccaccctctgcaattgtgcccttgaggagctgcgtctggtctttgggcctctgggggaccaactccatgcccagctgcgagacctcacttccagctcttctgatgagctcagttggatcattgagctgctggagaaggatggcatggccttccaggaggccctagacccagggccctttgaccagggcagcccctttgcccaggagctgctggacgacggtcagcaagccagcccctaccaccccggcagctgtggcgcaggagccccctcccccggcagctctgacgtctccaccgcagggactggtgcttctcggagctcccactcctcagactccggtggaagtgacgtggacctggatcccactgatggcaagctcttccccagcggtgagtcgagggaggtccccaagagggcgtcccatttagcaatgcacagggggcccggctcttcctgcagccttttcctgtagaggggctactctccctaactcccctcttgcccctccttgaccttccaccaccgtccccacagatggttttcgtgactgcaagaagggggatcccaagcacgggaagcggaaacgaggccggccccgaaagctgagcaaagagtactgggactgtctcgagggcaagaagagcaagcacgcgcccagaggcacccacctgtgggagttcatccgggacatcctcatccacccggagctcaacgagggcctcatgaagtgggagaatcggcatgaaggcgtcttcaagttcctgcgctccgaggctgtggcccaactatggggccaaaagaaaaagaacagcaacatgacctacgagaagctgagccgggccatgaggtactactacaaacgggagatcctggaacgggtggatggccggcgactcgtctacaagtttggcaaaaactcaagcggctggaaggaggaagaggttctccagagtcggaactgagggttggaactatacccgggaccaaactcacggaccactcgaggcctgcaaaccttcctgggaggacaggcaggccagatggcccctccactggggaatgctcccagctgtgctgtggagagaagctgatgttttggtgtattgtcagccatcgtcctgggactcggagactatggcctcgcctccccaccctcctcttggaattacaagccctggggtttgaagctgactttatagctgcaagtgtatctccttttatctggtgcctcctcaaacccagtctcagacactaaatgcagacaacaccttcctcctgcagacacctggactgagccaaggaggcctggggaggccctaggggagcaccgtgatggagaggacagagcaggggctccagcaccttctttctggactggcgttcacctccctgctcagtgcttgggctccacgggcaggggtcagagcactccctaatttatgtgctatataaatatgtcagatgtacatagagatctattttttctaaaacattcccctccccactcctctcccacagagtgctggactgttccaggccctccagtgggctgatgctgggacccttaggatggggctcccagctcctttctcctgtgaatggaggcagagacctccaataaagtgccttctgggctttttctaacctttgtcttagctacctgtgtactgaaatttgggcctttggatcgaatatggtcaagaggttggaggggaggaaaatgaaggtctaccaggctgagggtgagggcaaaggctgacgaagaggggagttacagatttcctgtagcaggtgtgggcttacagacacatggactgggctgggaggcgagcaaaggaagcagctgagactgttggagaacgcttacaagacttcatgcaagcaaggacatgaactcagaacactgaggtcagaagcatcctgctgtcatgacaccgctcgagtgaccttgaccttgaccaagtctgtcctgtttaggactgatttttcctattaggctagggtttggacctgatgttctcaagatgtctagaattgcatggctggccttgtggaatagatggttttgcattccagccaagtgtgctgtaaactgtatatctgtaatatgaatcccagcttttgagtctgacaaaatcagagttaggatcttgtaaaggaaaaaaaaaaaaaacaaaacaaaatggagatgagtacttgctgagaaagaatgagggaaggagttggcatttgttgaaagtatagtctttttctcttttttttttaattgcaacttttactttagatttaggaggtcgtgcgcaggtttgttacatgggtatattgtgtgatgctgagcttgggatgcgaatgatcctgtcacccaggtagtgagtatagcacccagtgaaactgtagtctcatgccaggcactgtgctagcccactctggctcatttaatcctctcctaagaagagaggagacacagcgtccccatttgacagatgcagaaagaggttccacaggtgtgccttgattctgtcctaaaaccgtttcccggaagcttttcctggtgtgggcgcttctaacctaatcctcaatcgattccagaactattactctgtttccacagtgatactgtgtctaggttttagggaggacagttcattgatgttacttaagaatgctttccaggtggaaagttccttaagtttgaggcttcaaattccatacagcacattaaaatcccattcatgagtttgaaatactgctctgttgtcttggaaataccaatcagattgttggctgaagtgatgtggataaagaagggatcttagaaaaactaaagcttgtgtg

SEQ ID NO: 31225 - DNA, 3027 bp, Homo sapiens
  misc_feature (8)..(8): n is a, c, g, or t
  misc_feature (14)..(14): n is a, c, g, or t
  misc_feature (29)..(29): n is a, c, g, or t
ggcacgcnctcgtncgaattcggcacgantgtagcctcatggctgcaacctgtgagattagcaacatttttagcaactacttcagtgcgatgtacagctcggaggactccaccctggcctctgttccccctgctgccacctttggggccgatgacttggtactgaccctgagcaacccccagatgtcattggagggtacagagaaggccagctggttgggggaacagccccagttctggtcgaagacgcaggttctggactggatcagctaccaagtggagaagaacaagtacgacgcaagcgccattgacttctcacgatgtgacatggatggcgccaccctctgcaattgtgcccttgaggagctgcgtctggtctttgggcctctgggggaccaactccatgcccagctgcgagacctcacttccagctcttctgatgagctcagttggatcattgagctgctggagaaggatggcatggccttccaggaggccctagacccagggccctttgaccagggcagcccctttgcccaggagctgctggacgacggtcagcaagccagcccctaccaccccggcagctgtggcgcaggagccccctcccccggcagctctgacgtctccaccgcagggactggtgcttctcggagctcccactcctcagactccggtggaagtgacgtggacctggatcccactgatggcaagctcttccccagcgatggttttcgtgactgcaagaagggggatcccaagcacgggaagcggaaacgaggccggccccgaaagctgagcaaagagtactgggactgtctcgagggcaagaagagcaagcacgcgcccagaggcacccacctgtgggagttcatccgggacatcctcatccacccggagctcaacgagggcctcatgaagtgggagaatcggcatgaaggcgtcttcaagttcctgcgctccgaggctgtggcccaactatggggccaaaagaaaaagaacagcaacatgacctacgagaagctgagccgggccatgaggtactactacaaacgggagatcctggaacgggtggatggccggcgactcgtctacaagtttggcaaaaactcaagcggctggaaggaggaagaggttctccagagtcggaactgagggttggaactatacccgggaccaaactcacggaccactcgaggcctgcaaaccttcctgggaggacaggcaggccagatggcccctccactggggaatgctcccagctgtgctgtggagagaagctgatgttttggtgtattgtcagccatcgtcctgggactcggagactatggcctcgcctccccaccctcctcttggaattacaagccctggggtttgaagctgactttatagctgcaagtgtatctccttttatctggtgcctcctcaaacccagtctcagacactaaatgcagacaacaccttcctcctgcagacacctggactgagccaaggaggcctggggaggccctaggggagcaccgtgatggagaggacagagcaggggctccagcaccttctttctggactggcgttcacctccctgctcagtgcttgggctccacgggcaggggtcagagcactccctaatttatgtgctatataaatatgtcagatgtacatagagatctattttttctaaaacattcccctccccactcctctcccacagagtgctggactgttccaggccctccagtgggctgatgctgggacccttaggatggggctcccagctcctttctcctgtgaatggaggcagagacctccaataaagtgccttctgggctttttctaacctttgtcttagctacctgtgtactgaaatttgggcctttggatcgaatatggtcaagaggttggaggggaggaaaatgaaggtctaccaggctgagggtgagggcaaaggctgacgaagaggggagttacagatttcctgtagcaggtgtgggcttacagacacatggactgggctgggaggcgagcaaaggaagcagctgagactgttggagaacgcttacaagacttcatgcaagcaaggacatgaactcagaacactgaggtcagaagcatcctgctgtcatgacaccgctcgagtgaccttgaccttgaccaagtctgtcctgtttaggactgatttttcctattaggctagggtttggacctgatgttctcaagatgtctagaattgcatggctggccttgtggaatagatggttttgcattccagccaagtgtgctgtaaactgtatatctgtaatatgaatcccagcttttgagtctgacaaaatcagagttaggatcttgtaaaggaaaaaaaaaaaaaacaaaacaaaatggagatgagtacttgctgagaaagaatgagggaaggagttggcatttgttgaaagtatagtctttttctcttttttttttaattgcaacttttactttagatttaggaggtcgtgcgcaggtttgttacatgggtatattgtgtgatgctgagcttgggatgcgaatgatcctgtcacccaggtagtgagtatagcacccagtgaaactgtagtctcatgccaggcactgtgctagcccactctggctcatttaatcctctcctaagaagagaggagacacagcgtccccatttgacagatgcagaaagaggttccacaggtgtgccttgattctgtcctaaaaccgtttcccggaagcttttcctggtgtgggcgcttctaacctaatcctcaatcgattccagaactattactctgtttccacagtgatactgtgtctaggttttagggaggacagttcattgatgttacttaagaatgctttccaggtggaaagttccttaagtttgaggcttcaaattccatacagcacattaaaatcccattcatgagtttgaaatactgctctgttgtcttggaaataccaatcagattgttggctgaagtgatgtggataaagaagggatcttagaaaaactaaagcttgtgtg

SEQ ID NO: 31226 - DNA, 3186 bp, Homo sapiens
gagagagagagagagagagaactagtctcgaggtcgacgcggccgcgaattcgcggccgcgtcgaccgaagacgcaggctctatttagagccgggtaggggagcgcagcggccagatacctcagcgctacctggcggaactggatttctctcccgcctgccggcctgcctgccacagccggactccgccactccgagaaggccagctggttgggggaacagccccagttctggtcgaagacgcaggttctggactggatcagctaccaagtggagaagaacaagtacgacgcaagcgccattgacttctcacgatgtgacatggatggcgccaccctctgcaattgtgcccttgaggagctgcgtctggtctttgggcctctgggggaccaactccatgcccagctgcgagacctcagtgagtccaggcccctggaggctggggagcagctccacatgttgagcccagtcgagttcagtgtggccgtaggcaggccctggagctctgggccagctgcacagccagagagagcccttgagggagggattaggggagtgtgacccttccttccttccttgtcagcttccagctcttctgatgagctcagttggatcattgagctgctggagaaggatggcatggccttccaggaggccctagacccagggccctttgaccagggcagcccctttgcccaggagctgctggacgacggtcagcaagccagcccctaccaccccggcagctgtggcgcaggagccccctcccccggcagctctgacgtctccaccgcagggactggtgcttctcggagctcccactcctcagactccggtggaagtgacgtggacctggatcccactgatggcaagctcttccccagcgatggttttcgtgactgcaagaagggggatcccaagcacgggaagcggaaacgaggccggccccgaaagctgagcaaagagtactgggactgtctcgagggcaagaagagcaagcacgcgcccagaggcacccacctgtgggagttcatccgggacatcctcatccacccggagctcaacgagggcctcatgaagtgggagaatcggcatgaaggcgtcttcaagttcctgcgctccgaggctgtggcccaactatggggccaaaagaaaaagaacagcaacatgacctacgagaagctgagccgggccatgaggtactactacaaacgggagatcctggaacgggtggatggccggcgactcgtctacaagtttggcaaaaactcaagcggctggaaggaggaagaggttctccagagtcggaactgagggttggaactatacccgggaccaaactcacggaccactcgaggcctgcaaaccttcctgggaggacaggcaggccagatggcccctccactggggaatgctcccagctgtgctgtggagagaagctgatgttttggtgtattgtcagccatcgtcctgggactcggagactatggcctcgcctccccaccctcctcttggaattacaagccctggggtttgaagctgactttatagctgcaagtgtatctccttttatctggtgcctcctcaaacccagtctcagacactaaatgcagacaacaccttcctcctgcagacacctggactgagccaaggaggcctggggaggccctaggggagcaccgtgatggagaggacagagcaggggctccagcaccttctttctggactggcgttcacctccctgctcagtgcttgggctccacgggcaggggtcagagcactccctaatttatgtgctatataaatatgtcagatgtacatagagatctattttttctaaaacattcccctccccactcctctcccacagagtgctggactgttccaggccctccagtgggctgatgctgggacccttaggatggggctcccagctcctttctcctgtgaatggaggcagagacctccaataaagtgccttctgggctttttctaacctttgtcttagctacctgtgtactgaaatttgggcctttggatcgaatatggtcaagaggttggaggggaggaaaatgaaggtctaccaggctgagggtgagggcaaaggctgacgaagaggggagttacagatttcctgtagcaggtgtgggcttacagacacatggactgggctgggaggcgagcaaaggaagcagctgagactgttggagaacgcttacaagacttcatgcaagcaaggacatgaactcagaacactgaggtcagaagcatcctgctgtcatgacaccgctcgagtgaccttgaccttgaccaagtctgtcctgtttaggactgatttttcctattaggctagggtttggacctgatgttctcaagatgtctagaattgcatggctggccttgtggaatagatggttttgcattccagccaagtgtgctgtaaactgtatatctgtaatatgaatcccagcttttgagtctgacaaaatcagagttaggatcttgtaaaggaaaaaaaaaaaaaacaaaacaaaatggagatgagtacttgctgagaaagaatgagggaaggagttggcatttgttgaaagtatagtctttttctcttttttttttaattgcaacttttactttagatttaggaggtcgtgcgcaggtttgttacatgggtatattgtgtgatgctgagcttgggatgcgaatgatcctgtcacccaggtagtgagtatagcacccagtgaaactgtagtctcatgccaggcactgtgctagcccactctggctcatttaatcctctcctaagaagagaggagacacagcgtccccatttgacagatgcagaaagaggttccacaggtgtgccttgattctgtcctaaaaccgtttcccggaagcttttcctggtgtgggcgcttctaacctaatcctcaatcgattccagaactattactctgtttccacagtgatactgtgtctaggttttagggaggacagttcattgatgttacttaagaatgctttccaggtggaaagttccttaagtttgaggcttcaaattccatacagcacattaaaatcccattcatgagtttgaaatactgctctgttgtcttggaaataccaatcagattgttggctgaagtgatgtggataaagaagggatcttagaaaaactaaagcttgtgtg

SEQ ID NO: 31227 - DNA, 3431 bp, Homo sapiens
gagagagagagagagagagaactagtctcgaggtcgacgcggccgcgaattcgcggccgcgtcgaccgaagacgcaggctctatttagagccgggtaggggagcgcagcggccagatacctcagcgctacctggcggaactggatttctctcccgcctgccggcctgcctgccacagccggactccgccactccggtagcctcatggctgcaacctgtgagattagcaacatttttagcaactacttcagtgcgatgtacagctcggaggactccaccctggcctctgttccccctgctgccacctttggggccgatgacttggtactgaccctgagcaacccccagatgtcattggagggtacagagaaggccagctggttgggggaacagccccagttctggtcgaagacgcaggttctggactggatcagctaccaagtggagaagaacaagtacgacgcaagcgccattgacttctcacgatgtgacatggatggcgccaccctctgcaattgtgcccttgaggagctgcgtctggtctttgggcctctgggggaccaactccatgcccagctgcgagacctcacttccagctcttctgatgagctcagttggatcattgagctgctggagaaggatggcatggccttccaggaggccctagacccagggccctttgaccagggcagcccctttgcccaggagctgctggacgacggtcagcaagccagcccctaccaccccggcagctgtggcgcaggagccccctcccccggcagctctgacgtctccaccgcaggaacaggaacaggctgggaagtgtgtcctgagagccagcagcgtggttgagcagagggtgggccggcaggggacttactctgaccccgccccccggactggtgcttctcggagctcccactcctcagactccggtggaagtgacgtggacctggatcccactgatggcaagctcttccccagcggtgagtcgagggaggtccccaagagggcgtcccatttagcaatgcacagggggcccggctcttcctgcagccttttcctgtagaggggctactctccctaactcccctcttgcccctccttgaccttccaccaccgtccccacagatggttttcgtgactgcaagaagggggatcccaagcacgggaagcggaaacgaggccggccccgaaagctgagcaaagagtactgggactgtctcgagggcaagaagagcaagcacgcgcccagaggcacccacctgtgggagttcatccgggacatcctcatccacccggagctcaacgagggcctcatgaagtgggagaatcggcatgaaggcgtcttcaagttcctgcgctccgaggctgtggcccaactatggggccaaaagaaaaagaacagcaacatgacctacgagaagctgagccgggccatgaggtactactacaaacgggagatcctggaacgggtggatggccggcgactcgtctacaagtttggcaaaaactcaagcggctggaaggaggaagaggttctccagagtcggaactgagggttggaactatacccgggaccaaactcacggaccactcgaggcctgcaaaccttcctgggaggacaggcaggccagatggcccctccactggggaatgctcccagctgtgctgtggagagaagctgatgttttggtgtattgtcagccatcgtcctgggactcggagactatggcctcgcctccccaccctcctcttggaattacaagccctggggtttgaagctgactttatagctgcaagtgtatctccttttatctggtgcctcctcaaacccagtctcagacactaaatgcagacaacaccttcctcctgcagacacctggactgagccaaggaggcctggggaggccctaggggagcaccgtgatggagaggacagagcaggggctccagcaccttctttctggactggcgttcacctccctgctcagtgcttgggctccacgggcaggggtcagagcactccctaatttatgtgctatataaatatgtcagatgtacatagagatctattttttctaaaacattcccctccccactcctctcccacagagtgctggactgttccaggccctccagtgggctgatgctgggacccttaggatggggctcccagctcctttctcctgtgaatggaggcagagacctccaataaagtgccttctgggctttttctaacctttgtcttagctacctgtgtactgaaatttgggcctttggatcgaatatggtcaagaggttggaggggaggaaaatgaaggtctaccaggctgagggtgagggcaaaggctgacgaagaggggagttacagatttcctgtagcaggtgtgggcttacagacacatggactgggctgggaggcgagcaaaggaagcagctgagactgttggagaacgcttacaagacttcatgcaagcaaggacatgaactcagaacactgaggtcagaagcatcctgctgtcatgacaccgctcgagtgaccttgaccttgaccaagtctgtcctgtttaggactgatttttcctattaggctagggtttggacctgatgttctcaagatgtctagaattgcatggctggccttgtggaatagatggttttgcattccagccaagtgtgctgtaaactgtatatctgtaatatgaatcccagcttttgagtctgacaaaatcagagttaggatcttgtaaaggaaaaaaaaaaaaaacaaaacaaaatggagatgagtacttgctgagaaagaatgagggaaggagttggcatttgttgaaagtatagtctttttctcttttttttttaattgcaacttttactttagatttaggaggtcgtgcgcaggtttgttacatgggtatattgtgtgatgctgagcttgggatgcgaatgatcctgtcacccaggtagtgagtatagcacccagtgaaactgtagtctcatgccaggcactgtgctagcccactctggctcatttaatcctctcctaagaagagaggagacacagcgtccccatttgacagatgcagaaagaggttccacaggtgtgccttgattctgtcctaaaaccgtttcccggaagcttttcctggtgtgggcgcttctaacctaatcctcaatcgattccagaactattactctgtttccacagtgatactgtgtctaggttttagggaggacagttcattgatgttacttaagaatgctttccaggtggaaagttccttaagtttgaggcttcaaattccatacagcacattaaaatcccattcatgagtttgaaatactgctctgttgtcttggaaataccaatcagattgttggctgaagtgatgtggataaagaagggatcttagaaaaactaaagcttgtgtg

SEQ ID NO: 31228 - DNA, 1990 bp, Homo sapiens
gagagagagagagagagagaactagtctcgaggtcgacgcggccgcgaattcgcggccgcgtcgaccgaagacgcaggctctatttagagccgggtaggggagcgcagcggccagatacctcagcgctacctggcggaactggatttctctcccgcctgccggcctgcctgccacagccggactccgccactccggtagcctcatggctgcaacctgtgagattagcaacatttttagcaactacttcagtgcgatgtacagctcggaggactccaccctggcctctgttccccctgctgccacctttggggccgatgacttggtactgaccctgagcaacccccagatgtcattggagggtacagagaaggccagctggttgggggaacagccccagttctggtcgaagacgcaggttctggactggatcagctaccaagtggagaagaacaagtacgacgcaagcgccattgacttctcacgatgtgacatggatggcgccaccctctgcaattgtgcccttgaggagctgcgtctggtctttgggcctctgggggaccaactccatgcccagctgcgagacctcacttccagctcttctgatgagctcagttggatcattgagctgctggagaaggatggcatggccttccaggaggccctagacccagggccctttgaccagggcagcccctttgcccaggagctgctggacgacggtcagcaagccagcccctaccaccccggcagctgtggcgcaggagccccctcccccggcagctctgacgtctccaccgcagggactggtgcttctcggagctcccactcctcagactccggtggaagtgacgtggacctggatcccactgatggcaagctcttccccagcgatggttttcgtgactgcaagaagggggatcccaagcacgggaagcggaaacgaggccggccccgaaagctgagcaaagagtactgggactgtctcgagggcaagaagagcaagcacgcgcccagaggcacccacctgtgggagttcatccgggacatcctcatccacccggagctcaacgagggcctcatgaagtgggagaatcggcatgaaggcgtcttcaagttcctgcgctccgaggctgtggcccaactatggggccaaaagaaaaagaacagcaacatgacctacgagaagctgagccgggccatgaggtactactacaaacgggagatcctggaacgggtggatggccggcgactcgtctacaagtttggcaaaaactcaagcggctggaaggaggaagaggttctccagagtcggaactgagggttggaactatacccgggaccaaactcacggaccactcgaggcctgcaaaccttcctgggaggacaggcaggccagatggcccctccactggggaatgctcccagctgtgctgtggagagaagctgatgttttggtgtattgtcagccatcgtcctgggactcggagactatggcctcgcctccccaccctcctcttggaattacaagccctggggtttgaagctgactttatagctgcaagtgtatctccttttatctggtgcctcctcaaacccagtctcagacactaaatgcagacaacaccttcctcctgcagacacctggactgagccaaggaggcctggggaggccctaggggagcaccgtgatggagaggacagagcaggggctccagcaccttctttctggactggcgttcacctccctgctcagtgcttgggctccacgggcaggggtcagagcactccctaatttatgtgctatataaatatgtcagatgtacatagagatctattttttctaaaacattcccctccccactcctctcccacagagtgctggactgttccaggccctccagtgggctgatgctgggacccttaggatggggctcccagctcctttctcctgtgattgctgccaacacaggcctgttcataatgaaaggt

SEQ ID NO: 31229 - DNA, 2204 bp, Homo sapiens
atttcttcgcatattctctccgcccagaggcacccacctgtgggagttcatccgggacatcctcatccacccggagctcaacgagggcctcatgaagtgggagaatcggcatgaaggcgtcttcaagttcctgcgctccgaggctgtggcccaactatggggccaaaagaaaaagaacagcaacatgacctacgagaagctgagccgggccatgaggtactactacaaacgggagatcctggaacgggtggatggccggcgactcgtctacaagtttggcaaaaactcaagcggctggaaggaggaagaggttctccagagtcggaactgagggttggaactatacccgggaccaaactcacggaccactcgaggcctgcaaaccttcctgggaggacaggcaggccagatggcccctccactggggaatgctcccagctgtgctgtggagagaagctgatgttttggtgtattgtcagccatcgtcctgggactcggagactatggcctcgcctccccaccctcctcttggaattacaagccctggggtttgaagctgactttatagctgcaagtgtatctccttttatctggtgcctcctcaaacccagtctcagacactaaatgcagacaacaccttcctcctgcagacacctggactgagccaaggaggcctggggaggccctaggggagcaccgtgatggagaggacagagcaggggctccagcaccttctttctggactggcgttcacctccctgctcagtgcttgggctccacgggcaggggtcagagcactccctaatttatgtgctatataaatatgtcagatgtacatagagatctattttttctaaaacattcccctccccactcctctcccacagagtgctggactgttccaggccctccagtgggctgatgctgggacccttaggatggggctcccagctcctttctcctgtgaatggaggcagagacctccaataaagtgccttctgggctttttctaacctttgtcttagctacctgtgtactgaaatttgggcctttggatcgaatatggtcaagaggttggaggggaggaaaatgaaggtctaccaggctgagggtgagggcaaaggctgacgaagaggggagttacagatttcctgtagcaggtgtgggcttacagacacatggactgggctgggaggcgagcaaaggaagcagctgagactgttggagaacgcttacaagacttcatgcaagcaaggacatgaactcagaacactgaggtcagaagcatcctgctgtcatgacaccgctcgagtgaccttgaccttgaccaagtctgtcctgtttaggactgatttttcctattaggctagggtttggacctgatgttctcaagatgtctagaattgcatggctggccttgtggaatagatggttttgcattccagccaagtgtgctgtaaactgtatatctgtaatatgaatcccagcttttgagtctgacaaaatcagagttaggatcttgtaaaggaaaaaaaaaaaaaacaaaacaaaatggagatgagtacttgctgagaaagaatgagggaaggagttggcatttgttgaaagtatagtctttttctcttttttttttaattgcaacttttactttagatttaggaggtcgtgcgcaggtttgttacatgggtatattgtgtgatgctgagcttgggatgcgaatgatcctgtcacccaggtagtgagtatagcacccagtgaaactgtagtctcatgccaggcactgtgctagcccactctggctcatttaatcctctcctaagaagagaggagacacagcgtccccatttgacagatgcagaaagaggttccacaggtgtgccttgattctgtcctaaaaccgtttcccggaagcttttcctggtgtgggcgcttctaacctaatcctcaatcgattccagaactattactctgtttccacagtgatactgtgtctaggttttagggaggacagttcattgatgttacttaagaatgctttccaggtggaaagttccttaagtttgaggcttcaaattccatacagcacattaaaatcccattcatgagtttgaaatactgctctgttgtcttggaaataccaatcagattgttggctgaagtgatgtggataaagaagggatcttagaaaaactaaagcttgtgtg

SEQ ID NO: 31230 - DNA, 1314 bp, Homo sapiens
  misc_feature (1268)..(1269): n is a, c, g, or t
  misc_feature (1271)..(1271): n is a, c, g, or t
gagagagagagagagagagaactagtctcgaggtcgacgcggccgcgaattcgcggccgcgtcgaccgaagacgcaggctctatttagagccgggtaggggagcgcagcggccagatacctcagcgctacctggcggaactggatttctctcccgcctgccggcctgcctgccacagccggactccgccactccggtagcctcatggctgcaacctgtgagattagcaacatttttagcaactacttcagtgcgatgtacagctcggaggactccaccctggcctctgttccccctgctgccacctttggggccgatgacttggtactgaccctgagcaacccccagatgtcattggagggtacagagaaggccagctggttgggggaacagccccagttctggtcgaagacgcaggttctggactggatcagctaccaagtggagaagaacaagtacgacgcaagcgccattgacttctcacgatgtgacatggatggcgccaccctctgcaattgtgcccttgaggagctgcgtctggtctttgggcctctgggggaccaactccatgcccagctgcgagacctcacttccagctcttctgatgagctcagttggatcattgagctgctggagaaggatggcatggccttccaggaggccctagacccagggccctttgaccagggcagcccctttgcccaggagctgctggacgacggtcagcaagccagcccctaccaccccggcagctgtggcgcaggagccccctcccccggcagctctgacgtctccaccgcagggactggtgcttctcggagctcccactcctcagactccggtggaagtgacgtggacctggatcccactgatggcaagctcttccccagcgatggttttcgtgactgcaagaagggggatcccaagcacgggaagcggaaacgaggccggccccgaaagctgagcaaagagtactgggactgtctcgagggcaagaagagcaagcacgcgcccagaggcacccacctgtgggagttcatccgggacatcctcatccacccggagctcaacgagggcctcatgaagtgggagaatcggcatgaaggcgtcttcaagttcctgcgctccgaggctgtggcccaactatggggccaaaagaaaaagaacagcaacatgacctacgagaagctgagccgggccatgaggatgtcccggatgaactcccacaggtgggtgcctctgggcgcagctgcctcctcacattgaggnntnccagaggcaggacagtgccaattgggatcctctagaacagcca

SEQ ID NO: 31231 - DNA, 944 bp, Homo sapiens
gagagagagagagagagagaactagtctcgaggtcgacgcggccgcgaattcgcggccgcgtcgaccgaagacgcaggctctatttagagccgggtaggggagcgcagcggccagatacctcagcgctacctggcggaactggatttctctcccgcctgccggcctgcctgccacagccggactccgccactccggtagcctcatggctgcaacctgtgagattagcaacatttttagcaactacttcagtgcgatgtacagctcggaggactccaccctggcctctgttccccctgctgccacctttggggccgatgacttggtactgaccctgagcaacccccagatgtcattggagggtacaggtgggtctcagcggggtgggatggggcacggagtgggagacagatccatctaagggcctgttagacaaatgggggaataggcagggaggagggtctctaggcaaattccagggctagaggctgagacttagtgactgaggtgctgggggttgtggggctgtgacaggcagagggaggtgtcagataccaggacaagggtgttgtgaatgctacctcctgcccctactcttgggatggctccaagggctgaggtgtgaatccccagtgtgctccaggaatggggctgtgtgggctgggagtggtggctcacgcctgtaatcccagcactttgggaggctgagctgagcggatcacctgaggtcaagagttcgagaccagcctagccaacatggtgaaaccccgtctctactaaaaatacaaaaaaaaatttatcccagcgtggtggtgggcacctataatcccagctactggggaggctgacgcaggagtatcgcttgaacctgggaggtggaggttgctgtgagccgagattgtgccattgcaccccagcctaggtgacaggagtgagactccatctc

SEQ ID NO: 31232 - DNA, 445 bp, Homo sapiens
ttcttttctttttttaatagtagccatcctaatgggtgtggtattgcatcttggttttgatttgttattcctgctttctgtccatatattttttcttttttttaagtgacagggtcttgctctgttgtcctggctggagtgcaatggcaccatcatggctcactgcagccttgacctcccaggttcaagtaatcctcccatcttagcctcccgagtagctaggactacaggcacacatcaccatacccagctaaatttaaaaaaaaaatttttttttggccgggtgcggtggctcatgcctgtaatccaagcactttgggaggccaaggtgggcagatcacctgaggtcaggagttggagacctgggaggcggaggttgtggtgagctgagatcacgccactgcactccagcctgggtaacaagagcaaaactccctctcaaaat

SEQ ID NO: 31233 - DNA, 1752 bp, Homo sapiens
cgcatttaggtctctcatctatttcaagttaatttttgtgtgtgatctgaggtccttctcattttgtactgagtcaaactgaagagccccccacctccccagttggcctgccacactttgccttctgcatttgggtctcagctcaaacatcctcactccagggaggcctcccctgtcaatctaaagcagctgcctccctgcagtttcagtcaccaccccattttattggggccgtcagaaatggtctgacatgttgtctgttgcctcccatataagctccatgacaacagaccctgtctagcttactgccttcgtttctagcacctagcgcagtgcctgacacttagccagagctcagactattatttgaaagcttcttttggttaaaagaaacattcccagtggattttgcttaagactttgtaagtgtctctggcctcatggagttggagggctgagtgggaggggatctaccagcatcacagtcacaggtggtcactcgtcccttgccccagccatcccattacttcacaagacagccccttccatccttggacaactctgatgattagaaaattcttcctgatgttggacagagacctgcttccccatcgctggcactcgttatccactgccttcctttagggacaactggagttgaacttcacattttgacagtcctttaaatatttgaaaccagctatcgtatgtctcttaaatacctcctctgggctgagtgcttctaattctctcagctgttcctcctggagccgagaagggctggactctgaccccttagtcgctgatgaaggcctgcagacatggggtgggcacaggctgccaaagaaagccccagcacagccacagctcagaacgaaggaactcgagtctccttgtttgctttccccactttgagctgatgaattccaaaactggaagcagaactttgagaaaaagcacccagtacaaactccctaactagatatcttaaaggcagagctgactcttagtagtacaaattactctgtaatattgctttctattaaaagggtgtggttttttttttgttgttttttttttttttttagctagtccagtggtctttttgatgttggttcagcttagtggttctcaaccctggaacaacccgtagacccacctggggagctcttaaaattatcagtgcctaccccaccttccaagattctgatttaaatcctgtagtgtttttaaggcaccccaggtgattgtaatgtacagccagggttgtagaccttggcttcaagagctcagcattgaacctgaaattccctacagccccacaagaatgagcaaatgctggatgtcagcacaacatccaggagctggcatgagccagaggactggctaagaggactcaattattttctaagatggagattatgaaagctatacatgttcaaaagaaatgaaataatatagaaatgttggccaggcacggtggcccacacctgtaatcccagtactttgggaggctgaggcaggaggattgcttgaggcctagagtttgagaccagcctgggcaacatagcaagaccccatctctacaaaaaaattaaaaaattatccaagcatggtggcacatgccgatagtcccagctactggggaggctgagcggggaggacttcttgagcccaggaggtcagggctgcattgagctatgattgtgccactgcactccagcctgggcaagagagcgagactctgtctct

SEQ ID NO: 31234 - DNA, 1314 bp, Homo sapiens
caacgatggtcctcagtagggctgaggctgcggcctctgctttttttccaccagcagccacactaagcgagcccccagttgaggggaggttcgacagctcatctgttaggctaagtcccagctcatccagaacccgggacaccacagcatcactctcctcttcatcttccccatcgctggcactcgttatccactgccttcctttagggacaactggagttgaacttcacattttgacagtcctttaaatatttgaaaccagctatcgtatgtctcttaaatacctcctctgggctgagtgcttctaattctctcagctgttcctcctggagccgagaagggctggactctgaccccttagtcgctgatgaaggcctgcagacatggggtgggcacaggctgccaaagaaagccccagcacagccacagctcagaacgaaggaactcgagtctccttgtttgctttccccactttgagctgatgaattccaaaactggaagcagaactttgagaaaaagcacccagtacaaactccctaactagatatcttaaaggcagagctgactcttagtagtacaaattactctgtaatattgctttctattaaaagggtgtggttttttttttgttgttttttttttttttttagctagtccagtggtctttttgatgttggttcagcttagtggttctcaaccctggaacaacccgtagacccacctggggagctcttaaaattatcagtgcctaccccaccttccaagattctgatttaaatcctgtagtgtttttaaggcaccccaggtgattgtaatgtacagccagggttgtagaccttggcttcaagagctcagcattgaacctgaaattccctacagccccacaagaatgagcaaatgctggatgtcagcacaacatccaggagctggcatgagccagaggactggctaagaggactcaattattttctaagatggagattatgaaagctatacatgttcaaaagaaatgaaataatatagaaatgttggccaggcacggtggcccacacctgtaatcccagtactttgggaggctgaggcaggaggattgcttgaggcctagagtttgagaccagcctgggcaacatagcaagaccccatctctacaaaaaaattaaaaaattatccaagcatggtggcacatgccgatagtcccagctactggggaggctgagcggggaggacttcttgagcccaggaggtcagggctgcattgagctatgattgtgccactgcactccagcctgggcaagagagcgagactctgtctct

SEQ ID NO: 31235 - DNA, 1661 bp, Homo sapiens
gttaaaatatgcctaaatttcctctttgggaacgcaagacttgcagagatgactccatggagagcggactctgccggcgggaactggagtcgttggtgacgtcatcccagtctgatctgtgaagggtagggccagcaggcagcaccaaagttcccgtatgcgcgttttcagtcttcatttaggtccgaattcccggcatataagaatactaccgtcgcttgtttttcagatttttgcggctattttcgttggtgtgttggtcatgtctggtcgcggcaaaggcggaaagggactgggtaaaggaggcgctaagcgtcaccgtaaggtcctgcgagataacatccagggcattaccaagcctgccatccggcgccttgctcgtcgcgggggtgtcaagcgcatttctggtctcatctacgaggagactcgcggggttctgaaggtgtttctggaaaacgtgattcgtgatgctgtgacttacacggagcacgccaaacgcaagacagtgacagcgatggatgtggtctacgcgctgaagagacagggacgcactctttacggcttcggcggctaatgctaccgcttaaacgactcagcatctcgacttcccaaatcaaaggcccttttcagggccgcccacagttttccgcaaaagagctcatgacttgttagacgattggttggtctctttataagttaattgttcctgtcaacaggtacgtatatttttcagccgttttttttttttcgttccaaattacatttggggtttcggcatacgattttttaggctacgatccttttatgtttatggtagtagggccttagattgcactgaaaaggctagggtaatagtgtctgtttaccttaccacttttatttggagtacctaaaaatgcatggttttcgacataagtgggaaaaccgcaagacactgcgtaaccgctcaaaatggcggagagcgaagaacaaagccggtgcctggcaatgggccggacccgcgaattagcgcaaccaatcatcttcctggaaaggagtgtgggccttaaattctagcggcctgttttctattacttaacctaacgaccgagtttaggtgtgtagaagttcctggggtagataagctcacgcaaggagaggttgcaagcattcatttcggaattctattaagccaacccagttgtcccttagaagttatgatatttgctgttttttgaataaaagaatttgactctctttaaaccctaaagcttgaaatttagcatttatctcacatgagacaaatgtttaggaactcatgtttaggaactcatgttcctgcctgaggcaggaactgaaacaccagatcacttgcatcgagaccgtgagactccctatgtttcatccatcatgattgcgtccttatccctccctgatttcctgttttctcgcccttctcgctacataagccccccaattttggtcggggagacggatttgtgatttcatctcctccctcatgaatactcatagaatttttccaaacctactgaatctgtatgtaaggttgactctgtaaggcatatatatattccagctccccttcactgccacagagcgctcattccatcctgggattacttctccctctgaaaataaagtctttgttacttcctgaaaaa

SEQ ID NO: 31236 - DNA, 2276 bp, Homo sapiens
ctttaaggttggtgacgccatggaaggaaaacaagtaactttgcaacaatctgttcaacaatgagagttaccaaatgccagacactgctaagtgctgggaacttagatgtaaccaaagacttaaaagatactagtctttaagacaggctttgagaaattcaagtgtagggtaaggccacctccccagcaagtaaatactgacatggtgaagatatgtattgggtgatatgagagcccataggagagacatctaaagtttaatagcaacactaggctggactgagtggtgaatacgttgatatagcaatttaataaatgtgttattgtcaatgtaggcattttgctcatagcttagggcaagtgataaaaaacagagcttaacaaaggactggatgttttagtttgacagcagtgtctaaattacagattagagaactaatgactagccataccgaagacatttatctggaaatgccttccctaagtgccaacagagaatgaaaatatagtcaatagctttaagtgaccccatgcatcttaatgcctttcaagcaacatgtttttctgacttccaaatataaacaacctaagcattgtgcagtagccatgagggactaggtatccaagtgcacattatattggctttgtaggagccattgggaggggagtaatagtttcagagtcatggaaacaaatcataagtagctgctctgggtgctctctaggagggcagaacttgctgaatttgaagactattaatgatgcagctctcactggtacaagtgaaaaacctctcagccctacacagcatctttaagaaagctttaattttggtttttcagagcaatattcacatgacatctttcggatctggaatcttaattaccattaggttggaactctacctgaactaaaaataagtggtctctatcacgttgaaattactttaatattttcatttatgtttatactatttatttaaatgcggagaacatggctaaccattcaggaccatttaattatcaaattattaatgattcttccataataaacaagcaaactgtcatacttgttgacttatatttcattccatggaattcaaatttaattaattgataaatcacattgtactttataagagtttattccttaagtgtttgaatttacacttttttctcctgtgacagcatctattcccaaggcaatcaacattttaatggaacgaactgaggtttgcaattgctaatgttattctcccatcccagtttctacttgtttcttgtaaaaaaggaggtttctaaatcttgactgttgattgacaattaatgggctaaatttcccattagcaaacacttttcacatatacactaatattagtatctaaattatattaaaatctaatttggtagcaattgacttgaaatttgtgatacttcaacttgtgctaggttgtagttttgcttgtatcactcatagttactaaaaatgcaaaaggcaaatttgaaataactataaaaataaacctttaatgaactttttaatatgcaatactcaattgtaaataaccattatctttactgaatcagatgtttcattaactgttagcagttatttcgagttatttatatatcacagaattttgaactaaagatcatctagctgaatttcctttatattaaagaagaggagaaaatcttaatactaagtatgtgtgagcctggagctgccatggagcatgtagagagagtctcctagttgataccaactcaggaaagcagaatcaagcaataaagagacattttgggcctgatgacatcatttcagcacctggatccagcgatgcctaaagatgtgactcctagacttttcacttacatgagccaaaacggttcctttgcatcaataaatcgctctgtgatgcattttataatgtacaaccaagaatctcaatatttattattttgcattaaatatcagtaagtttgatataaaaagctcagtaaaattcattaatttgagaatgtgtctatatcatagtaaagttttaaacctacataattttcaatatttataccttttactgcaaaaataaaaatgagtttatccttgccctaaagctgtaaaattaaactctgtacaattctagttatttgaaatataaaataaaattattggtcatttcatgtatacatttgtggtaacactttaactttttccctgtaaggccatcttttgtatgtttctgtttccatcaagcaggcttttaatgcaacttt

SEQ ID NO: 31237 - DNA, 983 bp, Homo sapiens
gatactcctcggccttaattagctcaggtagacagaatgtgggcaagtagttagggcgaggagaatgacaatgaaaataagtaaaactgttccttgagtttgctttgagagatacccagaactgacatttcagacactcgcatttttaaaaattaatgttttctcacctttgtgttctaaaagtcccttctatttattgtatctcagaatttaattcttcacttttttacatgtgtttttgtttatagcttctgctggcactataggaagggtaaacaactatttactgatggtgcttccaattttgctgttacatgactcaaacaaactgggttttatgagatctttttagaaaaatactaataaattattcattttcaaatattatctctaatagtgtgcataggatcttaatatggccacactttggttacataagtcatgattaagcagaatatacagtggccacatagtaggtataataacttgatactgcttttttgtaagataataagataaaaaacaattacataatattaattattggactaaaatgacatctttttaatatacattcatcatatagacttttttcataggcaagggtattatgcattttatagcccactgattattccattagacacaaaataaaatctttgaaacatgcaaaatgaaatacttttgagactagagtatcgttgctctatcagtcgtttgtttttactaaatagaagcaaaaaaagactatctgattgctttcataaatgtgtgctctttttcttgtacattacaggaaaatgaaaaaataatcattaaaaaaaggattctaaaaactttgttcctcaccttgcgtcataattttgtttgtttcagctcaccgaatatttatgctgtgttcttctggcggtgcattacaagtaccatatacaaggaaagtacggtgcaataaggtaggtaacatcagcgcatacatttggcct

SEQ ID NO: 31238 - DNA, 297 bp, Homo sapiens
ttttactaaatagaagcaaaaaaagactatctgattgctttcataaatgtgtgctctttttcttgtacattacaggaaaatgaaaaaataatcattaaaaaaaggattctaaaaactttgttcctcaccttgcgtcataattttgtttgtttctttcatgactattgttttgttttctttgcggtcattttagaaccattaaagaagtacgagcaataggtagggccaatgcaaaccctaccattgctggttgtaaactataaaatatatggcaaataaagtgttaattaaaaatca

SEQ ID NO: 31239 - DNA, 181 bp, Homo sapiens
gacctcccacccgtctccacacacagaggctccggctccttccggaaggactgcctggattttcggggcaggtgctgtgtccctccctgacactggggctcccctgcattttggccatcagctgcccacggcccccttccttctcatgggcacctgggacaagtgaggggcacaggtggat

SEQ ID NO: 31240 - DNA, 426 bp, Homo sapiens
agactgcctatgtagcaatggtcagaaaagattaaaaaacagcccttggaccatccttcattatgtatttgtgatgataatattaatttatttaaaatgatatttaatgacaaattatgtctgggaagtttgatgaacaaattccaggcaatggcttacttctgtccttttatttgtatatcttgataaatgagatgtgaattttaaaaatcttgcgtcaaatatttctagttacttaatgctgatagctaagaagataacttctactaatgaagataattaataaagcattctaattaagaaaacttgaaatagctaaattaaggaaaagggtaaggccactggctcaaacttggaaaatatatgggtaaaatcttaagacattttccttgtattaaaacaggtgagttttctgaagccatgtaa

SEQ ID NO: 31241 - DNA, 239 bp, Homo sapiens
ggcaggctagagaagctgtcccaagagcagtgacatctgaactgagttttgaaggatgaataggagtttgccaggtagacaatggatggagtgtgttcctatcaggaggaaccgcaagtttaaaatacaacagcaagtgatgtattaatagaatgactgttatgtggagtggaagcgggagggagatgtttagatggggcctatgggaaaaagtggggccaaggcatgaagggtcgacg

SEQ ID NO: 31242 - DNA, 333 bp, Homo sapiens
gccagaggagagacagtacttctgtcagtggatacctggagggtcaagctgcgggaaaggagagggactcttacaaggccagtgagctttgaccagatgagcttaccctcaggtatcctgatcacgtggagactggccatatggcttcccagaccaaaataactcacctgtgcctgtgaaaccataccagggccagatgcagctgcactgttgagatttgaagcgtggtgctgttgaattcaagctgctgcatcagtcaggtttctttgccagctttctatccgagcctggggtgaccatatcattcatcttccaaactaggacacgtttaat

SEQ ID NO: 31243 - DNA, 1150 bp, Homo sapiens
cgaaaaacaaacaaacaaacaaaaaaacagttcaaaagacacagaatggactggtggcgatggcccacgcctgtaatcccagcactttgggaagccaaagcggaaggatcgcttgaagtcaggagaacagcctgggcagcatagtgagacctcgtttctacttaaaacaaaaacaaacaaacaaacaaaaaaaaaaaaaaaaaaaaaaaaaggcacggggtgtgttaaaactcggggcattaaggggtggggttattcccttacgtgtgtgtaaccttgtggggaaaattttctctgtgggttccctttccaatttggggttttccaaaggggggtgtgtaccccatgtgggtaacctttttccttctttacacccacttgtgggggggggcctttccccggggtcttccaccaaaaatctttttctctttttaaaacgcaagggtgcgcctaatctgagggtggtctcccacagtgggcccaacatttgtgggcgacaaaaaaatataatggaaagggtgggcagaggcgcgcccaaacggccgtgtggtaatccccaaacaactttgtgggggagaggccccaaagaggggaccgagaactcaacggggggaggctcgagaagttgtggaaaaccagagcgggggcccaaacgggtgttaaaacccccaattcttttacttaaaaaattccccaacacgacatgggtctccaaaaaattttgttctccttcgaccgttaccatcacgtgcggggcggtctcccaaccgggtggagaaaatccggggggaaacccctttgttcacagcccaccttctgtggggggcgcctccaaggaagtgcgtccgcggtttgggtccaaggttcccgcgttaacgttgcccctggttattagagggggggccctttgtaaaaccacacaacataaggggcgcctaacacgcaaaacaatagaaaagcggggcgacgcgaaaaaaggacccacagaggggcgaaggttaagatacacccggtttttggacaaggggcgcaaaagaaggagttaaaacagaagcaaggcggcgcgttacaaacggcgcagggaaaacgacatagggcatcgggagacaacacttcgtgggagaaacgggaccccacagaatactcgcaa

SEQ ID NO: 31244 - DNA, 341 bp, Homo sapiens
cgaaaaacaaacaaacaaacaaaaaaacagttcaaaagacacagaatggactggtggcgatggcccacgcctgtaatcccagcactttgggaagccaaagcggaaggatcgcttgaagtcaggagaacagcctgggcagcatagtgagacctcgtttctacttaaaacaaaaacaaacaaacaaacaaaaaaacaacaggtgtggtgacttagacctgtggtcccagctactcaggaggctgagatgggaggatcacttgggccccagccgttgaggactgcagtgacctatgatcgcaccactgctctccatcctgggtgacagagtgagaccctgtctc

SEQ ID NO: 31245 - DNA, 154 bp, Homo sapiens
ggctatggaaagaatcactggaaaaaaattaggtggactaatttcctgagctcataccaggacagaaagagtttctgttcccacaagacaaggtggaaagacctcctaatacatgggacatcaggtagtatcctcagaagactactgtctgatg

SEQ ID NO: 31246 - DNA, 370 bp, Homo sapiens
ataataataataataataataataataataataaatacatggtgaagactgaggactgtagacactacacgtggaactttgtactcatttgcaaagaccttaggacaaaaaggtctgacttgtgtgtatatactttgccacttagcaaaaaggaatgccagtagggaaaggaaattaaggaacttgaatgaccccagcaactataaaggagtgtgctctggttttgggcacctgtagtcccatctgcttaggaagctgaggcaggaggactgcttgagcccatgagtttgaggctgtcctgcgcaatgatcacacctgtgaatacacactgcactccagcctgagcaacatagcaagacactgtctctta

SEQ ID NO: 31247 - DNA, 546 bp, Homo sapiens
gaaatacaaattgaaatgaatcaccatcaaacaaaaaaaaagggatggcattttgttactcatgaaattggcaaatttttttttaaatgataatatccagtgatggtaaggttgtgggaaaacaagaaatttcataggatactttggtaagttgatatgactttctggagggcaatttgtcagtgcagatgaaaagtcttcccattttaaagatgggaaacttaaggcctaagaatctaagtgacttgcttaaagttacaaagtcatggctgggcgcagtggctcacacctgtaatcccaacactttggggggccgaggagggcagatcatgaggtcaggagttcgagaccatcctggccaacatggtgaaactccgtctctactaaaaatacaaaaattagctgggcatggtggtgtgcgcctgtagtcccaggtactcaggaggctgaggcaggagaattgcttgaacctgggaggcagaggttgcagtgatctgagatcatgccactgcactccagcttggcggcagagtgaaactctgtctc

SEQ ID NO: 31248 - DNA, 432 bp, Homo sapiens
gtatacagtcacatgagggtgttgctaggttctgaaggggggattaaagttggctctcatagtcaaaggattctcataagcaatgccttttcattccctcccagatcatggcagagggaatcagggaagcagtaatggaaccccaattgagtgtcctgattttgtttctagtgaactgggtggaaccctctactcccctagaatactattaataaattttttattctacttgcatttgccttgcaaggagaaaagggaagaaaagaaaggagagaaaggctaaaggaaattcacatgcgattcacaattcttcattcctgccaagaacctgtcactgaagtatgtctggggctgccagggctcacatttactcagcattcatgctctaattatttccacatgtagttcaaggaaaatggttgatcaaaagtt

SEQ ID NO: 31249 - DNA, 948 bp, Homo sapiens
atggagccagaagctgggaccaataggaccgctgttgctgagttcattctactgggcctagtgcaaacagaagagatgcagccagttgtctttgtgctcctcctctttgcctatctggtcacaactgggggcaacctcagcatcctggcagccgtcttggtggagcccaaactccacgcccccatgtacttcttcctggggaacctgtcagtgctggatgtcggatgtatcactgtcactgttcctgcaatgttgggtcgtctcttgtcccacaagtccacaatttcctatgacgcctgcctctcccagctcttcttcttccaccttctggctgggatggactgcttcctgctgaccgccatggcctatgaccgactcctggccatctgccagcccctcacctacagcacccgcatgagtcagacagtccagaggatgttggtggctgcgtccttggcttgtgccttcaccaacgcactgacccacactgtggccatgtccacgctcaacttctgtggccccaatgaggtcaatcacttctactgtgacctcccacagctcttccagctctcctgctccagcacccaactcaatgagctgctgctctttgctgtgggtttcatcatggcaggcacacctttggttctcatcatcactgcctacagccacgtggcagctgcagttctacgaatccgttcagtggagggccgaaagaaggccttctccacgtgtggctcccacctcaccgtggtttgtcttttctttggaagaggtatcttcaactacatgagactgggttcagaggaggcttcagacaaggataaaggggttggagttttcaacactgttatcaaccctatgctgaaccctcttatctacagcctcagaaaccctgatgttcagggtgctctgtggcaaatatttttggggaggagatcactgacctga

SEQ ID NO: 31250 - DNA, 398 bp, Homo sapiens
ttttttcccagaagcccactgcttgctaattgtccttttttgacttcttctatggcattaatgtaaagaaggaagagtttcttcttcacacatgagcaggacttgattcaacttactgtgctgttccatcaaaaagcagaagggaaaacaaaatagaaatgttccaatcatgaggccaagggtcaggtctactttacagtgggctcatggcttttgtggtgaacgcaatgggactgtgttggtgaggttttgcttgcggggtgtggcgctgcgttaagcctgtcatgcacgtgatctcacacgttcctctcaaaggccatgaggtctttggatcttagcactctaaggaaggagaaaagccacatggtccttacggctgcctttgtgccctaccaggg

SEQ ID NO: 31251 - DNA, 159 bp, Homo sapiens
agttattttataaatttgaccataaatttactctaaattgactaagtaattccactcctacacacacactaaaggaaaaatcttcaatgtgtatgtgcaatcgtgtacaaatcaaaatatgtaaaaaaagttcatacagcaaaaaacttgaaaaataaa

SEQ ID NO: 31252 - DNA, 681 bp, Homo sapiens
cagggaaagaccttagctctaagctcacccaccaaaaaaaccatgagataaaagtgcaacacagcccatttcccagtagtctgccttgccctggcagactgctccggactcttctaggaaattcctctgtctcatttgtcctcatctccttcttgctttgctttgctgtggacctctcctccttctccttgacctctctgcctcagtctttgttaatgttgaatcaggatttgagagctggagcccatctttctgcctccatccaaagaggccttttaactcagcctccccttctggaagaagacttggccttttctctgcctgcatgtccctgtgcagaggaaggctgtctctcaagggtaaccccaatctgcctgtgctgctctttcataccctgtctcagtaactatttggccatgtgctccctgggtacacaagttttcagatctactgatagacctgcaggaactctctcatgttagagcaatactggctcaggcaaaacacctggtgggaagttgtatcttgtatagccactgcatattacatagccaggagtaccccttgaggctaattctaccaaccaagggatttgtgctcttcatctgtgggtacttgtccttgtttaggcctcacctccctgctcctgtgtcttaccaataaacttataaagcccaagtg

SEQ ID NO: 31253 - DNA, 671 bp, Homo sapiens
cctgagatagcgccactgcactccagcctgggtgacagagcaagcttctgtctcaataacaaaaaaacaaaaaacaaaaaccaacaagattctgcagttctaaagtattttagataaatatttcagaaagaatctaacaaaacctaggtttcagttctctccagaaatcacaaagattaaaagtaaaataactgttcttattattaggaacattctaaaactggtaaacctagcagtaaaaataaaataccaaaatgtttcccagtaaagtgtccatttaggacacagtgaaggcaaatttggcttaatctcttactactctaagaaatgtattattttatggccagacactgtggctcacacctgtaatctcagcatctggggaggatgaggtgggaggattgctttagtccaggagttcgagaccagcctgggcaacaaagcaaggccctcatctctcttaaaaaaataaataaataaagtaaaaacaaaacaaaaacaaaaacaaaaaatcaggaatgtattattttaatgtaaaaagtaattcactttttattttcagtcactgaagaggcaaggtgttgaactgaacaatggatacagaagaagtacaagggatcagtaaaaaaataatagtaaagaaagcaaccattcattcattcatttagatt

SEQ ID NO: 31254 - DNA, 615 bp, Homo sapiens
cagctttgttttgtcataaactgtattataatttgaatgaggtcactgtttttcttttggatccctaaaaacctggtttaaatttaatttttggttacatttcaaactcatttaaaaaccattcataggagcacaaataacgtggctatataaagaagtacagaaatgacctgataatcaggctcagtgtacacagctgcgagaagagcaagcggtttcagaagcttagagctgtaatggaagtgaaatcagcatggtcaaatgcagttctcattactttggagccttttaaatatttttgttcaatattttcattaatatgctctagatgctatataaatttgattactatatatttgctttggcttctttttattgctattgggttttgttaaaagttaccatcaagctacaggtatcaacaccttccttagtattccatttcatcacttgcttgcattttttctgacttgtttctgggaaagtcatttcgtcttagcttgcggttatttaattattttgtgtgtgagacttaggaggttggcatagaacttggttggctagctttagttatgtaactaaaccatgcctcattaaggctctgttaaaaaaaaa

SEQ ID NO: 31255 - DNA, 407 bp, Homo sapiens
  misc_feature (370)..(370): n is a, c, g, or t
cctggctctagagcccacactcctgactgctgtactctgctcctctcaataacagctgacagttcatggttacttggcaagggttttcacgtcacaacggatttaattgccacagcattgctaggtggtgggttccctagtttcctgaattttcagaaacgggatgttttgtttgtttgtattttgagacagagtctcgctctgtcacccaggctggagagcagtggtgcgatctcggctcactgcaacctctgcctcccaggagaatcacttgaaccagggaggcagagtttgcagtgaatggagattgcgccgctgcactccagcctgggcgacagagtgagactgcatcacaagaaaaaaaattttncaagggatggttcacgagacacattttggggccgaag

SEQ ID NO: 31256 - DNA, 618 bp, Homo sapiens
ggtaacatggccgctgtctcgtgagtcccgctagtgccgggcgggagttgttaagcggccagggtcaggtgtgctggagcggggtccgggcccgggttccagggcgaggcggcggagcgtggcaggcaagcctagagcggcgtggtccatgcgccggcgccgggggcagagcggagccgcagactcccctggccccggcgcggccccggcagccgcgggctaaggagtcgcgaggttcccccagctgccaccatgaaccccgagaaggatttcgcgccgctcacgcctaacatcgtgcgcgccctcaatgacaagctgtaccctggcattctcacagagctggctgcccacccagtggggggctatagcctcagagaccactcatcctctggaatcaacctctttctaataccctcttggaaaaagagcttgcccctcctccagcacactagagctctggccttgtgtgtatatgtatacatacgtgaacacatgcctgtgtgtgtgtgtgtgtgtgtgtacttgtatgcacgtaggcaccagcacaaagatctgaatgatgcaccccacccccaccccaataaagaaataacagaaaaccctcaaaaacaaaccggc

SEQ ID NO: 31257 - DNA, 599 bp, Homo sapiens
ttctctgccctccagatgttccggcacacggacagcctctttcccatcctactgcagacgttatcggatgaatcggatgaggtgatcctgaaggacctggaggtgctggcagaaatcgcttcctcccccgcaggccagacggatgacccaggccccctcgatggccctgacctccaggccagccactcagagctccaggtgcccacccctggcagagccggcctactgaacacctctggtaccaaaggcttagaatgttctccttcaactcccaccatgaattcttacttttataagttcatgatcaaccttctcaagagattcagcagcgaacggaagctcctggaggtcagaggccctttcatcatcaggtcagccttggcggcgcgctttctcctcttcctcccacggccccggcttttcactttcacgccattcaagtgtcaaagcagccaccttctctttcccttctctctcctccttttcctgacctttggatctgtaagaaatgaagaaggttgccccttcatactggttgctgatgcttctgacatgaaacagacaggtcagtgttgatgtttttccgcaaaaaaaaaaaa

SEQ ID NO: 31258 - DNA, 440 bp, Homo sapiens
agggtctgcagtggcctggtgtcacctctgcagaagcagctgttctgtggcccaatggtgatcctgaaggacctggaggtgctggcagaaatcgcttcctcccccgcaggccagacggatgacccaggccccctcgatggccctgacctccaggccagccactcagagctccaggtgcccacccctggcagagccggcctactgaacacctctggtaccaaaggcttagaatgttctccttcaactcccaccatgaattcttacttttataagttcatgatcaaccttctcaagagattcagcagcgaacggaagctcctggaggtcagaggccctttcatcatcagaaatgaagaaggttgccccttcatactggttgctgatgcttctgacatgaaacagacaggtcagtgttgatgtttttccgcaaaaaaaaaaaa

SEQ ID NO: 31259 - DNA, 3102 bp, Homo sapiens
ggtaacatggccgctgtctcgtgagtcccgctagtgccgggcgggagttgttaagcggccagggtcaggtgtgctggagcggggtccgggcccgggttccagggcgaggcggcggagcgtggcaggcaagcctagagcggcgtggtccatgcgccggcgccgggggcagagcggagccgcagactcccctggccccggcgcggccccggcagccgcgggctaaggagtcgcgaggttcccccagctgccaccatgaaccccgagaaggatttcgcgccgctcacgcctaacatcgtgcgcgccctcaatgacaagctgtacgaaaagcggaaggtggcagcgctggagatcgagaagctggtccgggagttcgtggcccagaacaataccgtgcaaatcaagcatgtgatccagaccctgtcccaggagtttgccctgtctcagcacccccacagccggaaagggggcctcatcggcctggccgcctgctccatcgcactgggcaaggactcagggctctacctgaaggagctgatcgagccagtgctgacctgcttcaatgatgcagacagcaggctgcgctactatgcctgcgaggccctctacaacatcgtcaaggtggcccggggcgctgtgctgccccacttcaacgtgctctttgacgggctgagcaagctggcagccgacccagaccccaatgtgaaaagcggatctgagctcctagaccgccttttaaaggacattgtgactgagagcaacaagtttgacctggtgagcttcatccccttgttgcgagagaggatttactccaacaaccagtatgcccggcagttcatcatctcctggatcctggttctggagtcggtgccagacattaacctgctggattacctgccggagatcctggatggactcttccagatcctgggtgacaatggcaaagagattcgcaaaatgtgtgaggttgttcttggagaattcttaaaagaaattaagaagaacccctccagtgtgaagtttgctgagatggccaacatcctggtgatccactgccagacaacagatgacctcatccagctgacagccatgtgctggatgcgggagttcatccagctggcgggccgcgtcatgctgccttactcctccgggatcctgactgctgtcttgccctgcttggcctacgatgaccgcaagaaaagcatcaaagaagtggccaacgtgtgcaaccagagcctgatgaagctggtcacccccgaggacgacgagctggatgagctgagacctgggcagaggcaggcagagcccacccctgacgatgccctgccaaagcaggagggcacagccagtggaggtccagatggttcctgtgactccagcttcagtagcggcatcagtgtcttcactgcagccagcactgaaagagccccagtgacccttcacctcgacgggatcgtgcaggtcctaaactgccacctcagtgacacggccattgggatgatgaccaggattgcagttctcaagtggctctaccacctctacatcaaaactcctcggaagatgttccggcacacggacagcctctttcccatcctactgcagacgttatcggatgaatcggatgaggtgatcctgaaggacctggaggtgctggcagaaatcgcttcctcccccgcaggccagacggatgacccaggccccctcgatggccctgacctccaggccagccactcagagctccaggtgcccacccctggcagagccggcctactgaacacctctggtaccaaaggcttagaatgttctccttcaactcccaccatgaattcttacttttataagttcatgatcaaccttctcaagagattcagcagcgaacggaagctcctggaggtcagaggccctttcatcatcaggcagctgtgcctcctgctgaatgcggagaacatcttccactcaatggcagacatcctgctgcgggaggaggacctcaagttcgcctcgaccatggtccacgccctcaacaccatcctgctgacctccacagagctcttccagctaaggaaccagctgaaggacctgaagaccctggagagccagaacctgttctgctgcctgtaccgctcctggtgccacaacccagtcaccacggtgtccctctgcttcctcacccagaactaccggcacgcctatgacctcatccagaagtttggggacctggaggtcaccgtggacttcctcgcagaggtggacaagctggtgcagctgattgagtgccccatcttcacatatctgcgcctgcagctgctggacgtgaagaacaacccctacctgatcaaggccctctacggcctgctcatgctcctgccgcagagcagcgccttccagctgctctcgcaccggctccagtgcgtgcccaaccctgagctgctgcagaccgaagacagtctaaaggcagcccccaagtcccagaaagctgactcccctagcatcgactacgcagagctgctgcagcactttgagaaggtccagaacaagcacctggaagtgcggcaccagcggagcgggcgtggggaccacctggaccggagggttgtcctctgacaggcctggcacggaggagggcccaccgagtggtcccatgaaacactaagggtcgtcacgccctcccgaggagctcaaggacctgcctgtcaggaccagggctgggcctgccaacccagggcagtgttggggccggaggctgctgtgtctgcccaagctcctctcagagtccagtccccaggcctccagcgctgtcagctgcaccctggcattctcacagagctggctgcccacccagtggggggctatagcctcagagaccactcatcctctggaatcaacctctttctaataccctcttggaaaaagagcttgcccctcctccagcacactagagctctggccttgtgtgtatatgtatacatacgtgaacacatgcctgtgtgtgtgtgtgtgtgtgtgtacttgtatgcacgtaggcaccagcacaaagatctgaatgatgcaccccacccccaccccaataaagaaataacagaaaaccctcaaaaacaaaccggc

SEQ ID NO: 31260 - DNA, 2951 bp, Homo sapiens
ggtaacatggccgctgtctcgtgagtcccgctagtgccgggcgggagttgttaagcggccagggtcaggtgtgctggagcggggtccgggcccgggttccagggcgaggcggcggagcgtggcaggcaagcctagagcggcgtggtccatgcgccggcgccgggggcagagcggagccgcagactcccctggccccggcgcggccccggcagccgcgggctaaggagtcgcgaggttcccccagctgccaccatgaaccccgagaaggatttcgcgccgctcacgcctaacatcgtgcgcgccctcaatgacaagctgtacgaaaagcggaaggtggcagcgctggagatcgagaagactcagggctctacctgaaggagctgatcgagccagtgctgacctgcttcaatgatgcagacagcaggctgcgctactatgcctgcgaggccctctacaacatcgtcaaggtggcccggggcgctgtgctgccccacttcaacgtgctctttgacgggctgagcaagctggcagccgacccagaccccaatgtgaaaagcggatctgagctcctagaccgccttttaaaggacattgtgactgagagcaacaagtttgacctggtgagcttcatccccttgttgcgagagaggatttactccaacaaccagtatgcccggcagttcatcatctcctggatcctggttctggagtcggtgccagacattaacctgctggattacctgccggagatcctggatggactcttccagatcctgggtgacaatggcaaagagattcgcaaaatgtgtgaggttgttcttggagaattcttaaaagaaattaagaagaacccctccagtgtgaagtttgctgagatggccaacatcctggtgatccactgccagacaacagatgacctcatccagctgacagccatgtgctggatgcgggagttcatccagctggcgggccgcgtcatgctgccttactcctccgggatcctgactgctgtcttgccctgcttggcctacgatgaccgcaagaaaagcatcaaagaagtggccaacgtgtgcaaccagagcctgatgaagctggtcacccccgaggacgacgagctggatgagctgagacctgggcagaggcaggcagagcccacccctgacgatgccctgccaaagcaggagggcacagccagtggaggtccagatggttcctgtgactccagcttcagtagcggcatcagtgtcttcactgcagccagcactgaaagagccccagtgacccttcacctcgacgggatcgtgcaggtcctaaactgccacctcagtgacacggccattgggatgatgaccaggattgcagttctcaagtggctctaccacctctacatcaaaactcctcggaagatgttccggcacacggacagcctctttcccatcctactgcagacgttatcggatgaatcggatgaggtgatcctgaaggacctggaggtgctggcagaaatcgcttcctcccccgcaggccagacggatgacccaggccccctcgatggccctgacctccaggccagccactcagagctccaggtgcccacccctggcagagccggcctactgaacacctctggtaccaaaggcttagaatgttctccttcaactcccaccatgaattcttacttttataagttcatgatcaaccttctcaagagattcagcagcgaacggaagctcctggaggtcagaggccctttcatcatcaggcagctgtgcctcctgctgaatgcggagaacatcttccactcaatggcagacatcctgctgcgggaggaggacctcaagttcgcctcgaccatggtccacgccctcaacaccatcctgctgacctccacagagctcttccagctaaggaaccagctgaaggacctgaagaccctggagagccagaacctgttctgctgcctgtaccgctcctggtgccacaacccagtcaccacggtgtccctctgcttcctcacccagaactaccggcacgcctatgacctcatccagaagtttggggacctggaggtcaccgtggacttcctcgcagaggtggacaagctggtgcagctgattgagtgccccatcttcacatatctgcgcctgcagctgctggacgtgaagaacaacccctacctgatcaaggccctctacggcctgctcatgctcctgccgcagagcagcgccttccagctgctctcgcaccggctccagtgcgtgcccaaccctgagctgctgcagaccgaagacagtctaaaggcagcccccaagtcccagaaagctgactcccctagcatcgactacgcagagctgctgcagcactttgagaaggtccagaacaagcacctggaagtgcggcaccagcggagcgggcgtggggaccacctggaccggagggttgtcctctgacaggcctggcacggaggagggcccaccgagtggtcccatgaaacactaagggtcgtcacgccctcccgaggagctcaaggacctgcctgtcaggaccagggctgggcctgccaacccagggcagtgttggggccggaggctgctgtgtctgcccaagctcctctcagagtccagtccccaggcctccagcgctgtcagctgcaccctggcattctcacagagctggctgcccacccagtggggggctatagcctcagagaccactcatcctctggaatcaacctctttctaataccctcttggaaaaagagcttgcccctcctccagcacactagagctctggccttgtgtgtatatgtatacatacgtgaacacatgcctgtgtgtgtgtgtgtgtgtgtgtacttgtatgcacgtaggcaccagcacaaagatctgaatgatgcaccccacccccaccccaataaagaaataacagaaaaccctcaaaaacaaaccggc

SEQ ID NO: 31261 - DNA, 2176 bp, Homo sapiens
gctcggtacccctcgataagggccaaaaatgtgtgaggttgttcttggagaattcttaaaagaaattaagaagaacccctccagtgtgaagtttgctgagatggccaacatcctggtgatccactgccagacaacagatgacctcatccagctgacagccatgtgctggatgcgggagttcatccagctggcgggccgcgtcatgctgccttactcctccgggatcctgactgctgtcttgccctgcttggcctacgatgaccgcaagaaaagcatcaaagaagtggccaacgtgtgcaaccagagcctgatgaagctggtcacccccgaggacgacgagctggatgagctgagacctgggcagaggcaggcagagcccacccctgacgatgccctgccaaagcaggagggcacagccagtggaggtccagatggttcctgtgactccagcttcagtagcggcatcagtgtcttcactgcagccagcactgaaagagccccagtgacccttcacctcgacgggatcgtgcaggtcctaaactgccacctcagtgacacggccattgggatgatgaccaggattgcagttctcaagtggctctaccacctctacatcaaaactcctcggaagatgttccggcacacggacagcctctttcccatcctactgcagacgttatcggatgaatcggatgaggtgatcctgaaggacctggaggtgctggcagaaatcgcttcctcccccgcaggccagacggatgacccaggccccctcgatggccctgacctccaggccagccactcagagctccaggtgcccacccctggcagagccggcctactgaacacctctggtaccaaaggcttagaatgttctccttcaactcccaccatgaattcttacttttataagttcatgatcaaccttctcaagagattcagcagcgaacggaagctcctggaggtcagaggccctttcatcatcaggcagctgtgcctcctgctgaatgcggagaacatcttccactcaatggcagacatcctgctgcgggaggaggacctcaagttcgcctcgaccatggtccacgccctcaacaccatcctgctgacctccacagagctcttccagctaaggaaccagctgaaggacctgaagaccctggagagccagaacctgttctgctgcctgtaccgctcctggtgccacaacccagtcaccacggtgtccctctgcttcctcacccagaactaccggcacgcctatgacctcatccagaagtttggggacctggaggtcaccgtggacttcctcgcagaggtggacaagctggtgcagctgattgagtgccccatcttcacatatctgcgcctgcagctgctggacgtgaagaacaacccctacctgatcaaggccctctacggcctgctcatgctcctgccgcagagcagcgccttccagctgctctcgcaccggctccagtgcgtgcccaaccctgagctgctgcagaccgaagacagtctaaaggcagcccccaagtcccagaaagctgactcccctagcatcgactacgcagagctgctgcagcactttgagaaggtccagaacaagcacctggaagtgcggcaccagcggagcgggcgtggggaccacctggaccggagggttgtcctctgacaggcctggcacggaggagggcccaccgagtggtcccatgaaacactaagggtcgtcacgccctcccgaggagctcaaggacctgcctgtcaggaccagggctgggcctgccaacccagggcagtgttggggccggaggctgctgtgtctgcccaagctcctctcagagtccagtccccaggcctccagcgctgtcagctgcaccctggcattctcacagagctggctgcccacccagtggggggctatagcctcagagaccactcatcctctggaatcaacctctttctaataccctcttggaaaaagagcttgcccctcctccagcacactagagctctggccttgtgtgtatatgtatacatacgtgaacacatgcctgtgtgtgtgtgtgtgtgtgtgtacttgtatgcacgtaggcaccagcacaaagatctgaatgatgcaccccacccccaccccaataaagaaataacagaaaaccctcaaaaacaaaccggc

SEQ ID NO: 31262 - DNA, 1155 bp, Homo sapiens
gcgaattcactagtgattagagactgcgagaaggaggacctcaagttcgcctcgaccatggtccacgccctcaacaccatcctgctgacctccacagagctcttccagctaaggaaccagctgaaggacctgaagaccctggagagccagaacctgttctgctgcctgtaccgctcctggtgccacaacccagtcaccacggtgtccctctgcttcctcacccagaactaccggcacgcctatgacctcatccagaagtttggggacctggaggtcaccgtggacttcctcgcagaggtggacaagctggtgcagctgattgagtgccccatcttcacatatctgcgcctgcagctgctggacgtgaagaacaacccctacctgatcaaggccctctacggcctgctcatgctcctgccgcagagcagcgccttccagctgctctcgcaccggctccagtgcgtgcccaaccctgagctgctgcagaccgaagacagtctaaaggcagcccccaagtcccagaaagctgactcccctagcatcgactacgcagagctgctgcagcactttgagaaggtccagaacaagcacctggaagtgcggcaccagcggagcgggcgtggggaccacctggaccggagggttgtcctctgacaggcctggcacggaggagggcccaccgagtggtcccatgaaacactaagggtcgtcacgccctcccgaggagctcaaggacctgcctgtcaggaccagggctgggcctgccaacccagggcagtgttggggccggaggctgctgtgtctgcccaagctcctctcagagtccagtccccaggcctccagcgctgtcagctgcaccctggcattctcacagagctggctgcccacccagtggggggctatagcctcagagaccactcatcctctggaatcaacctctttctaataccctcttggaaaaagagcttgcccctcctccagcacactagagctctggccttgtgtgtatatgtatacatacgtgaacacatgcctgtgtgtgtgtgtgtgtgtgtgtacttgtatgcacgtaggcaccagcacaaagatctgaatgatgcaccccacccccaccccaataaagaaataacagaaaaccctcaaaaacaaaccggc

SEQ ID NO: 31263 - DNA, 2334 bp, Homo sapiens
cctctagaatggccccgcccagctgcttttgatctttgttgaactaaagtcagctgagccccgctagggagccaggagcgccaggcccagaaaagcagcagccgcagccgtagacatgtccaagatgttttctggtggtgcatcttcagcagggaggcgggaagggaacaggtgtgggcaggcagagctgagcaggggtgcaggaggccgcctccgggccccagatggcatctcaactgtgggaagagtccccctgccccggtcctgcccagcaggctggtgggccacctgaagcaactgtcaggctctggccgttgactcttcctgctggactgaactcatggccaagaattcgttttgggggagctccattttgtctcccccaaaatggcctcctttatttccaccctcaagctgctgggccccggctggcctcacgttggaggggcagaactgtagccacagtggcacctgccagatacctaagctggggctggataccaggtgaagctcttacacatcgtgtcaaggcatcttggcagccaccccagggccgctccttaggtagccctcgctttgcagatgaggaaacagtcacatgctcaagtcacaccgctaggaagcggtggagttatggttgggtccaggtctgtctagatcctgtgctctgccagtgcctgcaccccccttcccggccccgccgattggcatcttttcataaacttgaagggccccaagactctctgcttagctgagcagcccacagtcttcctgagaccccttcccaggtccaccaggcctcagggcctggaaacagatacttcctagcccacatggatctgctcctccaaaccagtgaggccaaagggagggagcagaacatttcatgagacactgctggagggtgagtaggaacaggacaggagcccaaggggatctcatcgccaggggcaagctaagcactgggcttgacagggacagcaaggctaccgcattgcaccattatagggagcatcatgcacactagctgtgcagtgcacaacctgtgttgctgtacagagcaactggagagggtggcagcaacaggaatgtaggagctgtaggcatgtccagtggtgagaccggcattcctcctcccagggacagtgagtgactgcaggccttggggccccaacactcaaaaacaaatgtcctgccaagtggagggcccggcagaggctcttcagcaattcccattttccccagtcctagccctgcctctcagagaaagggccaagctgccacctcccccttctccccagaccctgttccaggccccagctggcttcctggctggctgctagccctggctttcaccccaaagggagccactcgtaaacaggaaatgcttcccaatgcgatgcctgctctgggcgccatcgccagcccacaggccgagggcaatagccaagcagcagtgttagctgttcccaccaactgcggaagagggggatgctcaggggcttcccagctctggggcccgccatgacggaagagttgccaggcctgagacagacgcccacaggccgagcccaccagcctgtggctctgctctgaccccactgccctccagcagtaacccccctgtgagctgatccctgacactgagcatttctgctccctcttcccagagacagtctaaaggcagcccccaagtcccagaaagctgactcccctagcatcgactacgcagagctgctgcagcactttgagaaggtccagaacaagcacctggaagtgcggcaccagcggagcgggcgtggggaccacctggaccggagggttgtcctctgacaggcctggcacggaggagggcccaccgagtggtcccatgaaacactaagggtcgtcacgccctcccgaggagctcaaggacctgcctgtcaggaccagggctgggcctgccaacccagggcagtgttggggccggaggctgctgtgtctgcccaagctcctctcagagtccagtccccaggcctccagcgctgtcagctgcaccctggcattctcacagagctggctgcccacccagtggggggctatagcctcagagaccactcatcctctggaatcaacctctttctaataccctcttggaaaaagagcttgcccctcctccagcacactagagctctggccttgtgtgtatatgtatacatacgtgaacacatgcctgtgtgtgtgtgtgtgtgtgtgtacttgtatgcacgtaggcaccagcacaaagatctgaatgatgcaccccacccccaccccaataaagaaataacagaaaaccctcaaaaacaaaccggc

SEQ ID NO: 31264 - DNA, 1961 bp, Homo sapiens
attaggctagtacgagccctgtgtttatcggcaccgaggagctgctgggccccggctggcctcacgttggaggggcagaactgtagccacagtggcacctgccagatacctaagctggggctggataccaggtgaagctcttacacatcgtgtcaaggcatcttggcagccaccccagggccgctccttaggtagccctcgctttgcagatgaggaaacagtcacatgctcaagtcacaccgctaggaagcggtggagttatggttgggtccaggtctgtctagatcctgtgctctgccagtgcctgcaccccccttcccggccccgccgattggcatcttttcataaacttgaagggccccaagactctctgcttagctgagcagcccacagtcttcctgagaccccttcccaggtccaccaggcctcagggcctggaaacagatacttcctagcccacatggatctgctcctccaaaccagtgaggccaaagggagggagcagaacatttcatgagacactgctggagggtgagtaggaacaggacaggagcccaaggggatctcatcgccaggggcaagctaagcactgggcttgacagggacagcaaggctaccgcattgcaccattatagggagcatcatgcacactagctgtgcagtgcacaacctgtgttgctgtacagagcaactggagagggtggcagcaacaggaatgtaggagctgtaggcatgtccagtggtgagaccggcattcctcctcccagggacagtgagtgactgcaggccttggggccccaacactcaaaaacaaatgtcctgccaagtggagggcccggcagaggctcttcagcaattcccattttccccagtcctagccctgcctctcagagaaagggccaagctgccacctcccccttctccccagaccctgttccaggccccagctggcttcctggctggctgctagccctggctttcaccccaaagggagccactcgtaaacaggaaatgcttcccaatgcgatgcctgctctgggcgccatcgccagcccacaggccgagggcaatagccaagcagcagtgttagctgttcccaccaactgcggaagagggggatgctcaggggcttcccagctctggggcccgccatgacggaagagttgccaggcctgagacagacgcccacaggccgagcccaccagcctgtggctctgctctgaccccactgccctccagcagtaacccccctgtgagctgatccctgacactgagcatttctgctccctcttcccagagacagtctaaaggcagcccccaagtcccagaaagctgactcccctagcatcgactacgcagagctgctgcagcactttgagaaggtccagaacaagcacctggaagtgcggcaccagcggagcgggcgtggggaccacctggaccggagggttgtcctctgacaggcctggcacggaggagggcccaccgagtggtcccatgaaacactaagggtcgtcacgccctcccgaggagctcaaggacctgcctgtcaggaccagggctgggcctgccaacccagggcagtgttggggccggaggctgctgtgtctgcccaagctcctctcagagtccagtccccaggcctccagcgctgtcagctgcaccctggcattctcacagagctggctgcccacccagtggggggctatagcctcagagaccactcatcctctggaatcaacctctttctaataccctcttggaaaaagagcttgcccctcctccagcacactagagctctggccttgtgtgtatatgtatacatacgtgaacacatgcctgtgtgtgtgtgtgtgtgtgtgtacttgtatgcacgtaggcaccagcacaaagatctgaatgatgcaccccacccccaccccaataaagaaataacagaaaaccctcaaaaacaaaccggc

SEQ ID NO: 31265 - DNA, 2957 bp, Homo sapiens
ggtaacatggccgctgtctcgtgagtcccgctagtgccgggcgggagttgttaagcggccagggtcaggtgtgctggagcggggtccgggcccgggttccagggcgaggcggcggagcgtggcaggcaagcctagagcggcgtggtccatgcgccggcgccgggggcagagcggagccgcagactcccctggccccggcgcggccccggcagccgcgggctaaggagtcgcgaggttcccccagctgccaccatgaaccccgagaaggatttcgcgccgctcacgcctaacatcgtgcgcgccctcaatgacaagctgtacgaaaagcggaaggtggcagcgctggagatcgagaagctggtccgggagttcgtggcccagaacaataccgtgcaaatcaagcatgtgatccagaccctgtcccaggagtttgccctgtctcagcacccccacagccggaaagggggcctcatcggcctggccgcctgctccatcgcactgggcaaggactcagggctctacctgaaggagctgatcgagccagtgctgacctgcttcaatgatgcagacagcaggctgcgctactatgcctgcgaggccctctacaacatcgtcaaggtggcccggggcgctgtgctgccccacttcaacgtgctctttgacgggctgagcaagctggcagccgacccagaccccaatgtgaaaagcggatctgagctcctagaccgccttttaaaggacattgtgactgagagcaacaagtttgacctggtgagcttcatccccttgttgcgagagaggatttactccaacaaccagtatgcccggcagttcatcatctcctggatcctggttctggagtcggtgccagacattaacctgctggattacctgccggagatcctggatggactcttccagatcctgggtgacaatggcaaagagattcgcaaaatgtgtgaggttgttcttggagaattcttaaaagaaattaagaagaacccctccagtgtgaagtttgctgagatggccaacatcctggtgatccactgccagacaacagatgacctcatccagctgacagccatgtgctggatgcgggagttcatccagctggcgggccgcgtcatgctgccttactcctccgggatcctgactgctgtcttgccctgcttggcctacgatgaccgcaagaaaagcatcaaagaagtggccaacgtgtgcaaccagagcctgatgaagctggtcacccccgaggacgacgagctggatgagctgagacctgggcagaggcaggcagagcccacccctgacgatgccctgccaaagcaggagggcacagccagtggaggtccagatggttcctgtgactccagcttcagtagcggcatcagtgtcttcactgcagccagcactgaaagagccccagtgacccttcacctcgacgggatcgtgcaggtcctaaactgccacctcagtgacacggccattgggatgatgaccaggattgcagttctcaagtggctctaccacctctacatcaaaactcctcggaagatgttccggcacacggacagcctctttcccatcctactgcagacgttatcggatgaatcggatgaggtgatcctgaaggacctggaggtgctggcagaaatcgcttcctcccccgcaggccagacggatgacccaggccccctcgatggccctgacctccaggccagccactcagagctccaggtgcccacccctggcagagccggcctactgaacacctctggtaccaaaggcttagaatgttctccttcaactcccaccatgaattcttacttttataagttcatgatcaaccttctcaagagattcagcagcgaacggaagctcctggaggtcagaggccctttcatcatcaggcagctgtgcctcctgctgaatgcggagaacatcttccactcaatggcagacatcctgctgcgggaggaggacctcaagttcgcctcgaccatggtccacgccctcaacaccatcctgctgacctccacagagctcttccagctaaggaaccagctgaaggacctgaagaccctggagagccagaacctgttctgctgcctgtaccgctcctggtgccacaacccagtcaccacggtgtccctctgcttcctcacccagaactaccggcacgcctatgacctcatccagaagtttggggacctggaggtcaccgtggacttcctcgcagaggtggacaagctggtgcagctgattgagtgccccatcttcacatatctgcgcctgcagctgctggacgtgaagaacaacccctacctgatcaaggccctctacggcctgctcatgctcctgccgcagagcagcgccttccagctgctctcgcaccggctccagtgcgtgcccaaccctgagctgctgcagaccgaagacagtctaaaggcagcccccaagtcccagaaagctgactcccctagcatcgactacgcagagctgctgcagcactttgagaaggtccagaacaagcacctggaagtgcggcaccagcggagcgggcgtggggaccacctggaccggagggttgtcctctgacaggcctggcacggaggagggcccaccgagtggtcccatgaaacactaagggtcgtcacgccctcccgaggagctcaaggacctgcctgtcaggaccagggctgggcctgccaacccagggcagtgttggggccggaggctgctgtgtctgcccaagctcctctcagagtccagtccccaggcctccagcgctgtcagctgcaccctggcattctcacagagctggctgcccacccagtggggggctatagcctcagagaccactcatcctctggaatcaacctctttctaataccctcttggaaaaagagcttgccccgtgtcccacctctcgggatcctctagaacaccacacc

SEQ ID NO: 31266 - DNA, 2968 bp, Homo sapiens
ggtaacatggccgctgtctcgtgagtcccgctagtgccgggcgggagttgttaagcggccagggtcaggtgtgctggagcggggtccgggcccgggttccagggcgaggcggcggagcgtggcaggcaagcctagagcggcgtggtccatgcgccggcgccgggggcagagcggagccgcagactcccctggccccggcgcggccccggcagccgcgggctaaggagtcgcgaggttcccccagctgccaccatgaaccccgagaaggatttcgcgccgctcacgcctaacatcgtgcgcgccctcaatgacaagctgtacgaaaagcggaaggtggcagcgctggagatcgagaagctggtccgggagttcgtggcccagaacaataccgtgcaaatcaagcatgtgatccagaccctgtcccaggagtttgccctgtctcagcacccccacagccggaaagggggcctcatcggcctggccgcctgctccatcgcactgggcaaggactcagggctctacctgaaggagctgatcgagccagtgctgacctgcttcaatgatgcagacagcaggctgcgctactatgcctgcgaggccctctacaacatcgtcaaggtggcccggggcgctgtgctgccccacttcaacgtgctctttgacgggctgagcaagctggcagccgacccagaccccaatgtgaaaagcggatctgagctcctagaccgccttttaaaggacattgtgactgagagcaacaagtttgacctggtgagcttcatccccttgttgcgagagaggatttactccaacaaccagtatgcccggcagttcatcatctcctggatcctggttctggagtcggtgccagacattaacctgctggattacctgccggagatcctggatggactcttccagatcctgggtgacaatggcaaagagattcgcaaaatgtgtgaggttgttcttggagaattcttaaaagaaattaagaagaacccctccagtgtgaagtttgctgagatggccaacatcctggtgatccactgccagacaacagatgacctcatccagctgacagccatgtgctggatgcgggagttcatccagctggcgggccgcgtcatgctgccttactcctccgggatcctgactgctgtcttgccctgcttggcctacgatgaccgcaagaaaagcatcaaagaagtggccaacgtgtgcaaccagagcctgatgaagctggtcacccccgaggacgacgagctggatgagctgagacctgggcagaggcaggcagagcccacccctgacgatgccctgccaaagcaggagggcacagccagtggaggtccagatggttcctgtgactccagcttcagtagcggcatcagtgtcttcactgcagccagcactgaaagagccccagtgacccttcacctcgacgggatcgtgcaggtcctaaactgccacctcagtgacacggccattgggatgatgaccaggattgcagttctcaagtggctctaccacctctacatcaaaactcctcggaagatgttccggcacacggacagcctctttcccatcctactgcagacgttatcggatgaatcggatgaggtgatcctgaaggacctggaggtgctggcagaaatcgcttcctcccccgcaggccagacggatgacccaggccccctcgatggccctgacctccaggccagccactcagagctccaggtgcccacccctggcagagccggcctactgaacacctctggtaccaaaggcttagaatgttctccttcaactcccaccatgaattcttacttttataagttcatgatcaaccttctcaagagattcagcagcgaacggaagctcctggaggtcagaggccctttcatcatcaggcagctgtgcctcctgctgaatgcggagaacatcttccactcaatggcagacatcctgctgcgggaggaggacctcaagttcgcctcgaccatggtccacgccctcaacaccatcctgctgacctccacagagctcttccagctaaggaaccagctgaaggacctgaagaccctggagagccagaacctgttctgctgcctgtaccgctcctggtgccacaacccagtcaccacggtgtccctctgcttcctcacccagaactaccggcacgcctatgacctcatccagaagtttggggacctggaggtcaccgtggacttcctcgcagaggtggacaagctggtgcagctgattgagtgccccatcttcacatatctgcgcctgcagctgctggacgtgaagaacaacccctacctgatcaaggccctctacggcctgctcatgctcctgccgcagagcagcgccttccagctgctctcgcaccggctccagtgcgtgcccaaccctgagctgctgcagaccgaagacagtctaaaggcagcccccaagtcccagaaagctgactcccctagcatcgactacgcagagctgctgcagcactttgagaaggtccagaacaagcacctggaagtgcggcaccagcggagcgggcgtggggaccacctggaccggagggttgtcctctgacaggcctggcacggaggagggcccaccgagtggtcccatgaaacactaagggtcgtcacgccctcccgaggagctcaaggacctgcctgtcaggaccagggctgggcctgccaacccagggcagtgttggggccggaggctgctgtgtctgcccaagctcctctcagagtccagtccccaggcctccagcgctgtcagctgcaccctggcattctcacagagctggctgcccacccagtggggggctatagcctcagagaccactcatcctctggaatcaacctctttctaataccctcttggaaaaagagcttgcccccccggaccattcagcgcctccgggccattcaactaaccggggccgaga

SEQ ID NO: 31267 - DNA, 2779 bp, Homo sapiens
ggtaacatggccgctgtctcgtgagtcccgctagtgccgggcgggagttgttaagcggccagggtcaggtgtgctggagcggggtccgggcccgggttccagggcgaggcggcggagcgtggcaggcaagcctagagcggcgtggtccatgcgccggcgccgggggcagagcggagccgcagactcccctggccccggcgcggccccggcagccgcgggctaaggagtcgcgaggttcccccagctgccaccatgaaccccgagaaggatttcgcgccgctcacgcctaacatcgtgcgcgccctcaatgacaagctgtacgaaaagcggaaggtggcagcgctggagatcgagaagctggtccgggagttcgtggcccagaacaataccgtgcaaatcaagcatgtgatccagaccctgtcccaggagtttgccctgtctcagcacccccacagccggaaagggggcctcatcggcctggccgcctgctccatcgcactgggcaaggactcagggctctacctgaaggagctgatcgagccagtgctgacctgcttcaatgatgcagacagcaggctgcgctactatgcctgcgaggccctctacaacatcgtcaaggtggcccggggcgctgtgctgccccacttcaacgtgctctttgacgggctgagcaagctggcagccgacccagaccccaatgtgaaaagcggatctgagctcctagaccgccttttaaaggacattgtgactgagagcaacaagtttgacctggtgagcttcatccccttgttgcgagagaggatttactccaacaaccagtatgcccggcagttcatcatctcctggatcctggttctggagtcggtgccagacattaacctgctggattacctgccggagatcctggatggactcttccagatcctgggtgacaatggcaaagagattcgcaaaatgtgtgaggttgttcttggagaattcttaaaagaaattaagaagaacccctccagtgtgaagtttgctgagatggccaacatcctggtgatccactgccagacaacagatgacctcatccagctgacagccatgtgctggatgcgggagttcatccagctggcgggccgcgtcatgctgccttactcctccgggatcctgactgctgtcttgccctgcttggcctacgatgaccgcaagaaaagcatcaaagaagtggccaacgtgtgcaaccagagcctgatgaagctggtcacccccgaggacgacgagctggatgagctgagacctgggcagaggcaggcagagcccacccctgacgatgccctgccaaagcaggagggcacagccagtggaggtccagatggttcctgtgactccagcttcagtagcggcatcagtgtcttcactgcagccagcactgaaagagccccagtgacccttcacctcgacgggatcgtgcaggtcctaaactgccacctcagtgacacggccattgggatgatgaccaggattgcagttctcaagtggctctaccacctctacatcaaaactcctcggaagatgttccggcacacggacagcctctttcccatcctactgcagacgttatcggatgaatcggatgaggtgatcctgaaggacctggaggtgctggcagaaatcgcttcctcccccgcaggccagacggatgacccaggccccctcgatggccctgacctccaggccagccactcagagctccaggtgcccacccctggcagagccggcctactgaacacctctggtaccaaaggcttagaatgttctccttcaactcccaccatgaattcttacttttataagttcatgatcaaccttctcaagagattcagcagcgaacggaagctcctggaggtcagaggccctttcatcatcaggcagctgtgcctcctgctgaatgcggagaacatcttccactcaatggcagacatcctgctgcgggaggaggacctcaagttcgcctcgaccatggtccacgccctcaacaccatcctgctgacctccacagagctcttccagctaaggaaccagctgaaggacctgaagaccctggagagccagaacctgttctgctgcctgtaccgctcctggtgccacaacccagtcaccacggtgtccctctgcttcctcacccagaactaccggcacgcctatgacctcatccagaagtttggggacctggaggtcaccgtggacttcctcgcagaggtggacaagctggtgcagctgattgagtgccccatcttcacatatctgcgcctgcagctgctggacgtgaagaacaacccctacctgatcaaggccctctacggcctgctcatgctcctgccgcagagcagcgccttccagctgctctcgcaccggctccagtgcgtgcccaaccctgagctgctgcagaccgaagacagtctaaaggcagcccccaagtcccagaaagctgactccccctggcattctcacagagctggctgcccacccagtggggggctatagcctcagagaccactcatcctctggaatcaacctctttctaataccctcttggaaaaagagcttgcccctcctccagcacactagagctctggccttgtgtgtatatgtatacatacgtgaacacatgcctgtgtgtgtgtgtgtgtgtgtgtacttgtatgcacgtaggcaccagcacaaagatctgaatgatgcaccccacccccaccccaataaagaaataacagaaaaccctcaaaaacaaaccggc

SEQ ID NO: 31268 - DNA, 2141 bp, Homo sapiens
ggtaacatggccgctgtctcgtgagtcccgctagtgccgggcgggagttgttaagcggccagggtcaggtgtgctggagcggggtccgggcccgggttccagggcgaggcggcggagcgtggcaggcaagcctagagcggcgtggtccatgcgccggcgccgggggcagagcggagccgcagactcccctggccccggcgcggccccggcagccgcgggctaaggagtcgcgaggttcccccagctgccaccatgaaccccgagaaggatttcgcgccgctcacgcctaacatcgtgcgcgccctcaatgacaagctgtacgaaaagcggaaggtggcagcgctggagatcgagaagctggtccgggagttcgtggcccagaacaataccgtgcaaatcaagcatgtgatccagaccctgtcccaggagtttgccctgtctcagcacccccacagccggaaagggggcctcatcggcctggccgcctgctccatcgcactgggcaaggactcagggctctacctgaaggagctgatcgagccagtgctgacctgcttcaatgatgcagacagcaggctgcgctactatgcctgcgaggccctctacaacatcgtcaaggtggcccggggcgctgtgctgccccacttcaacgtgctctttgacgggctgagcaagctggcagccgacccagaccccaatgtgaaaagcggatctgagctcctagaccgccttttaaaggacattgtgactgagagcaacaagtttgacctggtgagcttcatccccttgttgcgagagaggatttactccaacaaccagtatgcccggcagttcatcatctcctggatcctggttctggagtcggtgccagacattaacctgctggattacctgccggagatcctggatggactcttccagatcctgggtgacaatggcaaagagattcgcaaaatgtgtgaggttgttcttggagaattcttaaaagaaattaagaagaacccctccagtgtgaagtttgctgagatggccaacatcctggtgatccactgccagacaacagatgacctcatccagctgacagccatgtgctggatgcgggagttcatccagctggcgggccgcgtcatgctgccttactcctccgggatcctgactgctgtcttgccctgcttggcctacgatgaccgcaagaaaagcatcaaagaagtggccaacgtgtgcaaccagagcctgatgaagctggtcacccccgaggacgacgagctggatgagctgagacctgggcagaggcaggcagagcccacccctgacgatgccctgccaaagcaggagggcacagccagtggaggtccagatggttcctgtgactccagcttcagtagcggcatcagtgtcttcactgcagccagcactgaaagagccccagtgacccttcacctcgacgggatcgtgcaggtcctaaactgccacctcagtgacacggccattgggatgatgaccaggattgcagttctcaagtggctctaccacctctacatcaaaactcctcggaagatgttccggcacacggacagcctctttcccatcctactgcagacgttatcggatgaatcggatgaggtgatcctgaaggacctggaggtgctggcagaaatcgcttcctcccccgcaggccagacggatgacccaggccccctcgatggccctgacctccaggccagccactcagagctccaggtgcccacccctggcagagccggcctactgaacacctctggtaccaaaggcttagaatgttctccttcaactcccaccatgaattcttacttttataagttcatgatcaaccttctcaagagattcagcagcgaacggaagctcctggaggtcagaggccctttcatcatcaggtcagccttggcggcgcgctttctcctcttcctcccacggccccggcttttcactttcacgccattcaagtgtcaaagcagccaccttctctttcccttctctctcctccttttcctgacctttggatctgtaagaaatgaagaaggttgccccttcatactggttgctgatgcttctgacatgaaacagacaggtcagtgttgatgtttttccgcaaaaaaaaaaaa

SEQ ID NO: 31269 - DNA, 1890 bp, Homo sapiens
  misc_feature (1796)..(1796): n is a, c, g, or t
ggtaacatggccgctgtctcgtgagtcccgctagtgccgggcgggagttgttaagcggccagggtcaggtgtgctggagcggggtccgggcccgggttccagggcgaggcggcggagcgtggcaggcaagcctagagcggcgtggtccatgcgccggcgccgggggcagagcggagccgcagactcccctggccccggcgcggccccggcagccgcgggctaaggagtcgcgaggttcccccagctgccaccatgaaccccgagaaggatttcgcgccgctcacgcctaacatcgtgcgcgccctcaatgacaagctgtacgaaaagcggaaggtggcagcgctggagatcgagaagctggtccgggagttcgtggcccagaacaataccgtgcaaatcaagcatgtgatccagaccctgtcccaggagtttgccctgtctcagcacccccacagccggaaagggggcctcatcggcctggccgcctgctccatcgcactgggcaaggactcagggctctacctgaaggagctgatcgagccagtgctgacctgcttcaatgatgcagacagcaggctgcgctactatgcctgcgaggccctctacaacatcgtcaaggtggcccggggcgctgtgctgccccacttcaacgtgctctttgacgggctgagcaagctggcagccgacccagaccccaatgtgaaaagcggatctgagctcctagaccgccttttaaaggacattgtgactgagagcaacaagtttgacctggtgagcttcatccccttgttgcgagagaggatttactccaacaaccagtatgcccggcagttcatcatctcctggatcctggttctggagtcggtgccagacattaacctgctggattacctgccggagatcctggatggactcttccagatcctgggtgacaatggcaaagagattcgcaaaatgtgtgaggttgttcttggagaattcttaaaagaaattaagaagaacccctccagtgtgaagtttgctgagatggccaacatcctggtgatccactgccagacaacagatgacctcatccagctgacagccatgtgctggatgcgggagttcatccagctggcgggccgcgtcatgctgccttactcctccgggatcctgactgctgtcttgccctgcttggcctacgatgaccgcaagaaaagcatcaaagaagtggccaacgtgtgcaaccagagcctgatgaagctggtcacccccgaggacgacgagctggatgagctgagacctgggcagaggcaggcagagcccacccctgacgatgccctgccaaagcaggagggcacagccagtggaggtccagatggttcctgtgactccagcttcagtagcggcatcagtgtcttcactgcagccagcactgaaagagccccagtgacccttcacctcgacgggatcgtgcaggtcctaaactgccacctcagtgacacggccattgggatgatgaccaggattgcagttctcaagtggctctaccacctctacatcaaaactcctcggaagatgttccggcacacggacagcctctttcccatcctactgcagacgttatcggatgaatcggatgaggtgatcctgaaggacctggaggtgctggcagaaatcgcttcctcccccgcaggccagacggatgacccaggccccctcgatggccctgacctccaggccagccactcagagctccaggtgcccacccctggcagagccggcctactgaacacctctgaattttaatatgtctnttagtagtatgggatatatttctgagggagagatttacggtataactcatggacgatctatttgcttttcatagagcagtaagtttggacccat

SEQ ID NO: 31270 - DNA, 1788 bp, Homo sapiens
  misc_feature (1365)..(1366): n is a, c, g, or t
  misc_feature (1444)..(1444): n is a, c, g, or t
  misc_feature (1605)..(1605): n is a, c, g, or t
  misc_feature (1644)..(1645): n is a, c, g, or t
  misc_feature (1649)..(1650): n is a, c, g, or t
  misc_feature (1655)..(1655): n is a, c, g, or t
  misc_feature (1657)..(1659): n is a, c, g, or t
  misc_feature (1662)..(1662): n is a, c, g, or t
  misc_feature (1676)..(1676): n is a, c, g, or t
  misc_feature (1682)..(1682): n is a, c, g, or t
  misc_feature (1695)..(1695): n is a, c, g, or t
  misc_feature (1697)..(1697): n is a, c, g, or t
  misc_feature (1709)..(1709): n is a, c, g, or t
  misc_feature (1720)..(1721): n is a, c, g, or t
  misc_feature (1725)..(1726): n is a, c, g, or t
  misc_feature (1737)..(1737): n is a, c, g, or t
  misc_feature (1742)..(1743): n is a, c, g, or t
  misc_feature (1750)..(1750): n is a, c, g, or t
  misc_feature (1752)..(1752): n is a, c, g, or t
  misc_feature (1754)..(1755): n is a, c, g, or t
  misc_feature (1757)..(1757): n is a, c, g, or t
  misc_feature (1766)..(1767): n is a, c, g, or t
  misc_feature (1772)..(1772): n is a, c, g, or t
  misc_feature (1774)..(1776): n is a, c, g, or t
  misc_feature (1788)..(1788): n is a, c, g, or t
ggtaacatggccgctgtctcgtgagtcccgctagtgccgggcgggagttgttaagcggccagggtcaggtgtgctggagcggggtccgggcccgggttccagggcgaggcggcggagcgtggcaggcaagcctagagcggcgtggtccatgcgccggcgccgggggcagagcggagccgcagactcccctggccccggcgcggccccggcagccgcgggctaaggagtcgcgaggttcccccagctgccaccatgaaccccgagaaggatttcgcgccgctcacgcctaacatcgtgcgcgccctcaatgacaagctgtacgaaaagcggaaggtggcagcgctggagatcgagaagctggtccgggagttcgtggcccagaacaataccgtgcaaatcaagcatgtgatccagaccctgtcccaggagtttgccctgtctcagcacccccacagccggaaagggggcctcatcggcctggccgcctgctccatcgcactgggcaaggactcagggctctacctgaaggagctgatcgagccagtgctgacctgcttcaatgatgcagacagcaggctgcgctactatgcctgcgaggccctctacaacatcgtcaaggtggcccggggcgctgtgctgccccacttcaacgtgctctttgacgggctgagcaagctggcagccgacccagaccccaatgtgaaaagcggatctgagctcctagaccgccttttaaaggacattgtgactgagagcaacaagtttgacctggtgagcttcatccccttgttgcgagagaggatttactccaacaaccagtatgcccggcagttcatcatctcctggatcctggttctggagtcggtgccagacattaacctgctggattacctgccggagatcctggatggactcttccagatcctgggtgacaatggcaaagagattcgcaaaatgtgtgaggttgttcttggagaattcttaaaagaaattaagaagaacccctccagtgtgaagtttgctgagatggccaacatcctggtgatccactgccagacaacagatgacctcatccagctgacagccatgtgctggatgcgggagttcatccagctggcgggccgcgtcatgctgccttactcctccgggatcctgactgctgtcttgccctgcttggcctacgatgaccgcaagaaaagcatcaaagaagtggccaacgtgtgcaaccagagcctgatgaagctggtcacccccgaggacgacgagctggatgagctgagacctgggcagaggcaggcagagcccacccctgacgatgccctgccaaagcaggagggcacagccagtgggtgcactgaggcgcannacttccgtgacatccctccaatgatgcgcaactccctactcgtgagaaaacgtgagaccaacccaaacggggagacantctgcagagtgaccagcgcttcaaaagtgtcaagtttatgaaagacacacagattgaggggctgcaacagattggaggagacaaagaagacagtttagctaaatgcagtgtgagatcctggaacaaaaggccaggaatggaaaaactcgtgatgttcaaantagggtaatcatttagttaatggtagtgtatcgaagttnncctnntgggntnnntcntgaactatggagcngggcanggtggctcacgcntntaatcccagcantttgggaggcnnaggnnggtggatcacntgagnncaggagntngnnancagcctggnnaacangnnnaaaccccatctn

SEQ ID NO: 31271 - DNA, 2011 bp, Homo sapiens
cctctagaatggccccgcccagctgcttttgatctttgttgaactaaagtcagctgagccccgctagggagccaggagcgccaggcccagaaaagcagcagccgcagccgtagacatgtccaagatgttttctggtggtgcatcttcagcagggaggcgggaagggaacaggtgtgggcaggcagagctgagcaggggtgcaggaggccgcctccgggccccagatggcatctcaactgtgggaagagtccccctgccccggtcctgcccagcaggctggtgggccacctgaagcaactgtcaggctctggccgttgactcttcctgctggactgaactcatggccaagaattcgttttgggggagctccattttgtctcccccaaaatggcctcctttatttccaccctcaagctgctgggccccggctggcctcacgttggaggggcagaactgtagccacagtggcacctgccagatacctaagctggggctggataccaggtgaagctcttacacatcgtgtcaaggcatcttggcagccaccccagggccgctccttaggtagccctcgctttgcagatgaggaaacagtcacatgctcaagtcacaccgctaggaagcggtggagttatggttgggtccaggtctgtctagatcctgtgctctgccagtgcctgcaccccccttcccggccccgccgattggcatcttttcataaacttgaagggccccaagactctctgcttagctgagcagcccacagtcttcctgagaccccttcccaggtccaccaggcctcagggcctggaaacagatacttcctagcccacatggatctgctcctccaaaccagtgaggccaaagggagggagcagaacatttcatgagacactgctggagggtgagtaggaacaggacaggagcccaaggggatctcatcgccaggggcaagctaagcactgggcttgacagggacagcaaggctaccgcattgcaccattatagggagcatcatgcacactagctgtgcagtgcacaacctgtgttgctgtacagagcaactggagagggtggcagcaacaggaatgtaggagctgtaggcatgtccagtggtgagaccggcattcctcctcccagggacagtgagtgactgcaggccttggggccccaacactcaaaaacaaatgtcctgccaagtggagggcccggcagaggctcttcagcaattcccattttccccagtcctagccctgcctctcagagaaagggccaagctgccacctcccccttctccccagaccctgttccaggccccagctggcttcctggctggctgctagccctggctttcaccccaaagggagccactcgtaaacaggaaatgcttcccaatgcgatgcctgctctgggcgccatcgccagcccacaggccgagggcaatagccaagcagcagtgttagctgttcccaccaactgcggaagagggggatgctcaggggcttcccagctctggggcccgccatgacggaagagttgccaggcctgagacagacgcccacaggccgagcccaccagcctgtggctctgctctgaccccactgccctccagcagtaacccccctgtgagctgatccctgacactgagcatttctgctccctcttcccagagacagtctaaaggcagcccccaagtcccagaaagctgactccccctggcattctcacagagctggctgcccacccagtggggggctatagcctcagagaccactcatcctctggaatcaacctctttctaataccctcttggaaaaagagcttgcccctcctccagcacactagagctctggccttgtgtgtatatgtatacatacgtgaacacatgcctgtgtgtgtgtgtgtgtgtgtgtacttgtatgcacgtaggcaccagcacaaagatctgaatgatgcaccccacccccaccccaataaagaaataacagaaaaccctcaaaaacaaaccggc

SEQ ID NO: 31272 - DNA, 484 bp, Homo sapiens
cggaggcgttgaatagccaaacaaggacgatagccagagggcgttcccatggagccaggtctgttggcagatcggcccatattcaggccacccctggcagagccggcctactgaacacctctggtaccaaaggcttagaatgttctccttcaactcccaccatgaattcttacttttataagttcatgatcaaccttctcaagagattcagcagcgaacggaagctcctggaggtcagaggccctttcatcatcaggtcagccttggcggcgcgctttctcctcttcctcccacggccccggcttttcactttcacgccattcaagtgtcaaagcagccaccttctctttcccttctctctcctccttttcctgacctttggatctgtaagaaatgaagaaggttgccccttcatactggttgctgatgcttctgacatgaaacagacaggtcagtgttgatgtttttccgcaaaaaaaaaaaa

SEQ ID NO: 31273 - DNA, 388 bp, Homo sapiens
ctgagacctgggcagaggcaggcagagcccacccctgacgatgccctgccaaagcaggagggcacagccagtggtgagtggactccgtccctacacctcacctcctgtcgggggcccagggagccagatgtcataggagttgccttggggcctcacttaagcaaccaggactactttatgtatgtcactcacacaattgtagcagcaacccagcgcagtggcagcagtggttctcccccattctgcagacaggacacagggaagctgagtaccatggccacacactcgcagctagtgaagactggaaccggattggaacccaggcaggctgtctccagcagccatgatcttaacccttcctgcctcaaagaccatgaagcctttcctt

SEQ ID NO: 31274 - DNA, 608 bp, Homo sapiens
gtcattttggaagaaatagagcagtcgctatagacttatgtgggttgctgtcgacatcttgttgttttaggggatgtttccattcaggacacaggcatgttgtgtgccaatgtctcaaggcacaaatggcaattgcacctcttaagggatgcccggtgggtgagcctaaagaacgaaggctggggcacccttgtgctggttgcaaggtcaggctggaagcctaacgctagtcattgcctgtagtgcaggcttctacctgaggatgacactgccttctacttgaaaaaatccccattttagtttcattgttgagaagaagtcagggctgagtgtggtggcccacacctataatcccagcactttgagaggctgaggaggttggatcagttgagtccaggagtttaagaccatcctcggcaatatggcaaaaccctgtctctacaaaaaatataaaaattaaccaggtgtggtggtgcattcctgtggtcccccctactcaagaggatgagaagtgggaggattgcttgagcctgggaggttgaagttgcccaggtggtcgaggctgcatcaagccgtgatctgggcgacagagtgagattccttctcac

SEQ ID NO: 31275 - DNA, 497 bp, Homo sapiens
atcccagtttgggcagaagtctgaaaactgtggatgatatgtacctagcacttggtgttatatttgggaggcagtattgtagagggttagagtttagctcaggagtcagataccctggttcctagcttggcttcttggccagtggctacctgactggaacatgagacaggtgtggggagagctgagtcagcctccatcgcgcccccagggccaggctacctcagaccatagccagaccagagtgagtccagtcagtatcagcagaactcactatccagtcttgtgagcaataaatgcttctcattagatgccactgaggtttttgaatttttttttttatactttaagttttagggtacatgtacacaacgtgcaggtttgttacatatgtatacctatgccatgttggtgtgctgcacccattaactcgtcatttaacattcggtatatctcctaatgctatccctccccactcctcccaccccaaaacaggcccc

SEQ ID NO: 31276 - DNA, 365 bp, Homo sapiens
tattttggacaattggtatatcctatagatctttttcccgtgatttaatgaaatgtaacatttataataattttctttttattgaacatttttgctttgtatattatatgttaccttatttgttaataaaaacacataaataaacttggttaggtattatttatgtggtaactgattttcaacaaaggtgccaaggtatttcaatgggaaaagaatagtcttttcaaaaaaaagaaaggccgggcgcggtagctcacgcctgtaatcccagcactttgggaggctgaggcgggttgatcacgaggtcaggagatcgagaccatcctggctaacacacagtgaaaccccgtctctgctaaaaatac

SEQ ID NO: 31277 - DNA, 1404 bp, Homo sapiens
aggagccttaggaggtacggggagctcgcaaatactccttttggtttattcttaccaccttgcttctgtgttccttgggaatgctgctgtgcttatgcatctggtctctttttggagctacagtggacaggcatttgtgacagcactatgggactgagtaacattctctttgtgatggccttcctgctctctggtgctgctcctctgaagattcaagcttatttcaatgagactgcagacctgccatgccaatttgcaaactctcaaaaccaaagcctgagtgagctagtagtattttggcaggaccaggaaaacttggttctgaatgaggtatacttaggcaaagagaaatttgacagtgttcattccaagtatatgggccgcacaagttttgattcggacagttggaccctgagacttcacaatcttcagatcaaggacaagggcttgtatcaatgtatcatccatcacaaaaagcccacaggaatgattcgcatccaccagatgaattctgaactgtcagtgcttgctaacttcagtcaacctgaaatagtaccaatttctaatataacagaaaatgtgtacataaatttgacctgctcatctatacacggttacccagaacctaagaagatgagtgttttgctaagaaccaagaattcaactatcgagtatgatggtattatgcagaaatctcaagataatgtcacagaactgtacgacgtttccatcagcttgtctgtttcattccctgatgttacgagcaatatgaccatcttctgtattctggaaactgacaagacgcggcttttatcttcacctttctctatagagcttgaggaccctcagcctcccccagaccacattccttggattacagctgtacttccaacagttattatatgtgtgatggttttctgtctaattctatggaaatggaagaagaagaagcggcctcgcaactcttataaatgtggaaccaacacaatggagagggaagagagtgaacagaccaagaaaagagaaaaaatccatatacctgaaagatctgatgaagcccagcgtgtttttaaaagttcgaagacatcttcatgcgacaaaagtgatacatgtttttaattaaagagtaaagcccatacaagtattcattttttctaccctttcctttgtaagttcctgggcaacctttttgatttcttccagaaggcaaaaagacattaccatgagtaataagggggctccaggactccctctaagtggaatagcctccctgtaactccagctctgctccgtatgccaagaggagactttaattctcttactgcttcttttcacttcagagcacacttatgggccaagcccagcttaatggctcatgacctggaaataaaatttaggaccaat

SEQ ID NO: 31278 - DNA, 2749 bp, Homo sapiens
gcaggctgtacgcccccgtaggtatgggatggaaggcttgcacagggtgaaagctttgcttctctgctgctgtaacagggactagcacagacacacggatgagtggggtcatttccagatattaggtcacagcagaagcagccaaaatggatccccagtgcactatgggactgagtaacattctctttgtgatggccttcctgctctctggtgctgctcctctgaagattcaagcttatttcaatgagactgcagacctgccatgccaatttgcaaactctcaaaaccaaagcctgagtgagctagtagtattttggcaggaccaggaaaacttggttctgaatgaggtatacttaggcaaagagaaatttgacagtgttcattccaagtatatgggccgcacaagttttgattcggacagttggaccctgagacttcacaatcttcagatcaaggacaagggcttgtatcaatgtatcatccatcacaaaaagcccacaggaatgattcgcatccaccagatgaattctgaactgtcagtgcttgctaacttcagtcaacctgaaatagtaccaatttctaatataacagaaaatgtgtacataaatttgacctgctcatctatacacggttacccagaacctaagaagatgagtgttttgctaagaaccaagaattcaactatcgagtatgatggtattatgcagaaatctcaagataatgtcacagaactgtacgacgtttccatcagcttgtctgtttcattccctgatgttacgagcaatatgaccatcttctgtattctggaaactgacaagacgcggcttttatcttcacctttctctatagagcttgaggaccctcagcctcccccagaccacattccttggattacagctgtacttccaacagttattatatgtgtgatggttttctgtctaattctatggaaatggaagaagaagaagcggcctcgcaactcttataaatgtggaaccaacacaatggagagggaagagagtgaacagaccaagaaaagagaaaaaatccatatacctgaaagatctgatgaagcccagcgtgtttttaaaagttcgaagacatcttcatgcgacaaaagtgatacatgtttttaattaaagagtaaagcccatacaagtattcattttttctaccctttcctttgtaagttcctgggcaacctttttgatttcttccagaaggcaaaaagacattaccatgagtaataagggggctccaggactccctctaagtggaatagcctccctgtaactccagctctgctccgtatgccaagaggagactttaattctcttactgcttcttttcacttcagagcacacttatgggccaagcccagcttaatggctcatgacctggaaataaaatttaggaccaatacctcctccagatcagattcttctcttaatttcatagattgtgtttttttttaaatagacctctcaatttctggaaaactgccttttatctgcccagaattctaagctggtgccccactgaatcttgtgtacctgtgactaaacaactacctcctcagtctgggtgggacttatgtatttatgaccttatagtgttaatatcttgaaacatagagatctatgtactgtaatagtgtgattactatgctctagagaaaagtctacccctgctaaggagttctcatccctctgtcagggtcagtaaggaaaacggtggcctagggtacaggcaacaatgagcagaccaacctaaatttggggaaattaggagaggcagagatagaacctggagccacttctatctgggctgttgctaatattgaggaggcttgccccacccaacaagccatagtggagagaactgaataaacaggaaaatgccagagcttgtgaaccctgtttctcttgaagaactgactagtgagatggcctggggaagctgtgaaagaaccaaaagagatcacaatactcaaaagagagagagagagaaaaaagagagatcttgatccacagaaatacatgaaatgtctggtctgtccaccccatcaacaagtcttgaaacaagcaacagatggatagtctgtccaaatggacataagacagacagcagtttccctggtggtcagggaggggttttggtgatacccaagttattgggatgtcatcttcctggaagcagagctggggagggagagccatcaccttgataatgggatgaatggaaggaggcttaggactttccactcctggctgagagaggaagagctgcaacggaattaggaagaccaagacacagatcacccggggcttacttagcctacagatgtcctacgggaacgtgggctggcccagcatagggctagcaaatttgagttggatgattgtttttgctcaaggcaaccagaggaaacttgcatacagagacagatatactgggagaaatgactttgaaaacctggctctaaggtgggatcactaagggatggggcagtctctgcccaaacataaagagaactctggggagcctgagccacaaaaatgttcctttattttatgtaaaccctcaagggttatagactgccatgctagacaagcttgtccatgtaatattcccatgtttttaccctgcccctgccttgattagactcctagcacctggctagtttctaacatgttttgtgcagcacagtttttaataaatgcttgttacattcatttaaaagtctaca

SEQ ID NO: 31279 - DNA, 713 bp, Homo sapiens
gcaggctgtacgcccccgtaggtatgggatggaaggcttgcacagggtgaaagctttgcttctctgctgctgtaacagggactagcacagacacacggatgagtggggtcatttccagatattaggtcacagcagaagcagccaaaatggatccccagtgcactatgggactgagtaacattctctttgtgatggccttcctgctctctggtaagaacctttcagctttgttaagtcctggaatcctactgtctcctgatgagtctgaccacagcaagcccaggcctgagacttggtgggttttactcactttctactgagcattgtacaagaccacatgcaaaaaagactttcctggagaagaaggaagtgttatgattgagagcagctgatggcaggcagctgggatggagctctcccccccgtgtgcttcttcctcctctgcagtctcacatcagtgagcctagatgctcagagtagggtagcctggcccatcccatggggatgggggaaggctgctgcactgaggcccctgagacttgactcttttgttccacacatattctcttctggtcttctctgaccctgtttctgtctttctcaggctcctaggaaacaactgacagaattccaaaagtctcccttcattcggagcactggctttcacgtccctgacttccctaccctctctcactcccttccctacagcccat

SEQ ID NO: 31280 - DNA, 267 bp, Homo sapiens
ggggtcaagggacccccagaatagggtttcttgcccaggcttgggacaatgacactaagtctcccagaatatgggaccttgcccaggcttggaacaatgacacctcccagaatatgggactttgtccaggcttgaggacaatgacagtaagtcatcattcaccccaagccatcaggccttggagctctccttctcaccctgggagaattccaggagattcctggcaaaggtggcaagcctatctcctcctcccatcagggcagccag

SEQ ID NO: 31281 - DNA, 356 bp, Homo sapiens
gctgcttccctgattgtcccagtttccctaattgtgacccaatgtagcaaacccatttcctacaattagctaaatcagtaagattgactttttttcccagaacttacactggaacatagagatcagctaattgatagtgatagcagaaaagaagttatgcagagatatatggtgctattagtgttattaataatacagataacactgtttgcctccaaaacgttttatttaatttctcttcttaatatcaagccaaccaaatataatagtactttctcttttttattttcctttggctcttacattttgacttgcttatgtattttaataaatacaactggaaccaaaaaaaatta

SEQ ID NO: 31282 - DNA, 411 bp, Homo sapiens
ccctgtctccgacgcccagaggaatccttgttggaactgacaatttgaggctagatcagtctggaagaaggagctgaaataagcagtatagcatcgtacaaggagcaccagcttttgagccagatagtactggcaccaaacccaggctatgacacttcccagttgcataattttggccaagtcacttaattcctttgagtctcagtttcttcatttgtaacacgtgcataataatggtacctactttctaagtgtgctgtgaagtatgaataacagctaatgtttaataaatgcttactacatgccatgcactgttctagcagccagggatagctaatgtcataatagacaagttacctgctctcatggagctcatttctattaatagaaggggcagatatgacacaagta

SEQ ID NO: 31283 - DNA, 306 bp, Homo sapiens
atcatttttactttttttgcaggtggcatgatgtcattttgtcattaggcaccaccgtggggactgcatgttgtcaatggacccactatgctcatgatgctccttatcgagttctaccctgtgcagctcccaggccctgctgctggggcagtcgcctggggcccctcaccatctgacggctgtcaccgcaggccaggatgtgcactctcaacagcccaggctttgagggctgctctggagtatgatggatactgtagctgttcgcttttgaaaaagaaagacctgtggcgagagcatttccttctc

SEQ ID NO: 31284 - DNA, 358 bp, Homo sapiens
tttcatgttatatgtgtattctatatattgtgtatatggatactctaaatatatagagtatgtatgtatggagagaatttgtttatgtgtgtgtgtatatatatacatataaacatattcatataaatatatgcctgtatacatatatacactctaaaccccagtttggaagcccttgtttctacattttaatatagaaaaacatttaatttgcttctatatttttaagtgagtctgtccacagattgcttaggcttcctcatcgcctgcttgtgagagttcaagattaaacattctaagggtccaggcgtttttgtgacctagcctcagaagttgcatattgtcagttctcaaatcc

SEQ ID NO: 31285 - DNA, 544 bp, Homo sapiens
ggtggttttccttcccagtctccttaccctcttcccattcccctcctttcctcccttctgttaccacttcccagcagaatattaacatgaaggagaaaatggaatgcattattcctctcctaattaagaaaccccaacagatgtgtttctctgcttgtgtgtctgtatctgaatactcacgatttttaaagtagaacatacttttaaaggaaataatattttcttgttttgtaagtctttagtcatttttggggaatatcacccactccccagttatggaacccatcaggaagaaccattatgctgtctacctaagtcgcagttcacttaccctttgtccctaaccctgtccagctgcgactgttgtggctcacagagtaggtgaaagaagtgcatcagtgcccatcttcccaaacccctccaggcttgcttggcagttagtaaaatgctctatgctgtgggcctctaaaatcacctcttattgatccctgcaattcttgtgtggtaagattagttgtaagcattttgttttcagaatgatatg

SEQ ID NO: 31286 - DNA, 496 bp, Homo sapiens
ggtatgtgacatcgttactcatcatgggtggtgttaactttgatcatttggctaagttggtgtctgccacatttctctgttgtaaagttactattttttccctttccataacctagtctttggatgtgagtcactaagtgccccccattctcaagcggagaggaattaagctccatgcccttgagagggaaatggcttcatatattttttgaaactctgggctgggctgacgcctgtaatcccagcactttgggaggcagatgtaggtggatcgcctgaggtcaggagttcgagatcagcctggctaacatgtcgaaacccctctttactaaaaatacaaaaattagccgggcatggtggcaggcgcctgtaatcccagctactcaggaggccgaggcagaagaatcccttgaacccgggaggcggtggttgcagtgagctgagattgcaccattgcactccagcctgggcaacaagagtgaaactctgtctcaaa

SEQ ID NO: 31287 - DNA, 395 bp, Homo sapiens
gcttaagagtggggaaaaaggtattgatatacgtctttgaaacatttacaaacacatattctacttaaacagtcaaggaaactcaaactaagaaatttaaataaaaacagtttcatatcaactagcccctttacttgtcttaggatctttttcagcaagtgcaacatttctataaaactatccctctattccaactagcggctaccaaatctgaaatcttgaatccacaattttattctattcttggcaaataacaaaatgttcttattgtttgcccccttcatcttcatgtccacactagataatggtattcgtatgcataactctctctttttatagtttaaactatatggtttaagggaaaaaaacttggttaaaacttttaaagtaaccta

SEQ ID NO: 31288 - DNA, 456 bp, Homo sapiens
agtgggaaaagctgcttgagtgaaaaaccaccgacctgcagtttgagcagaagtgaaatggtgggaattaactgtctgcaactcacttttaatcagttaggagtagtttgcacagagtagtttgcagtcattttgaagaacagtgagaggtttgtgttttcactcctggaacaggcggtctccactgggtcatcacatccccagtttattattcacctgtgcagatctgtatacatttgatcttgatagacacctgagctgatgcattgaattctcaagtgagacgatatatctccttttatagctggtcatttggtcacacaggatgttaaagaagaagagtgaggaatttatctaaggacttcttcccattttctgtcccgtaatggtcaaagtttgtcctttggagcctttattcttctacacattcattttattttgctatgaactacatgt

SEQ ID NO: 31289 - DNA, 216 bp, Homo sapiens
taactggagtgaggcaggattgcttgaaagcttactcaaagattcttaaggagcgaggtgcagtggctcacgcctgtaatcccagcactttgataggctgaggagggtggaacatctgaggtcaggagtttgagatcatcttggccagcatggtgaaacccgtctctactaaaaatacaaaaattagctggatagtggcggctgcctgtagcccca

SEQ ID NO: 31290 - DNA, 319 bp, Homo sapiens
attaacattttgttaaaattgaataatgtcagaaagtttgtttgctttgcctgattggtttggcaatgaagatttgctttgttcattacattatgtggcagaccatttgcacaagtagcctctactaagtctgcagtttcaagatttggaagaaaatatacttgaatgtaagatttagttaaatatttctatatgatgaaatgtttatatttttaaatataagaactcaaggccaggcatggcggcttacacctgtaatcccaacactttgggaggccaggagaatcacttgggcccaggagtttgagtccagcctgag

SEQ ID NO: 31291 - DNA, 5411 bp, Homo sapiens
agggcgcctttggcttcagcgcttcgcccccgcgctgtgccctctgtcggcggcgtggggcagctgtagcagcgttggcggcaggaggcggcggccgcgtcgacgtcgacccagactggagcgacgtttaaagaaggggcagaatcgctggggagtgcggcttcttcttgttgggggactcccagccttccgcgcgtccggaggaggagaagcggcggcgccgggaagcaggcatggagagtagaaaactgatttctgctacagacattcagtactctggcagtctgctgaactccttgaatgagcaacgtggccatggactcttctgtgatgttaccgttattgtggaagaccgaaaattccgggctcacaagaatattctttcagcttctagtacctacttccatcagctcttctctgttgctgggcaagttgttgaactgagctttataagagcagagatctttgcagaaattctcaattatatctatagttctaaaattgttcgtgttagatcagatttgcttgatgagttaattaaatcagggcagttattaggagtgaaatttatagcagagcttggtgtcccattgtcacaggttaaaagcatctcaggtacagcgcaggatggtaatactgagcctttacctcctgattctggtgacaagaaccttgtaatacagaaatcaaaagatgaagcccaagataatggggctactataatgcctattataacagagtctttttcattatctgccgaagattatgaaatgaaaaagatcattgttaccgattctgatgatgatgatgatgatgtcattttttgctccgagattctgcccacaaaggagactttgccgagtaataacacagtggcacaggtccaatctaacccaggccctgttgctatttcagatgttgcacctagtgctagcaataactcgccccctttaacaaatatcacacctactcagaaacttcctactcctgtgaatcaggcaactttgagccaaacacaaggaagtgaaaaattgttggtatcttcagctccaacacatctgactcccaatattattttgttaaatcagacaccactttctacaccaccaaatgtcagttcttcacttccaaatcatatgccctcttcaatcaatttacttgtgcagaatcagcagacaccaaacagtgctattttaacaggaaacaaggccaatgaagaggaggaggaggaaataatagatgatgatgatgacactattagctccagtcctgactcggccgtcagtaatacatctttggtcccacaggctgatacctcccaaaataccagttttgatggatcattaatacagaagatgcagattcctacacttcttcaagaaccactttccaattccttaaaaatttcagatataattactagaaatactaatgatccaggcgtaggatcaaaacatctaatggagggtcagaagatcattactttagatacagctactgaaattgaaggcttatcgactggttgcaaggtttatgcaaatatcggtgaagatacttatgatatagtgatccctgtcaaagatgaccctgatgaaggggaggccagacttgagaatgaaataccaaaaacgtctggcagcgagatggcaaacaaacgtatgaaagtaaaacatgatgatcactatgagttaatagtagatggaagggtctattatatctgtattgtatgcaaaaggtcatatgtctgtctgacaagcttgcggagacattttaacattcattcttgggagaagaagtatccgtgccgttactgtgagaaggtatttcctcttgcagaatatcgcacaaagcatgaaattcatcacacaggggagcgaaggtatcagtgtttggcctgtggcaaatctttcatcaactatcagtttatgtcttcacatataaagtcagttcatagtcaagatccttctggggactcaaagctttatcgtttacatccatgcaggtctttacaaatcagacaatatgcatatctttccgatagatcaagcactattcctgcaatgaaggatgatggtattgggtataaggttgacactggaaaagaacctccagtagggaccactacatctactcagaacaagccaatgacctgggaagatatttttattcagcaggaaaatgattcaatttttaaacaaaatgtaacagatggcagtactgagtttgaatttataataccagagtcttactaaactcctttgaaatactagaaagttttgttttggatgatggggcaggggtttcagaagatctgtaaaacaaattaaggtgcgaacaagttaatttgatctgccacattatctgaaggaagtgtagtgggatttttgttgataatttttagaagcaaattttcctgaaagttttgagtagaggtgagaccccctccccaagtatctgtttatatagttagttttcagctcatttaaaagaggcaaaaattaaaagcttggagagatagtttcctgaatagaatttgaagcagtctgaatgttctttgaaaataactggagttattagcataccctagtacatcttacagctttccccttccatgttagcactttactgctgaattctcaattttcttaacattgagacaataaatgtgtgttttgtcttgtatatggcataaagagtaaataagttttagagttgttctggaaaatgtcagaataagtcagtacttgggttgtgtaatctgctagtccaagcgaacagcaacctcctgctaccctccctctatgaaaatagccatgcagacaagtctctcatctgaagaacaaattagatttagctaattagaattaatcctggctttcattgccatagtctgtaaaagactttggtggctagaccactttatacctttgcagtgtggtctctgggggcaaaaaactaatgaaaacaatctctgtaatggcagataggaggagatgaaaagttctgttgcatggatttttaattctctggctaccacatagtagagaatggaatgaagatttccttttggcttcttaaggttaaaaatattcccatgaacatgaaaattttcaaattttgaatctgaaagccaccaaatgtatctttatgtataaatccttgtaaatgatagattccatgggtgagactttacatattttgggtgggaggctactggcatatatttttaaatgttcatattgcgtagaatctccactaggaagtctttatttgaaatagttgaatcagtgatctagtattttcctttcggcaagatttgttaggtttttaccccttctaaaataagttttattccatctgcaaattgctgcaatattatagtaatcagaaactacataaggaatgttatataggcttgtcagttcccatttttcttgacaacaataaataccacttttaaaaatgacacatatttaaacacttagaaaataaagttaacacttactgaagtgctagtactaaactgtgctagtactaaaagaaaacaggttggaacatacatatagcctagcatttataacagaattgttgaacgtctgtaaatgatttttttttttttggcaaaggaaaaaattgatactggaaaagattgttgtgcatagttattagtcatttgtaaccttgcttaagtatttcttagtccaacatagatattttctttctcctgaccatgtattttaaaatatagtctatttcttgactttgaacttaaagctttaatcataatttctcatgtatacatcgttcttctgatggtaagctggatttgaaggtagtggtttcagtgtttcttaagttggtagctgagggtatcaggcatcagttcatgcaataatacaagaaaaaaaatcctttgcttgccaagaggtagagtgatgtgcatttatctgttttctgttctgtaagtctagaccttcaaaccatttgtaaactaacccctgggaaatttgaaattacctgataacttaagactctgtgatctctggaatcaccatatgtttcttttttgtgtagatattaataacattactctttgactatagtgtgcactctgaaatgtactcagtgaaaatttgttttgagtttcattaatgctatttcaccagttagacataattacttctaccgatgtgaatgatacggatgccggcagagcttccagatctttcagactcaactgctaggtcaattagtttgtcataataaaacttggcagattctacaagtctattatgacaaaccaggaactaattctataatggaaaactatccattctgaataataggtatgtaattatttgctgctgctgctgtgctctgtaaattctgaatatgacatttaaactctgtgcctactaaaggtatcttctggagtttttgggaggagagaaactggaaaattaaattgtatttttgccagaagactcttacttgcatgtgtctcagggtcttcagtttttctataagtttccatatccaaagttcagaattcatgtgaaatacttctttggggcaaaagtccttcattcctggtatttattggattggaaatctgtagcaagatgctgtttaaaattaccatattgtttttttatcttatacttagctctctggctattgaacttccttttcttgtttgaagttagcttcaaatttgctcctatgctaaattacctgtaaatattctggataggaactacttgaaatagtaatttgttaaaagatatgacaaaatgaaaatgcttaaactacagaaatttaaaaatgccataacaatcttgcgagactaactttaaaatatactttaaatgattattatgattttggtggtaacgatcccccacacacaaccactatgaagaaataatgccgcatttttcccccattgtaccaaaaagataaaaaaatggtaaacactgatcaaggtattttgtattgtcaaggcatgcatattctaaagaattaaatgctaacttaacagcactggctttctggctggtcaactatatgaaaccttgttcattcctccgagtactgtaatgttcacacttgtacaatcttccctgtcatgactttaagttctacttttcattaaccatggcctgatattagttcttagagcttcttgtggcaaaaataaaatgatttaattctgaaaagacaacacaagaaacaaatttgtcgggccgcgccagaaagatttaacactcggggggggccagtacagcaggctacgttccagaccggagaaggggggttcacaaaaaccgggacggtgaaccaagtggtggtaaagccgcacagcccccgggagggagaaaacgacggagaccaagacaatcgaccagagc

SEQ ID NO: 31292 - DNA, 5216 bp, Homo sapiens
agggcgcctttggcttcagcgcttcgcccccgcgctgtgccctctgtcggcggcgtggggcagctgtagcagcgttggcggcaggaggcggcggccgcgtcgacgtcgacccagactggagcgacgtttaaagaaggggcagaatcgctggggagtgcggcttcttcttgttgggggactcccagccttccgcgcgtccggaggaggagaagcggcggcgccgggaagcaggcatggagagtagaaaactgatttctgctacagacattcagtactctggcagtctgctgaactccttgaatgagcaacgtggccatggactcttctgtgatgttaccgttattgtggaagaccgaaaattccgggctcacaagaatattctttcagcttctagtacctacttccatcagctcttctctgttgctgggcaagttgttgaactgagctttataagagcagagatctttgcagaaattctcaattatatctatagttctaaaattgttcgtgttagatcagatttgcttgatgagttaattaaatcagggcagttattaggagtgaaatttatagcagagcttggtgtcccattgtcacaggttaaaagcatctcaggtacagcgcaggatggtaatactgagcctttacctcctgattctggtgacaagaaccttgtaatacagaaatcaaaagatgaagcccaagataatggggctactataatgcctattataacagagtctttttcattatctgccgaagattatgaaatgaaaaagatcattgttaccgattctgatgatgatgatgatgatgtcattttttgctccgagattctgcccacaaaggagactttgccgagtaataacacagtggcacaggtccaatctaacccaggccctgttgctatttcagatgttgcacctagtgctagcaataactcgccccctttaacaaatatcacacctactcagaaacttcctactcctgtgaatcaggcaactttgagccaaacacaaggaagtgaaaaattgttggtatcttcagctccaacacatctgactcccaatattattttgttaaatcagacaccactttctacaccaccaaatgtcagttcttcacttccaaatcatatgccctcttcaatcaatttacttgtgcagaatcagcagacaccaaacagtgctattttaacaggaaacaaggccaatgaagaggaggaggaggaaataatagatgatgatgatgacactattagctccagtcctgactcggccgtcagtaatacatctttggtcccacaggctgatacctcccaaaataccagttttgatggatcattaatacagaagatgcagattcctacacttcttcaagaaccactttccaattccttaaaaatttcagatataattactagaaatactaatgatccaggcgtaggatcaaaacatctaatggagggtcagaagatcattactttagatacagctactgaaattgaaggcttatcgactggttgcaaggtttatgcaaatatcggtgaagatacttatgatatagtgatccctgtcaaagatgaccctgatgaaggggaggccagacttgagaatgaaataccaaaaacgtctggcagcgagatggcaaacaaacgtatgaaagtaaaacatgatgatcactatgagttaatagtagatggaagggtctattatatctgtattgtatgcaaaaggtcatatgtctgtctgacaagcttgcggagacattttaacattcattcttgggagaagaagtatccgtgccgttactgtgagaaggtatttcctcttgcagaatatcgcacaaagcatgaaattcatcacacaggggagcgaaggtatcagtgtttggcctgtggcaaatctttcatcaactatcagtttatgtcttcacatataaagtcagttcatagtcaagatccttctggggactcaaagctttatcgtttacatccatgcaggtctttacaaatcagacaatatgcatatctttccgatagatcaagcactattcctgcaatgaaggatgatggtattgggtataaggttgacactggaaaagaacctccagtagggaccactacatctactcagaacaagccaatgacctgggaagatatttttattcagcaggaaaatgattcaatttttaaacaaaatgtaacagatggcagtactgagtttgaatttataataccagagtcttactaaactcctttgaaatactagaaagttttgttttggatgatggggcaggggtttcagaagatctgtaaaacaaattaaggtgcgaacaagttaatttgatctgccacattatctgaaggaagtgtagtgggatttttgttgataatttttagaagcaaattttcctgaaagttttgagtagaggtgagaccccctccccaagtatctgtttatatagttagttttcagctcatttaaaagaggcaaaaattaaaagcttggagagatagtttcctgaatagaatttgaagcagtctgaatgttctttgaaaataactggagttattagcataccctagtacatcttacagctttccccttccatgttagcactttactgctgaattctcaattttcttaacattgagacaataaatgtgtgttttgtcttgtatatggcataaagagtaaataagttttagagttgttctggaaaatgtcagaataagtcagtacttgggttgtgtaatctgctagtccaagcgaacagcaacctcctgctaccctccctctatgaaaatagccatgcagacaagtctctcatctgaagaacaaattagatttagctaattagaattaatcctggctttcattgccatagtctgtaaaagactttggtggctagaccactttatacctttgcagtgtggtctctgggggcaaaaaactaatgaaaacaatctctgtaatggcagataggaggagatgaaaagttctgttgcatggatttttaattctctggctaccacatagtagagaatggaatgaagatttccttttggcttcttaaggttaaaaatattcccatgaacatgaaaattttcaaattttgaatctgaaagccaccaaatgtatctttatgtataaatccttgtaaatgatagattccatgggtgagactttacatattttgggtgggaggctactggcatatatttttaaatgttcatattgcgtagaatctccactaggaagtctttatttgaaatagttgaatcagtgatctagtattttcctttcggcaagatttgttaggtttttaccccttctaaaataagttttattccatctgcaaattgctgcaatattatagtaatcagaaactacataaggaatgttatataggcttgtcagttcccatttttcttgacaacaataaataccacttttaaaaatgacacatatttaaacacttagaaaataaagttaacacttactgaagtgctagtactaaactgtgctagtactaaaagaaaacaggttggaacatacatatagcctagcatttataacagaattgttgaacgtctgtaaatgatttttttttttttggcaaaggaaaaaattgatactggaaaagattgttgtgcatagttattagtcatttgtaaccttgcttaagtatttcttagtccaacatagatattttctttctcctgaccatgtattttaaaatatagtctatttcttgactttgaacttaaagctttaatcataatttctcatgtatacatcgttcttctgatggtaagctggatttgaaggtagtggtttcagtgtttcttaagttggtagctgagggtatcaggcatcagttcatgcaataatacaagaaaaaaaatcctttgcttgccaagaggtagagtgatgtgcatttatctgttttctgttctgtaagtctagaccttcaaaccatttgtaaactaacccctgggaaatttgaaattacctgataacttaagactctgtgatctctggaatcaccatatgtttcttttttgtgtagatattaataacattactctttgactatagtgtgcactctgaaatgtactcagtgaaaatttgttttgagtttcattaatgctatttcaccagttagacataattacttctaccgatgtgaatgatacggatgccggcagagcttccagatctttcagactcaactgctaggtcaattagtttgtcataataaaacttggcagattctacaagtctattatgacaaaccaggaactaattctataatggaaaactatccattctgaataataggtatgtaattatttgctgctgctgctgtgctctgtaaattctgaatatgacatttaaactctgtgcctactaaaggtatcttctggagtttttgggaggagagaaactggaaaattaaattgtatttttgccagaagactcttacttgcatgtgtctcagggtcttcagtttttctataagtttccatatccaaagttcagaattcatgtgaaatacttctttggggcaaaagtccttcattcctggtatttattggattggaaatctgtagcaagatgctgtttaaaattaccatattgtttttttatcttatacttagctctctggctattgaacttccttttcttgtttgaagttagcttcaaatttgctcctatgctaaattacctgtaaatattctggataggaactacttgaaatagtaatttgttaaaagatatgacaaaatgaaaatgcttaaactacagaaatttaaaaatgccataacaatcttgcgagactaactttaaaatatactttaaatgattattatgattttggtggtaacgatcccccacacacaaccactatgaagaaataatgccgcatttttcccccattgtaccaaaaagataaaaaaatggtaaacactgatcaaggtattttgtattgtcaaggcatgcatattctaaagaattaaatgctaacttaacagcactggctttctggctggtcaactatatgaaaccttgttcattcctccgagtactgtaatgttcacacttgtacaatcttccctgtcatgactttaagttctacttttcattaaccatggcctgatattagttcttagagcttcttgtggcaaaaataaaatgatttaattctga

SEQ ID NO: 31293 - DNA, 5194 bp, Homo sapiens
agggcgcctttggcttcagcgcttcgcccccgcgctgtgccctctgtcggcggcgtggggcagctgtagcagcgttggcggcaggaggcggcggccgcgtcgacgtcgacccagactggagcgacgtttaaagaaggggcagaatcgctggggagtgcggcttcttcttgttgggggactcccagccttccgcgcgtccggaggaggagaagcggcggcgccgggaagcaggcatggagagtagaaaactgatttctgctacagacattcagtactctggcagtctgctgaactccttgaatgagcaacgtggccatggactcttctgtgatgttaccgttattgtggaagaccgaaaattccgggctcacaagaatattctttcagcttctagtacctacttccatcagctcttctctgttgctgggcaagttgttgaactgagctttataagagcagagatctttgcagaaattctcaattatatctatagttctaaaattgttcgtgttagatcagatttgcttgatgagttaattaaatcagggcagttattaggagtgaaatttatagcagagcttggtgtcccattgtcacaggttaaaagcatctcaggtacagcgcaggatggtaatactgagcctttacctcctgattctggtgacaagaaccttgtaatacagaaatcaaaagatgaagcccaagataatggggctactataatgcctattataacagagtctttttcattatctgccgaagattatgaaatgaaaaagatcattgttaccgattctgatgatgatgatgatgatgtcattttttgctccgagattctgcccacaaaggagactttgccgagtaataacacagtggcacaggtccaatctaacccaggccctgttgctatttcagatgttgcacctagtgctagcaataactcgccccctttaacaaatatcacacctactcagaaacttcctactcctgtgaatcaggcaactttgagccaaacacaaggaagtgaaaaattgttggtatcttcagctccaacacatctgactcccaatattattttgttaaatcagacaccactttctacaccaccaaatgtcagttcttcacttccaaatcatatgccctcttcaatcaatttacttgtgcagaatcagcagacaccaaacagtgctattttaacaggaaacaaggccaatgaagaggaggaggaggaaataatagatgatgatgatgacactattagctccagtcctgactcggccgtcagtaatacatctttggtcccacaggctgatacctcccaaaataccagttttgatggatcattaatacagaagatgcagattcctacacttcttcaagaaccactttccaattccttaaaaatttcagatataattactagaaatactaatgatccaggcgtaggatcaaaacatctaatggagggtcagaagatcattactttagatacagctactgaaattgaaggcttatcgactggttgcaaggtttatgcaaatatcggtgaagatacttatgatatagtgatccctgtcaaagatgaccctgatgaaggggaggccagacttgagaatgaaataccaaaaacgtctggcagcgagatggcaaacaaacgtatgaaagtaaaacatgatgatcactatgagttaatagtagatggaagggtctattatatctgtattgtatgcaaaaggtcatatgtctgtctgacaagcttgcggagacattttaacattcattcttgggagaagaagtatccgtgccgttactgtgagaaggtatttcctcttgcagaatatcgcacaaagcatgaaattcatcacacaggggagcgaaggtatcagtgtttggcctgtggcaaatctttcatcaactatcagtttatgtcttcacatataaagtcagttcatagtcaagatccttctggggactcaaagctttatcgtttacatccatgcaggtctttacaaatcagacaatatgcatatctttccgatagatcaagcactattcctgcaatgaaggatgatggtattgggtataaggttgacactggaaaagaacctccagtagggaccactacatctactcagaacaagccaatgacctgggaagatatttttattcagcaggaaaatgattcaatttttaaacaaaatgtaacagatggcagtactgagtttgaatttataataccagagtcttactaaactcctttgaaatactagaaagttttgttttggatgatggggcaggggtttcagaagatctgtaaaacaaattaaggtgcgaacaagttaatttgatctgccacattatctgaaggaagtgtagtgggatttttgttgataatttttagaagcaaattttcctgaaagttttgagtagaggtgagaccccctccccaagtatctgtttatatagttagttttcagctcatttaaaagaggcaaaaattaaaagcttggagagatagtttcctgaatagaatttgaagcagtctgaatgttctttgaaaataactggagttattagcataccctagtacatcttacagctttccccttccatgttagcactttactgctgaattctcaattttcttaacattgagacaataaatgtgtgttttgtcttgtatatggcataaagagtaaataagttttagagttgttctggaaaatgtcagaataagtcagtacttgggttgtgtaatctgctagtccaagcgaacagcaacctcctgctaccctccctctatgaaaatagccatgcagacaagtctctcatctgaagaacaaattagatttagctaattagaattaatcctggctttcattgccatagtctgtaaaagactttggtggctagaccactttatacctttgcagtgtggtctctgggggcaaaaaactaatgaaaacaatctctgtaatggcagataggaggagatgaaaagttctgttgcatggatttttaattctctggctaccacatagtagagaatggaatgaagatttccttttggcttcttaaggttaaaaatattcccatgaacatgaaaattttcaaattttgaatctgaaagccaccaaatgtatctttatgtataaatccttgtaaatgatagattccatgggtgagactttacatattttgggtgggaggctactggcatatatttttaaatgttcatattgcgtagaatctccactaggaagtctttatttgaaatagttgaatcagtgatctagtattttcctttcggcaagatttgttaggtttttaccccttctaaaataagttttattccatctgcaaattgctgcaatattatagtaatcagaaactacataaggaatgttatataggcttgtcagttcccatttttcttgacaacaataaataccacttttaaaaatgacacatatttaaacacttagaaaataaagttaacacttactgaagtgctagtactaaactgtgctagtactaaaagaaaacaggttggaacatacatatagcctagcatttataacagaattgttgaacgtctgtaaatgatttttttttttttggcaaaggaaaaaattgatactggaaaagattgttgtgcatagttattagtcatttgtaaccttgcttaagtatttcttagtccaacatagatattttctttctcctgaccatgtattttaaaatatagtctatttcttgactttgaacttaaagctttaatcataatttctcatgtatacatcgttcttctgatggtaagctggatttgaaggtagtggtttcagtgtttcttaagttggtagctgagggtatcaggcatcagttcatgcaataatacaagaaaaaaaatcctttgcttgccaagaggtagagtgatgtgcatttatctgttttctgttctgtaagtctagaccttcaaaccatttgtaaactaacccctgggaaatttgaaattacctgataacttaagactctgtgatctctggaatcaccatatgtttcttttttgtgtagatattaataacattactctttgactatagtgtgcactctgaaatgtactcagtgaaaatttgttttgagtttcattaatgctatttcaccagttagacataattacttctaccgatgtgaatgatacggatgccggcagagcttccagatctttcagactcaactgctaggtcaattagtttgtcataataaaacttggcagattctacaagtctattatgacaaaccaggaactaattctataatggaaaactatccattctgaataataggtatgtaattatttgctgctgctgctgtgctctgtaaattctgaatatgacatttaaactctgtgcctactaaaggtatcttctggagtttttgggaggagagaaactggaaaattaaattgtatttttgccagaagactcttacttgcatgtgtctcagggtcttcagtttttctataagtttccatatccaaagttcagaattcatgtgaaatacttctttggggcaaaagtccttcattcctggtatttattggattggaaatctgtagcaagatgctgtttaaaattaccatattgtttttttatcttatacttagctctctggctattgaacttccttttcttgtttgaagttagcttcaaatttgctcctatgctaaattacctgtaaatattctggataggaactacttgaaatagtaatttgttaaaagatatgacaaaatgaaaatgcttaaactacagaaatttaaaaatgccataacaatcttgcgagactaactttaaaatatactttaaatgattattatgattttggtggtaacgatcccccacacacaaccactatgaagaaataatgccgcatttttcccccattgtaccaaaaagataaaaaaatggtaaacactgatcaaggtattttgtattgtcaaggcatgcatattctaaagaattaaatgctaacttaacagcactggctttctggctggtcaactatatgaaaccttgttcattcctcaggccatggttaatgaaaagtagaacttaaagtcatgacagggaagattgtacaagtgtgaacattacagtacccggaggaatgaacaaggtttcatatagttgac

SEQ ID NO: 31294 - DNA, 494 bp, Homo sapiens
cgtaaaggcaactttattaagttacaatttacgtgcaacaaaaacattatgcatgtacagtctgattaatttggacaagacatatgcacctgtgtgactatcaccacaaccaaaatgagaatattttcatcacccctcaaaagttattcaagtctcttaatactgggttcccacccatcaacccacagccctaggcagtcattgatctgctcttcattgatctgctctgtgtcactgtggattagataaaatcattcagtatgtactttatttgtgtaaatttgttttgctcagcatagtgtctgagaaacatcacagatgcaatgatgttgcctgaatcatcgcaagacatcgcttgaatcagtagtagtgttccattaaatgaatatgctacggtttgttattctcctattggtgggtacctgggctctttctggtttggggctacccctatgaataaagtgactatgaacgtttgaatataaatctttgtg

SEQ ID NO: 31295 - DNA, 113 bp, Homo sapiens
ctcaggaaaaactctgccttctgtaagtcttctcttttggttcctcatcctaaaatccactctgatttggagtaaatcatgttaattgtgtagaaactgaattgtaggggccc

SEQ ID NO: 31296 - DNA, 458 bp, Homo sapiens
tggaagaactgaggtttgccaatgctaccaatatccaagccaaaaaccacagcccctcctctcggtccactgtccaggtcttactgcctagggactcctgagttagttaacagagcagggaagaagactgactctgccattaattcacgagtggcctggggccaattcctctctgggcctcaactggaaaaacagagaacttgatcaaaacatctccatttccctttgggcctgggggttacaagctatgataaggatttttccatctctaacattctagaattagaatattctatactttcattcctagaagcagagtgagaacagagaacagggaccttcagtccaggaaacagcagaggccagtcagggcttcctagctgcatcctcaaagcctgtccaccttcagaggctttctcttgcgtctgctgcctcaaaggtggttgcttccccactag

SEQ ID NO: 31297 - DNA, 475 bp, Homo sapiens
ctgatattgattatcttaatcatcaagaggatagacggcaggggtggatggaacgtcacgctttttggcattagctagaaaatcgttaattcttttaagccttttcttcccctctgtgcaccaatcctctcttttctcagggcctaaccacttgtggttaccctagatcggtatgttctgtattatgcaacatttccctcttattttggagcctctgtcatttcgttcgttcagataaattaattgaattattgaacacagaccgtgtgctgggccctgacagtagggccgcgagacacagctgccattttgagcctcatggctttgagatgcttaagaaaactgaaaagtcagctgggcgcttcgggtcacgcctgtaatcccagcactttggaaggctgcggaggatggatcacttgaggtcaggagtgtgagaccagcctggccaacatggtgaaacctcatctctactgaa

SEQ ID NO: 31298 - DNA, 461 bp, Homo sapiens
aaggtgagctaaatttaattttccaatcaataaatgtcagtcacatcagtcacaattcagaacaaaaccatgtttttgcttatttattgacttatttttacagacagggctagaatgcagtggcatgaccatacctcactgcagccttgcgctactgtgcttgtagcctcccaagtagctgggactacacgcacacaccaccgcacccagctaatttgttttttttttttttaagagatgggggtcttgtgctttgttgcccaggcggatctcgaattcctagcttcaagagatcctccggcctcacactcccagagtgctgagattataagcgtgagccactgccccttgcctatttttgctttagaatttgtgtatcctgattaaaaatgaaaacagcaccaaacctcccccattctgtggctttcctaatttggggagtaagatgatttcaagtaaca

SEQ ID NO: 31299 - DNA, 1120 bp, Homo sapiens
aagaacaggatattccccttataaaatattaggccccctcccatattgcggggacttccaggcactccccgagagttaggtgaaattgagttacagtgacagctacaggctctaggaaaaattgcacaaacaatctcagcctgggtaaatgagagatgccctgttagcttattctccccagtttaccctttctccccaggtgatcaagtatggattaaagactggaatgtagcttctttgtgcccatggtggataggaccccagattgtcatcctgaccactctcaccgctgtgaaggtagaaggaatcccagcctggatccaccacagccatgtaaaacctgcagcgcctgaaacctgggaggcaagaccaagcccggacaacccttgcagagtgaccttgaagatgatgacaagccctgctccagtcacacccagaagctgactagtccatgcacggccgaagcatgaggaagctcatcgtggaactcatttttcttaaattttggacttgtacagtaaggacttcaactgaccttcctcagactgaggtagggcaaaaagttaaaacagtctttctgtttaaaagggacttgtgtgtataatgccacccagtacaaggtatgcagctcaggaagtgaccagactcaagtgtgctacaacccagtagaactacttaatccccattggaaaacaagagagtatgtaactctaggagtcaatggaattggactggcaggaagacctaggtaatgtaggtggaagtgagaactcccactagtgagtgaggttctcaaaggggagaatgaggagggaagccatttctcttactgtctcctgtctctgaagaacaggaggaagtaaaagttgaaaaacaacaggaaggaagtcagtggcaagaccagccagtgccactgatgacctggcctgaggttaaaaggttaaccacccccctctcctctaaccacatgtgctctcaatccatcacgaccctttcatgtggaaccccttagagttgtaagcccttaaaagggccaggaactctgtcttcggggagctcggctcttaagatgcgagtctgccaacgctcccagccaaataaaaacctcttccttcttcaa

SEQ ID NO: 31300 - DNA, 569 bp, Homo sapiens
taaccttccttccattcaccttgaggctgttcagttattaattacttttcttattagtccattagccccttttcaagcccaatgttgcttgctcctattttggcaatgctaaccattctttcctgcttaaaatgcttcatgacactgtgctttctaagtgtccctttctcctctttggctggttcttttcagtctccttcaggggctgtacttcctttacctgatccctctcagttcttccttcagagttccaaatcctggctccccgttactctcagtaaataccatccctctggttgaacttaacctacgtattcgttctgtttttgttacacaaatatttaatgagcggctattacgtgacgggttctttttaataagcactggggataaaaacatgcatgactgctgcattagtggtctgattggaaagaatgcaaaatgtgcatggaatcatgaaagcatataatgaggtctggcctggctaatgtgatctgggaaggcttgaggatgtaatcaataagttgtcaatgaaaaaaataaataggagttaactaagtaaaatggga

SEQ ID NO: 31301 - DNA, 536 bp, Homo sapiens
tatcccatctaaattagtcaccctccatcacattatcctcttttttcatcaaagtccttacacctgtctggcaatttcttattaattgatttgtttttggtaaactccacgaaaggtgggagtcatttctcttgtttccattctttccacagcacttagaacagtgcctggcacatggtaggtgctcaatatgtgtttactggatgaattaatgagtgcatgctcatgggcaaggatctcattgtgctggaaaagcagcagagtgagacaaaactggacaggtgagtgaaggtcacaccaagaaggttcttagctgccaaactaaagggtttggatcttactctctggagaaaagggtgtagctagtggttttataggagaggagaggcgcgatccgcacttgagaaggtcaatttggccgctgtgtgtaggtcatattacggagaaaaaaactaaaggctttgagacaatccatgatgtaaagggcttagcacagtgcccagcacgcagtaggtctccagcgagtcgttatcacc

SEQ ID NO: 31302 - DNA, 473 bp, Homo sapiens
caggctctgtccctccacttaggtgttaagggactcagtcaaggatgtttacatgtgcctcagagatttttttgggtacccagcagtgtagagttctagaaagttcttttcagtttacaaatgccagttcttttctgctagtctttggcagtgattgaatgtgaattgtgaaatttgattgtggtctcactccaagttctattttatttctggtggagctggaatgttttatctttctcggaaacgatcactttttgtgtgtatggcaacaaaacagctagaataactgtcacttgggctcagcaagtacacaaaagtatgggctgggggcattttaaccaatccatattcatacacaggtaagctattccacttactgcaaactctccagaattgaaatcccagcagatttaatacacaaagcctcttcagtcctagggaaatgagtttttttttaacagactgattattca

SEQ ID NO: 31303 - DNA, 376 bp, Homo sapiens
aggggccaccccagccgcactggttcccagagagtgacctgggtgtgtgagcagggaggccaagctgaccaagagcctcagcacacccccagcacctgctgtgagcaagctgcatggcttccccaagtgtggatgcgatgacatcatgggtatttacagattccttttcactgtgtcccaggctctcctggttcatgtgtgatacactgcacttggggtggaggtgtgctgacagttgtaaagggccgagcctttctttcccgtggctctgatgcacagtttccagataccagtcatgaaggaagttcttgagattatggactttgtcctagtcacatagggctgctaggacaaagtgccatagacttgggggtgg

SEQ ID NO: 31304 - DNA, 440 bp, Homo sapiens
ttttcccatctctaacttcctatctgcaactcaaagttcaccctggagcatcgcatctacagcacagataatccaagccgtgtgttttctgctcaactcttctctcaaacgcaaacttcctatcctgcaaaaagcattacagattgtttatctgtccaaacaagttatgaggctggttataatatactttactaccagctgttttccttaacgtttcactctcctgaagacaatcatttccttcttgtaacagatagagtatttctcaagctcccaatgctgtttgtaccccctattaagcatttccataaacacagcaaattaatcatgaccaaattgggattttctattatttctataaaatctgtatcttctctccctccattctctatctcagagaatggcacgttatccatctaagcattcagtgtctccactag

SEQ ID NO: 31305 - DNA, 372 bp, Homo sapiens
ttccacctgttgattgacagaagataaaagactccagttgtgatgaaaaattaccggggaaattgcagtctctacacaaatgcaatgccttttatgtttgcagcccatgaatggatgtactgctgcttttatgtaaaagacatcaattaccaaaagctcctctagttaaactaaatttgactttgagaattaactgcatttgttctttcaatagatgcttggggaataaagttgtaatgacctttctgggggtgtaaaaaaaatcagatgccagaagattgaaattgaacaaagatgacattcggcctgaaataattgggccatgcatcagcaaacaaaaaacaaaaagcaaaatcagtggcttgagttatt

SEQ ID NO: 31306 - DNA, 415 bp, Homo sapiens
gaatgccatcagtgatcaactcattcatgaaacttgttttggactgtttattttgaaaattttcagcttgataatatctgtgtacttaaagtcttgaaaaagttgccatgttaatattctcttacatattaaatgcatcatctcatttaatcttcacaaaaaacctgactctaggtatacatacgtttttcagtttaatatatgagggattgagggtcagacaggatcaatgatctgactctcgtcccagagctaataaaaaatgacacaaggattttaatccatgtttctctaacacaaaagtcagtgctttccactatccctcccagcatgatgcaggacaagagtaaagggcaatcttagcggaattaaaatcctaaagatccaggggatatgacctacgacgtagctgtag

SEQ ID NO: 31307 - DNA, 382 bp, Homo sapiens
agtttttcactctcccagcacaacccagcaaccaccacatctatgtgatgtacaagagaagagaaagtgaaaagaaacttttcaagagagagtgctgcagcagacctcgcctttgtcctgagggttctcaactggttcttgaatattccagagagaccatagccagattgccttgtgcccaagccaggcttggcttgtagaccagggaagggaaaacaaattacctcccctcctctacccctccctttgggttggaggtatgcctgaacccgtgctctgcaggctgtgtgttgctttaatagaggaattctgattagggagggggacaggaaagggaccaaggaaagtacattggttacaatgctggctaaacaaggcccca

SEQ ID NO: 31308 - DNA, 678 bp, Homo sapiens
aggagttgtctgaaaagtaacacagagagggagggtaagggagttgagtatatttctgaagaagtgattataatggtggaccttatgtgtactcatggatattgacagcgtaattttgaaattaaggagggtttttttttactgattttttcaccatatctctatttatttgaattaaactttgtagttaagtattgtaaattttgttcttttaaaagaatcatataatccctgactgtactctaaaaagaccgaaaaatttataaaatctacaaattcttatttgtatacctgtttcctcactgaccagtcaatgtcagtgtcaatcactttaatgtattttgctggtttagtaagtgtgtgacagtgatgtacgttgttttactttgcttgattatgaatgctagtagtggtgaggcttttatccatgaagactcgctgtctgcattttcccctagaatcagggcataaattctacatgattgcatcaaaatagtttatcttttggataatgagctccattagttgtgtttgtttaacctacatttttttattctgttatttcttcttaattatatttttgggcaactttttagaaatttgcatttaaattggctctattcttttttataatataatctccatgtcttaaatacacagaaatttgtttaatatgag

SEQ ID NO: 31309 - DNA, 702 bp, Homo sapiens
gctgactgatcggctcgttataaataattctcacctattcctaaaagcgggggcctgttgtgcacttgctacctccgtttagagaatattgcacttcaagcccattggatttgaaagtaatagaaatggtctttttaaagccaatattctagaatgagcacttcattaaatcgagacccaccttttacccaaatttagctagactttaatgtgcatcacacatctctaatctgggcttttcctatagcctctttcaaaggacatatttgttcagccttatcagtgaggtattcaatcatgcttcccttgtatcaggcacctcaagggcaggagctaacacaaatgtgcttggtttttaatagctgaaaatatgtctacgtgaggttaactgtatttacccaatgccagatacctgaaagagtgtgaaaaattaaggtaattattaatgtctccaaatagctggatgatggtgtcatatttgcaatgcatagattatgccatcatgtcagatttgggacactttgggaggttgggaatgggatggggatgggtggcagtgaataacatcagacagggtggatacgtaattccaaagttggaattagtgtctctattttaacagcaattcctttacttaacagcaattcttttctgtttatcattttagggaaaactagaaaatacagaaatatatcaagaaga

SEQ ID NO: 31310 - DNA, 2286 bp, Homo sapiens
tggatatgcaaatgataggaggactgaaaatcataatccttcagccgtgatggcgtcaacgtcactattcttggaacaagccatttttaccagagatgtctccaagagcaccagcaaccccagctatctggatctgaagtggatatgctcagagacatcctggcccaccccaaagaagatgctgctgcactcagaagacgccagagctagccaccacccacactgcaagtctggaagctctgcaaggacccagcaaggcagcctgctcagcgaaggctttgtctcctgtggcaggaagagcaacattaagaacaagaaccccgggctggactacccctgagatttaatgaccagagctgagacccccaagaccacaatgactatggagggctgtcattaccctgcctgaccctctaatgcctctcagttcaaggaggccactgagtgaaactgaaggctggttttccttggaagccagcggcccatccacctgctccacttccctgcctcttgcagcctccgctcaaacactgtcgtggcttggcagcactacaaggcagagtgaaaacagatacttctacccacattcctatctcctctcatttacgcagattaaatgctttctttccttgttttacactgctaggattttcatcaccctgttttttctttctctacatcagctacaagaaaaaaaaaaggagttactgagcaactaagaagtcacaactgttttcagttttattaatgagttgttatacttattttatagatagagaattaccattataacattgctccattgcccactcatccattcacgcatctgtccatccgtccatccacccatttgtccactccccaaatggtcatcaattgtctactgtgagccaagcaaagtgctccttactttggactctgaatccagtgctctttctacttcaccatagacacatgccccttgagtataagggagcttgattcattcaacaaatatctgttgtccatctccaatgtactggcatattctaaatgcatccaacaaaaaccaaaatgaaaaaaaagaaaaacccattccttcaaggggattgcattcggactgggggagacagataaaataaaaataatgaagtcaaatatatatgttagtgacatgtgccatgaagaataatgcccaataggtaaatggggcaattaacaaacgtaatgtaaataaattagttccaagaaatcattgactcaccaacagagggaacacaatttggtccatggtaaaatattccttggtattaataatttcttctcctaaagtatttcaggggctgccaagctgctctcctgtttcctcttccttggggctgattgcatcccatgatgtgcccaggttttgagatgctcctcgtgaatgaaaataggactgtctggttcctccatccatagcaagggagcctagacagaaataacttctgtgcatttctccagctacatttagctgaaaatatgtctacgtgaggttaactgtatttacccaatgccagatacctgaaagagtgtgaaaaattaaggtaattattaatgtctccaaatagctggatgatggtgtcatatttgcaatgcatagattatgccatcatgtcagatttgggacactttgggaggttgggaatgggatggggatgggtggcagtgaataacatcagacagggtggatacgtaattccaaagttggaattagtgtctctattttaacagcaattcctttacttaacagcaattcttttctgtttatcattttagggaaaactagaaaatacagaaatatatcaagaagaaaaaaaatttaaaaatgacccaaaatcccaccaaccagagacagctattaatgattgtggtatatttattgtaagtctctttatttctgtcttcatgcaaacacatttttaaagaatggacactggtattatattgtttatacaactctaaatgctgctttttcacttattacaattaggacttttttcatgttaataaatacttcctgaaaacataaatatctaatggttacatcaaaatttattaccttttccttgttgatgaacatttaggttgctttcattttttcttgcttatataaaataaacattcttgaacataaatacatgttaacagctctgaaaattactccatgcccttattctttttctttctttctttctttttttttttttttttttgagacagggtctcactctgtcacccaggctggaatacaatggcatgatctct

SEQ ID NO: 31311 - DNA, 2054 bp, Homo sapiens
tggatatgcaaatgataggaggactgaaaatcataatccttcagccgtgatggcgtcaacgtcactattcttggaacaagccatttttaccagagatgtctccaagagcaccagcaaccccagctatctggatctgaagtggatatgctcagagacatcctggcccaccccaaagaagatgctgctgcactcagaagacgccagagctagccaccacccacactgcaagtctggaagctctgcaaggacccagcaaggcagcctgctcagcgaaggctttgtctcctgtggcaggaagagcaacattaagaacaagaaccccgggctggactacccctgagatttaatgaccagagctgagacccccaagaccacaatgactatggagggctgtcattaccctgcctgaccctctaatgcctctcagttcaaggaggccactgagtgaaactgaaggctggttttccttggaagccagcggcccatccacctgctccacttccctgcctcttgcagcctccgctcaaacactgtcgtggcttggcagcactacaaggcagagtgaaaacagatacttctacccacattcctatctcctctcatttacgcagattaaatgctttctttccttgttttacactgctaggattttcatcaccctgttttttctttctctacatcagctacaagaaaaaaaaaaggagttactgagcaactaagaagtcacaactgttttcagttttattaatgagttgttatacttattttatagatagagaattaccattataacattgctccattgcccactcatccattcacgcatctgtccatccgtccatccacccatttgtccactccccaaatggtcatcaattgtctactgtgagccaagcaaagtgctccttactttggactctgaatccagtgctctttctacttcaccatagacacatgccccttgagtataagggagcttgattcattcaacaaatatctgttgtccatctccaatgtactggcatattctaaatgcatccaacaaaaaccaaaatgaaaaaaaagaaaaacccattccttcaaggggattgcattcggactgggggagacagataaaataaaaataatgaagtcaaatatatatgttagtgacatgtgccatgaagaataatgcccaataggtaaatggggcaattaacaaacgtaatgtaaataaattagttccaagaaatcattgactcaccaacagagggaacacaatttggtccatggtaaaatattccttggtattaataatttcttctcctaaagtatttcaggggctgccaagctgctctcctgtttcctcttccttggggctgattgcatcccatgatgtgcccaggttttgagatgctcctcgtgaatgaaaataggactgtctggttcctccatccatagcaagggagcctagacagaaataacttctgtgcatttctccagctacatttagctgaaaatatgtctacgtgaggttaactgtatttacccaatgccagatacctgaaagagtgtgaaaaattaagggaaaactagaaaatacagaaatatatcaagaagaaaaaaaatttaaaaatgacccaaaatcccaccaaccagagacagctattaatgattgtggtatatttattgtaagtctctttatttctgtcttcatgcaaacacatttttaaagaatggacactggtattatattgtttatacaactctaaatgctgctttttcacttattacaattaggacttttttcatgttaataaatacttcctgaaaacataaatatctaatggttacatcaaaatttattaccttttccttgttgatgaacatttaggttgctttcattttttcttgcttatataaaataaacattcttgaacataaatacatgttaacagctctgaaaattactccatgcccttattctttttctttctttctttctttttttttttttttttttgagacagggtctcactctgtcacccaggctggaatacaatggcatgatctct

SEQ ID NO: 31312 - DNA, 2411 bp, Homo sapiens
tggatatgcaaatgataggaggactgaaaatcataatccttcagccgtgatggcgtcaacgtcactattcttggaacaagccatttttaccagagatgtctccaagagcaccagcaaccccagctatctggatctgaagtggatatgctcagagacatcctggcccaccccaaagaagatgctgctgcactcagaagacgccagagctagccaccacccacactgcaagtctggaagctctgcaaggacccagcaaggcagcctgctcagcgaaggctttgtctcctgtggcaggaagagcaacattaagaacaagaaccccgggctggactacccctgagatttaatgaccagagctgagacccccaagaccacaatgactatggagggctgtcattaccctgcctgaccctctaatgcctctcagttcaaggaggccactgagtgaaactgaaggctggttttccttggaagccagcggcccatccacctgctccacttccctgcctcttgcagcctccgctcaaacactgtcgtggcttggcagcactacaaggcagagtgaaaacagatacttctacccacattcctatctcctctcatttacgcagattaaatgctttctttccttgttttacactgctaggattttcatcaccctgttttttctttctctacatcagctacaagaaaaaaaaaaggagttactgagcaactaagaagtcacaactgttttcagttttattaatgagttgttatacttattttatagatagagaattaccattataacattgctccattgcccactcatccattcacgcatctgtccatccgtccatccacccatttgtccactccccaaatggtcatcaattgtctactgtgagccaagcaaagtgctccttactttggactctgaatccagtgctctttctacttcaccatagacacatgccccttgagtataagggagcttgattcattcaacaaatatctgttgtccatctccaatgtactggcatattctaaatgcatccaacaaaaaccaaaatgaaaaaaaagaaaaacccattccttcaaggggattgcattcggactgggggagacagataaaataaaaataatgaagtcaaatatatatgttagtgacatgtgccatgaagaataatgcccaataggtaaatggggcaattaacaaacgtaatgtaaataaattagttccaagaaatcattgactcaccaacagagggaacacaatttggtccatggtaaaatattccttggtattaataatttcttctcctaaagtatttcaggggctgccaagctgctctcctgtttcctcttccttggggctgattgcatcccatgatgtgcccaggttttgagatgctcctcgtgaatgaaaataggactgtctggttcctccatccatagcaagggagcctagacagaaataacttctgtgcatttctccagctacatttagctgaaaatatgtctacgtgaggttaactgtatttacccaatgccagatacctgaaagagtgtgaaaaattaaggtaattattaatgtctccaaatagctggatgatggtgtcatatttgcaatgcatagattatgccatcatgtcagatttgggacactttgggaggttgggaatgggatggggatgggtggcagtgaataacatcagacagggtggatacgtaattccaaagttggaattagtgtctctattttaacagcaattcctttacttaacagcaattcttttctgtttatcattttagggaaaactagaaaatacagaaatatatcaagaagaaaaaaaatttaaaaatgacccaaaatcccaccaaccagagacagctattaatgattgtggtatatttattgaatttactaaagtcatgctatacgctaggcactgtggagggactgcagaaagacttcaaggactgcaccgtcttgttagaaagatgcctagacaacatttgagaaacgctgatcatgtctgatgacacataactgctaacagttacatggaattttctatatgctatatacaaacatacaaatatatgtatgtatatttactcagctctcacaacagctactactgttattatgaatcctgttttatagtgagaaaactgaaacatggagaggttaagtaatttgcccaagatcacatagctactaagtggtggaactgtgattagaatccaggcattcaggctccagagttcatactcttcacataccacatctatcttgaatataacaatgtagagaaaaagaattatagcaagcatatgtctaggtaagcattttccagaagtgactgtttttttgcattgggtttgtaaactttcaacaataaagcaggttggactttaaaaaa

SEQ ID NO: 31313 - DNA, 1981 bp, Homo sapiens
tggatatgcaaatgataggaggactgaaaatcataatccttcagccgtgatggcgtcaacgtcactattcttggaacaagccatttttaccagagatgtctccaagagcaccagcaaccccagctatctggatctgaagtggatatgctcagagacatcctggcccaccccaaagaagatgctgctgcactcagaagacgccagagctagccaccacccacactgcaagtctggaagctctgcaaggacccagcaaggcagcctgctcagcgaaggctttgtctcctgtggcaggaagagcaacattaagaacaagaaccccgggctggactacccctgagatttaatgaccagagctgagacccccaagaccacaatgactatggagggctgtcattaccctgcctgaccctctaatgcctctcagttcaaggaggccactgagtgaaactgaaggctggttttccttggaagccagcggcccatccacctgctccacttccctgcctcttgcagcctccgctcaaacactgtcgtggcttggcagcactacaaggcagagtgaaaacagatacttctacccacattcctatctcctctcatttacgcagattaaatgctttctttccttgttttacactgctaggattttcatcaccctgttttttctttctctacatcagctacaagaaaaaaaaaaggagttactgagcaactaagaagtcacaactgttttcagttttattaatgagttgttatacttattttatagatagagaattaccattataacattgctccattgcccactcatccattcacgcatctgtccatccgtccatccacccatttgtccactccccaaatggtcatcaattgtctactgtgagccaagcaaagtgctccttactttggactctgaatccagtgctctttctacttcaccatagacacatgccccttgagtataagggagcttgattcattcaacaaatatctgttgtccatctccaatgtactggcatattctaaatgcatccaacaaaaaccaaaatgaaaaaaaagaaaaacccattccttcaaggggattgcattcggactgggggagacagataaaataaaaataatgaagtcaaatatatatgttagtgacatgtgccatgaagaataatgcccaataggtaaatggggcaattaacaaacgtaatgtaaataaattagttccaagaaatcattgactcaccaacagagggaacacaatttggtccatggtaaaatattccttggtattaataatttcttctcctaaagtatttcaggggctgccaagctgctctcctgtttcctcttccttggggctgattgcatcccatgatgtgcccaggttttgagatgctcctcgtgaatgaaaataggactgtctggttcctccatccatagcaagggagcctagacagaaataacttctgtgcatttctccagctacatttagggaaaactagaaaatacagaaatatatcaagaagaaaaaaaatttaaaaatgacccaaaatcccaccaaccagagacagctattaatgattgtggtatatttattgtaagtctctttatttctgtcttcatgcaaacacatttttaaagaatggacactggtattatattgtttatacaactctaaatgctgctttttcacttattacaattaggacttttttcatgttaataaatacttcctgaaaacataaatatctaatggttacatcaaaatttattaccttttccttgttgatgaacatttaggttgctttcattttttcttgcttatataaaataaacattcttgaacataaatacatgttaacagctctgaaaattactccatgcccttattctttttctttctttctttctttttttttttttttttttgagacagggtctcactctgtcacccaggctggaatacaatggcatgatctct

SEQ ID NO: 31314 - DNA, 1976 bp, Homo sapiens
tggatatgcaaatgataggaggactgaaaatcataatccttcagccgtgatggcgtcaacgtcactattcttggaacaagccatttttaccagagatgtctccaagagcaccagcaaccccagctatctggatctgaagtggatatgctcagagacatcctggcccaccccaaagaagatgctgctgcactcagaagacgccagagctagccaccacccacactgcaagtctggaagctctgcaaggacccagcaaggcagcctgctcagcgaaggctttgtctcctgtggcaggaagagcaacattaagaacaagaaccccgggctggactacccctgagatttaatgaccagagctgagacccccaagaccacaatgactatggagggctgtcattaccctgcctgaccctctaatgcctctcagttcaaggaggccactgagtgaaactgaaggctggttttccttggaagccagcggcccatccacctgctccacttccctgcctcttgcagcctccgctcaaacactgtcgtggcttggcagcactacaaggcagagtgaaaacagatacttctacccacattcctatctcctctcatttacgcagattaaatgctttctttccttgttttacactgctaggattttcatcaccctgttttttctttctctacatcagctacaagaaaaaaaaaaggagttactgagcaactaagaagtcacaactgttttcagttttattaatgagttgttatacttattttatagatagagaattaccattataacattgctccattgcccactcatccattcacgcatctgtccatccgtccatccacccatttgtccactccccaaatggtcatcaattgtctactgtgagccaagcaaagtgctccttactttggactctgaatccagtgctctttctacttcaccatagacacatgccccttgagtataagggagcttgattcattcaacaaatatctgttgtccatctccaatgtactggcatattctaaatgcatccaacaaaaaccaaaatgaaaaaaaagaaaaacccattccttcaaggggattgcattcggactgggggagacagataaaataaaaataatgaagtcaaatatatatgttagtgacatgtgccatgaagaataatgcccaatagtatttcaggggctgccaagctgctctcctgtttcctcttccttggggctgattgcatcccatgatgtgcccaggttttgagatgctcctcgtgaatgaaaataggactgtctggttcctccatccatagcaagggagcctagacagaaataacttctgtgcatttctccagctacatttagggaaaactagaaaatacagaaatatatcaagaagaaaaaaaatttaaaaatgacccaaaatcccaccaaccagagacagctattaatgattgtggtatatttattgaatttactaaagtcatgctatacgctaggcactgtggagggactgcagaaagacttcaaggactgcaccgtcttgttagaaagatgcctagacaacatttgagaaacgctgatcatgtctgatgacacataactgctaacagttacatggaattttctatatgctatatacaaacatacaaatatatgtatgtatatttactcagctctcacaacagctactactgttattatgaatcctgttttatagtgagaaaactgaaacatggagaggttaagtaatttgcccaagatcacatagctactaagtggtggaactgtgattagaatccaggcattcaggctccagagttcatactcttcacataccacatctatcttgaatataacaatgtagagaaaaagaattatagcaagcatatgtctaggtaagcattttccagaagtgactgtttttttgcattgggtttgtaaactttcaacaataaagcaggttggactttaaaaaa

SEQ ID NO: 31315 - DNA, 772 bp, Homo sapiens
tggatatgcaaatgataggaggactgaaaatcataatccttcagccgtgatggcgtcaacgtcactattcttggaacaagccatttttaccagagatgtctccaagagcaccagcaaccccagctatctggatctgaagtggatatgctcagagacatcctggcccaccccaaagaagatgctgctgcactcagaagacgccagagctagccaccacccacactgcaagtctggaagctctgcaaggacccagcaaggcagcctgctcagcgaaggctttgtctcctgtggcaggaagagcaacattaagaacaagaaccccgggctggactacccctgagatttaatgaccagagctgagacccccaagaccacaatgactatggagggctgtcattaccctgcctgaccctctaatgcctctcagttcaaggaggccactgagtgaaactgaaggctggttttccttggaagccagcggcccatccacctgctccacttccctgcctcttgcagcctccgctcaaacactgtcgtggcttggcagcactacaagtatttcaggggctgccaagctgctctcctgtttcctcttccttggggctgattgcatcccatgatgtgcccaggttttgagatgctcctcgtgaatgaaaataggactgtctggttcctccatccatagcaagggagcctagacagaaataacttctgtgcatttctccagctacatttagggaaaactagaaaatacagaaatatatcaagaaga

SEQ ID NO: 31316 - DNA, 1156 bp, Homo sapiens
gctgactgatcggctcgttataaataattctcacctattcctaaaagcgggggcctgttgtgcacttgctacctccgtttagagaatattgcacttcaagcccattggatttgaaagtaatagaaatggtctttttaaagccaatattctagaatgagcacttcattaaatcgagacccaccttttacccaaatttagctagactttaatgtgcatcacacatctctaatctgggcttttcctatagcctctttcaaaggacatatttgttcagccttatcagtgaggtattcaatcatgcttcccttgtatcaggcacctcaagggcaggagctaacacaaatgtgcttggtttttaatagctgaaaatatgtctacgtgaggttaactgtatttacccaatgccagatacctgaaagagtgtgaaaaattaaggtaattattaatgtctccaaatagctggatgatggtgtcatatttgcaatgcatagattatgccatcatgtcagatttgggacactttgggaggttgggaatgggatggggatgggtggcagtgaataacatcagacagggtggatacgtaattccaaagttggaattagtgtctctattttaacagcaattcctttacttaacagcaattcttttctgtttatcattttagggaaaactagaaaatacagaaatatatcaagaagaaaaaaaatttaaaaatgacccaaaatcccaccaaccagagacagctattaatgattgtggtatatttattgtaagtctctttatttctgtcttcatgcaaacacatttttaaagaatggacactggtattatattgtttatacaactctaaatgctgctttttcacttattacaattaggacttttttcatgttaataaatacttcctgaaaacataaatatctaatggttacatcaaaatttattaccttttccttgttgatgaacatttaggttgctttcattttttcttgcttatataaaataaacattcttgaacataaatacatgttaacagctctgaaaattactccatgcccttattctttttctttctttctttctttttttttttttttttttgagacagggtctcactctgtcacccaggctggaatacaatggcatgatctct

SEQ ID NO: 31317 - DNA, 212 bp, Homo sapiens
ttcagtgagtccacagttttggttttacaagatgaaaaaattctagagatctgttgcataacaatgtgaacatattaacactactgaactgtatggttaagatgataacttttatgttacgtggtttttttaaccacattaaaaaaaaccctaaaaagacacaacatacaaatgcaacatatgaaccttgatcaactcctcgtttaaaaata

SEQ ID NO: 31318 - DNA, 270 bp, Homo sapiens
  misc_feature (21)..(21): n is a, c, g, or t
  misc_feature (24)..(24): n is a, c, g, or t
agaccacccgtatccgccagngantccaagagctcaaggccagtcctaagattttccaaaagaccaagtgcagcatctgtaacagtgccttggagttgccctcagtccacttcctgtgtggccactccttccaccaacactgctttgagagttactcggaaagtgatgctgactgccccacctgcctccctgaaaaccggaaggtcatggatatgatccgggcccaggaacagaaacgagatctccatgatcaatccagcatcaggtggg

SEQ ID NO: 31319 - DNA, 305 bp, Homo sapiens
atataatggaagtttgtgataattccttagcagtaatgtaaaattattaagttttggccaggcgctgtggctcacgcctgtaatcctagcactttgggaggccaaggcaggcagatcacctgaggtcaggagttcaagaccagcctggccaacatggtgaaaccctgtctctactaaaaatacaaaaaagtagccgggcgtggtggcatgtccctgtaatctcagctacccgggaggctcaggcaggagaatcgctggaacccaggaggcagaggctgccgttagctgagatcgtgctcctgcac

SEQ ID NO: 31320 - DNA, 3313 bp, Homo sapiens
  misc_feature (1714)..(1714): n is a, c, g, or t
ttagggacagcaaaaagtttccaattactgccaactcctagtgatcgacctggaatgtgtttcaaacagctgctcatgtagctataccctctttctcccatttcatcctaagcatttgcctcagaagcataaaatctcttgagagttgtatccagagttaccaagctctcagctatcaaatctgcttcagtctcattttcttcttgtaaattagtcatttgaacccccaaactgacagaataggagactaaagcccaaaaaggggaagggctggcctatgggcagttgcactctgtagaccccaggctactgcttaccagccaagcattctaccttcttacggctgcaactgttaaaggctacttaggcctttctattggatgaaggagcatgcagttacgtgtatattcactgagcaaaatacttgattgtagaatccatgaaatttttttttttttaatttcaagaagaggccttcacagtctctcaagtatgggatggctgtggacaaatactgccaattcagctaactgctgcctggatgttgctttgagtttgatttttgctccatacttaactaaaacaactagcattcacgtagacatgttaaaatactttccccttccccaacagtggttccttccacagacagtgactaatggttttttcttttggggagagggtggcatacaacatagaggcttgaaccaaaggcctctgcaatgttgtcacactcatgaggatgaatggtcctttccgcctacacacagaggggcaagggcttcaagctctttctttccttgactgtgttatcagctttacaaattaacaccatgctagtttgatcctgctagaagtacaggaaggcagaaatggaggattaggagaattactcatcttttggatgaacagtttccaaatcccatttggcacatcactctagactggtaaaggggaggctgacactgaggccacagacccaactggctctaggacatcacgttgttcagtcctttgcttatctaatcatttgtgttcttacccagtgctcactaggtcacccacatagccacttcccctcccagcaaaagttcccagtttaggcacctgtctgggatcatccagtatccaagcttaggggtgaagggagggagcagagaactagtctcaactggttcgttggtatataggtctcttctcaatgttcctaaagtgcatgcagtggcatccccctcaaggcctggctccatgattctgagaggactagaatcaggacagtcagatctgtggtcacatcctgcccaattccagctctgaggtccatcaaaccatctgcttctcccttggcaagaagctccctctgtctgactggcagcagggtcagtggccatccttttctaccttcagctgttgtgcatctcctccacgttttcctggagtaaaggaacaagcaggttcttatccaaatacccaacctgtgaagatgagacggcccttgggaagaggtattagccaagttttcagtatgatgcccggcagaaagaatttgttgtctttgtcttaagcttattatcctcccaggtcataggaagatctaaagtccaatcagtctccttactcagaattcacagctttcccctcaaacttaaaatgcccatgtcatttcacgagtacccataactacccatcgtttagatacatgtcctcccttggnctagaaatctgcagcagttcctacttaaactgatggatgctttgggctttggaggtatctcatccctatgcctgttgccctgaagctgccggaaggaaaggccccactcaactactgggaagaaagcccataattcaaggcttttaatacagtcactacacaagctctccctctgatttaggagatcttgttacctcctcatctacatgtgcttaaaaacaaaaagaaacctataattattcaattcacctgtggtccaaataagtctcacatccagccattcccctgagagggcaggaggccagactttgaactttccacagctgggtcttcattttactagtgagataaagaggtgcagattagggtgacagtccatctaagcaagtggacgatctggggaactgtaggccttgctgaagcatcctcccacagaaaggagataagggccttatccaattggctgtacacaatagatcagtgcttctttcctagacaaggctgaaaggggccaacattatttctgaagacttcattattggaattctatgggagtgatctcactgagctattttggaatagaaatgtggctagttgcctgacctccctcaatggtttcacgtggctttcaaagggaaggaagggcagtgctgacttttggtaaaatgggcgaaagggtccatgccagcaacacaatcactcaaagtccagatgagggatcagtaaatacaacgtgcctgaaaggtggcccttgagcacattcctccggtagacattaacttattaaattgattctgattacaaatataaactttgcccccatctcacccagtaacaatgcaagagttgatgtcagtctataaaaggaagtaggaactgtccctggctttcaggctccaacatcctccccctgtcaagatgtggcacctcaaactttgtgcagtcctcatgatcttcctgttgctgttgggccaggtaaggagggaaggatacttatgtgtgtgtgtggagtgtggagatgatagtggtggtggaacttgaaagctagattcagtcctgaggaatggttcctctgttctgagtctacagcatctgcggaatggaatgatcactcttccaaggtgtgcagcagggtgtcaacactttcatatctgaatgtctttgcccttacagatagatggctccccaataccagaagtgagttcggcaaagagaaggccacggagaatgaccccattttggagaggggtttccctcaggcctattggagcctcctgccgggatgattctgagtgtatcacaaggctatgcagaaaaagacgctgttccttaagtgtggcccaggaatgatgtacataccagggaaagaaaggacagcagtcacctccgacaatgctccgttctatggaatattgattaactgcattttggctggagacacccaagtgaagcaatcttgtatttttaatatttaaaggcagatgtacgctttaaattggtctccatttcttcttagaatgttgatatatggataagcataactaaacttgtcaatttagagtttatttttctatggatactattaaatgtctcaaattg

SEQ ID NO: 31321 - DNA, 3254 bp, Homo sapiens
  misc_feature (1714)..(1714): n is a, c, g, or t
ttagggacagcaaaaagtttccaattactgccaactcctagtgatcgacctggaatgtgtttcaaacagctgctcatgtagctataccctctttctcccatttcatcctaagcatttgcctcagaagcataaaatctcttgagagttgtatccagagttaccaagctctcagctatcaaatctgcttcagtctcattttcttcttgtaaattagtcatttgaacccccaaactgacagaataggagactaaagcccaaaaaggggaagggctggcctatgggcagttgcactctgtagaccccaggctactgcttaccagccaagcattctaccttcttacggctgcaactgttaaaggctacttaggcctttctattggatgaaggagcatgcagttacgtgtatattcactgagcaaaatacttgattgtagaatccatgaaatttttttttttttaatttcaagaagaggccttcacagtctctcaagtatgggatggctgtggacaaatactgccaattcagctaactgctgcctggatgttgctttgagtttgatttttgctccatacttaactaaaacaactagcattcacgtagacatgttaaaatactttccccttccccaacagtggttccttccacagacagtgactaatggttttttcttttggggagagggtggcatacaacatagaggcttgaaccaaaggcctctgcaatgttgtcacactcatgaggatgaatggtcctttccgcctacacacagaggggcaagggcttcaagctctttctttccttgactgtgttatcagctttacaaattaacaccatgctagtttgatcctgctagaagtacaggaaggcagaaatggaggattaggagaattactcatcttttggatgaacagtttccaaatcccatttggcacatcactctagactggtaaaggggaggctgacactgaggccacagacccaactggctctaggacatcacgttgttcagtcctttgcttatctaatcatttgtgttcttacccagtgctcactaggtcacccacatagccacttcccctcccagcaaaagttcccagtttaggcacctgtctgggatcatccagtatccaagcttaggggtgaagggagggagcagagaactagtctcaactggttcgttggtatataggtctcttctcaatgttcctaaagtgcatgcagtggcatccccctcaaggcctggctccatgattctgagaggactagaatcaggacagtcagatctgtggtcacatcctgcccaattccagctctgaggtccatcaaaccatctgcttctcccttggcaagaagctccctctgtctgactggcagcagggtcagtggccatccttttctaccttcagctgttgtgcatctcctccacgttttcctggagtaaaggaacaagcaggttcttatccaaatacccaacctgtgaagatgagacggcccttgggaagaggtattagccaagttttcagtatgatgcccggcagaaagaatttgttgtctttgtcttaagcttattatcctcccaggtcataggaagatctaaagtccaatcagtctccttactcagaattcacagctttcccctcaaacttaaaatgcccatgtcatttcacgagtacccataactacccatcgtttagatacatgtcctcccttggnctagaaatctgcagcagttcctacttaaactgatggatgctttgggctttggaggtatctcatccctatgcctgttgccctgaagctgccggaaggaaaggccccactcaactactgggaagaaagcccataattcaaggcttttaatacagtcactacacaagctctccctctgatttaggagatcttgttacctcctcatctacatgtgcttaaaaacaaaaagaaacctataattattcaattcacctgtggtccaaataagtctcacatccagccattcccctgagagggcaggaggccagactttgaactttccacagctgggtcttcattttactagtgagataaagaggtgcagattagggtgacagtccatctaagcaagtggacgatctggggaactgtaggccttgctgaagcatcctcccacagaaaggagataagggccttatccaattggctgtacacaatagatcagtgcttctttcctagacaaggctgaaaggggccaacattatttctgaagacttcattattggaattctatgggagtgatctcactgagctattttggaatagaaatgtggctagttgcctgacctccctcaatggtttcacgtggctttcaaagggaaggaagggcagtgctgacttttggtaaaatgggcgaaagggtccatgccagcaacacaatcactcaaagtccagatgagggatcagtaaatacaacgtgcctgaaaggtggcccttgagcacattcctccggtagacattaacttattaaattgattctgattacaaatataaactttgcccccatctcacccagtaacaatgcaagagttgatgtcagtctataaaaggaagtaggaactgtccctggctttcaggctccaacatcctccccctgtcaagatgtggcacctcaaactttgtgcagtcctcatgatcttcctgttgctgttgggccaggtaaggagggaaggatacttatgtgtgtgtgtggagtgtggagatgatagtggtggtggaacttgaaagctagattcagtcctgaggaatggttcctctgttctgagtctacagcatctgcggaatggaatgatcactcttccaaggtgtgcagcagggtgtcaacactttcatatctgaatgtctttgcccttacagatagatggctccccaataccagaagtgagttcggcaaagagaaggccacggagaatgaccccattttggagaggggtttccctcaggcctattggagcctcctgccgggatgattctgagtgtatcacaaggctatgcaggtactccctgaacctgggagcagggttgggccagagagccctgggaagctgggcagaggagtgacaaggggacacatgaacctaagaataaagctgggatggaggagttctagactgagactgggagctccatggaaaatcccttaggagttaggagccaagaacagctctatgtgggtaccatgaaagaaggaaggaaatgcagcataggtggccctggtcattcc

SEQ ID NO: 31322 - DNA, 3597 bp, Homo sapiens
  misc_feature (1714)..(1714): n is a, c, g, or t
ttagggacagcaaaaagtttccaattactgccaactcctagtgatcgacctggaatgtgtttcaaacagctgctcatgtagctataccctctttctcccatttcatcctaagcatttgcctcagaagcataaaatctcttgagagttgtatccagagttaccaagctctcagctatcaaatctgcttcagtctcattttcttcttgtaaattagtcatttgaacccccaaactgacagaataggagactaaagcccaaaaaggggaagggctggcctatgggcagttgcactctgtagaccccaggctactgcttaccagccaagcattctaccttcttacggctgcaactgttaaaggctacttaggcctttctattggatgaaggagcatgcagttacgtgtatattcactgagcaaaatacttgattgtagaatccatgaaatttttttttttttaatttcaagaagaggccttcacagtctctcaagtatgggatggctgtggacaaatactgccaattcagctaactgctgcctggatgttgctttgagtttgatttttgctccatacttaactaaaacaactagcattcacgtagacatgttaaaatactttccccttccccaacagtggttccttccacagacagtgactaatggttttttcttttggggagagggtggcatacaacatagaggcttgaaccaaaggcctctgcaatgttgtcacactcatgaggatgaatggtcctttccgcctacacacagaggggcaagggcttcaagctctttctttccttgactgtgttatcagctttacaaattaacaccatgctagtttgatcctgctagaagtacaggaaggcagaaatggaggattaggagaattactcatcttttggatgaacagtttccaaatcccatttggcacatcactctagactggtaaaggggaggctgacactgaggccacagacccaactggctctaggacatcacgttgttcagtcctttgcttatctaatcatttgtgttcttacccagtgctcactaggtcacccacatagccacttcccctcccagcaaaagttcccagtttaggcacctgtctgggatcatccagtatccaagcttaggggtgaagggagggagcagagaactagtctcaactggttcgttggtatataggtctcttctcaatgttcctaaagtgcatgcagtggcatccccctcaaggcctggctccatgattctgagaggactagaatcaggacagtcagatctgtggtcacatcctgcccaattccagctctgaggtccatcaaaccatctgcttctcccttggcaagaagctccctctgtctgactggcagcagggtcagtggccatccttttctaccttcagctgttgtgcatctcctccacgttttcctggagtaaaggaacaagcaggttcttatccaaatacccaacctgtgaagatgagacggcccttgggaagaggtattagccaagttttcagtatgatgcccggcagaaagaatttgttgtctttgtcttaagcttattatcctcccaggtcataggaagatctaaagtccaatcagtctccttactcagaattcacagctttcccctcaaacttaaaatgcccatgtcatttcacgagtacccataactacccatcgtttagatacatgtcctcccttggnctagaaatctgcagcagttcctacttaaactgatggatgctttgggctttggaggtatctcatccctatgcctgttgccctgaagctgccggaaggaaaggccccactcaactactgggaagaaagcccataattcaaggcttttaatacagtcactacacaagctctccctctgatttaggagatcttgttacctcctcatctacatgtgcttaaaaacaaaaagaaacctataattattcaattcacctgtggtccaaataagtctcacatccagccattcccctgagagggcaggaggccagactttgaactttccacagctgggtcttcattttactagtgagataaagaggtgcagattagggtgacagtccatctaagcaagtggacgatctggggaactgtaggccttgctgaagcatcctcccacagaaaggagataagggccttatccaattggctgtacacaatagatcagtgcttctttcctagacaaggctgaaaggggccaacattatttctgaagacttcattattggaattctatgggagtgatctcactgagctattttggaatagaaatgtggctagttgcctgacctccctcaatggtttcacgtggctttcaaagggaaggaagggcagtgctgacttttggtaaaatgggcgaaagggtccatgccagcaacacaatcactcaaagtccagatgagggatcagtaaatacaacgtgcctgaaaggtggcccttgagcacattcctccggtagacattaacttattaaattgattctgattacaaatataaactttgcccccatctcacccagtaacaatgcaagagttgatgtcagtctataaaaggaagtaggaactgtccctggctttcaggctccaacatcctccccctgtcaagatgtggcacctcaaactttgtgcagtcctcatgatcttcctgttgctgttgggccaggtaaggagggaaggatacttatgtgtgtgtgtggagtgtggagatgatagtggtggtggaacttgaaagctagattcagtcctgaggaatggttcctctgttctgagtctacagcatctgcggaatggaatgatcactcttccaaggtgtgcagcagggtgtcaacactttcatatctgaatgtctttgcccttacagatagatggctccccaataccagaagtgagttcggcaaagagaaggccacggagaatgaccccattttggagaggggtttccctcaggcctattggagcctcctgccgggatgattctgagtgtatcacaaggctatgcagaaaaagacgctgttccttaagtgtggcccaggaatgatgtacataccagggaaagaaaggacagcagtcacctccgacaatgctccgttctatggaatattgattaactgcattttggctggagacacccaagtgaagcaatcttgtatttttaatatttaaaggcagatgtacgctttaaattggtctccatttcttcttagaatgttgatatatggataagcataactaaacttgtcaatttagagtttatttttctatggatactattaaatgtctcaaattgaaattttagcagtctggaattcaagcttttgagggaaagaaggattcattttgtatactaaagaaaagctacataatcaatagctacgtaatcaacttcagcaagttcctaagctgtggccctggatcccttcactccatactcttcagggaggtgtcaaaggtggtcaagcttgggaggctgaggcaggagaatcacttgaacctgggaggtggaggttgcagtgagccaagatcatgccactgcaccccagcctgggtgacatagagagactctgtctcaaa

SEQ ID NO: 31323 - DNA, 3651 bp, Homo sapiens
  misc_feature (1714)..(1714): n is a, c, g, or t
ttagggacagcaaaaagtttccaattactgccaactcctagtgatcgacctggaatgtgtttcaaacagctgctcatgtagctataccctctttctcccatttcatcctaagcatttgcctcagaagcataaaatctcttgagagttgtatccagagttaccaagctctcagctatcaaatctgcttcagtctcattttcttcttgtaaattagtcatttgaacccccaaactgacagaataggagactaaagcccaaaaaggggaagggctggcctatgggcagttgcactctgtagaccccaggctactgcttaccagccaagcattctaccttcttacggctgcaactgttaaaggctacttaggcctttctattggatgaaggagcatgcagttacgtgtatattcactgagcaaaatacttgattgtagaatccatgaaatttttttttttttaatttcaagaagaggccttcacagtctctcaagtatgggatggctgtggacaaatactgccaattcagctaactgctgcctggatgttgctttgagtttgatttttgctccatacttaactaaaacaactagcattcacgtagacatgttaaaatactttccccttccccaacagtggttccttccacagacagtgactaatggttttttcttttggggagagggtggcatacaacatagaggcttgaaccaaaggcctctgcaatgttgtcacactcatgaggatgaatggtcctttccgcctacacacagaggggcaagggcttcaagctctttctttccttgactgtgttatcagctttacaaattaacaccatgctagtttgatcctgctagaagtacaggaaggcagaaatggaggattaggagaattactcatcttttggatgaacagtttccaaatcccatttggcacatcactctagactggtaaaggggaggctgacactgaggccacagacccaactggctctaggacatcacgttgttcagtcctttgcttatctaatcatttgtgttcttacccagtgctcactaggtcacccacatagccacttcccctcccagcaaaagttcccagtttaggcacctgtctgggatcatccagtatccaagcttaggggtgaagggagggagcagagaactagtctcaactggttcgttggtatataggtctcttctcaatgttcctaaagtgcatgcagtggcatccccctcaaggcctggctccatgattctgagaggactagaatcaggacagtcagatctgtggtcacatcctgcccaattccagctctgaggtccatcaaaccatctgcttctcccttggcaagaagctccctctgtctgactggcagcagggtcagtggccatccttttctaccttcagctgttgtgcatctcctccacgttttcctggagtaaaggaacaagcaggttcttatccaaatacccaacctgtgaagatgagacggcccttgggaagaggtattagccaagttttcagtatgatgcccggcagaaagaatttgttgtctttgtcttaagcttattatcctcccaggtcataggaagatctaaagtccaatcagtctccttactcagaattcacagctttcccctcaaacttaaaatgcccatgtcatttcacgagtacccataactacccatcgtttagatacatgtcctcccttggnctagaaatctgcagcagttcctacttaaactgatggatgctttgggctttggaggtatctcatccctatgcctgttgccctgaagctgccggaaggaaaggccccactcaactactgggaagaaagcccataattcaaggcttttaatacagtcactacacaagctctccctctgatttaggagatcttgttacctcctcatctacatgtgcttaaaaacaaaaagaaacctataattattcaattcacctgtggtccaaataagtctcacatccagccattcccctgagagggcaggaggccagactttgaactttccacagctgggtcttcattttactagtgagataaagaggtgcagattagggtgacagtccatctaagcaagtggacgatctggggaactgtaggccttgctgaagcatcctcccacagaaaggagataagggccttatccaattggctgtacacaatagatcagtgcttctttcctagacaaggctgaaaggggccaacattatttctgaagacttcattattggaattctatgggagtgatctcactgagctattttggaatagaaatgtggctagttgcctgacctccctcaatggtttcacgtggctttcaaagggaaggaagggcagtgctgacttttggtaaaatgggcgaaagggtccatgccagcaacacaatcactcaaagtccagatgagggatcagtaaatacaacgtgcctgaaaggtggcccttgagcacattcctccggtagacattaacttattaaattgattctgattacaaatataaactttgcccccatctcacccagtaacaatgcaagagttgatgtcagtctataaaaggaagtaggaactgtccctggctttcaggctccaacatcctccccctgtcaagatgtggcacctcaaactttgtgcagtcctcatgatcttcctgttgctgttgggccaggtaaggagggaaggatacttatgtgtgtgtgtggagtgtggagatgatagtggtggtggaacttgaaagctagattcagtcctgaggaatggttcctctgttctgagtctacagcatctgcggaatggaatgatcactcttccaaggtgtgcagcagggtgtcaacactttcatatctgaatgtctttgcccttacagatagatggctccccaataccagaagtgagttcggcaaagagaaggccacggagaatgaccccattttggagaggggtttccctcaggcctattggagcctcctgccgggatgattctgagtgtatcacaaggctatgcagaaaaagacgctgttccttaagtgtggcccaggaatgatgtacataccagggaaagaaaggacagcagtcacctccgacaatgctccgttctatggaatattgattaactgcattttggctggagacacccaagtgaagcaatcttgtatttttaatatttaaaggcagatgtacgctttaaattggtctccatttcttcttagaatgttgatatatggataagcataactaaacttgtcaatttagagtttatttttctatggatactattaaatgtctcaaattgaaattttagcagtctggaattcaagcttttgagggaaagaaggattcattttgtatactaaagaaaaaaacagcattgcccaataatgtgttaacttctcaatctggaaagtgtagtgagagctacataatcaatagctacgtaatcaacttcagcaagttcctaagctgtggccctggatcccttcactccatactcttcagggaggtgtcaaaggtggtcaagcttgggaggctgaggcaggagaatcacttgaacctgggaggtggaggttgcagtgagccaagatcatgccactgcaccccagcctgggtgacatagagagactctgtctcaaa

SEQ ID NO: 31324 - DNA, 3715 bp, Homo sapiens
  misc_feature (1714)..(1714): n is a, c, g, or t
ttagggacagcaaaaagtttccaattactgccaactcctagtgatcgacctggaatgtgtttcaaacagctgctcatgtagctataccctctttctcccatttcatcctaagcatttgcctcagaagcataaaatctcttgagagttgtatccagagttaccaagctctcagctatcaaatctgcttcagtctcattttcttcttgtaaattagtcatttgaacccccaaactgacagaataggagactaaagcccaaaaaggggaagggctggcctatgggcagttgcactctgtagaccccaggctactgcttaccagccaagcattctaccttcttacggctgcaactgttaaaggctacttaggcctttctattggatgaaggagcatgcagttacgtgtatattcactgagcaaaatacttgattgtagaatccatgaaatttttttttttttaatttcaagaagaggccttcacagtctctcaagtatgggatggctgtggacaaatactgccaattcagctaactgctgcctggatgttgctttgagtttgatttttgctccatacttaactaaaacaactagcattcacgtagacatgttaaaatactttccccttccccaacagtggttccttccacagacagtgactaatggttttttcttttggggagagggtggcatacaacatagaggcttgaaccaaaggcctctgcaatgttgtcacactcatgaggatgaatggtcctttccgcctacacacagaggggcaagggcttcaagctctttctttccttgactgtgttatcagctttacaaattaacaccatgctagtttgatcctgctagaagtacaggaaggcagaaatggaggattaggagaattactcatcttttggatgaacagtttccaaatcccatttggcacatcactctagactggtaaaggggaggctgacactgaggccacagacccaactggctctaggacatcacgttgttcagtcctttgcttatctaatcatttgtgttcttacccagtgctcactaggtcacccacatagccacttcccctcccagcaaaagttcccagtttaggcacctgtctgggatcatccagtatccaagcttaggggtgaagggagggagcagagaactagtctcaactggttcgttggtatataggtctcttctcaatgttcctaaagtgcatgcagtggcatccccctcaaggcctggctccatgattctgagaggactagaatcaggacagtcagatctgtggtcacatcctgcccaattccagctctgaggtccatcaaaccatctgcttctcccttggcaagaagctccctctgtctgactggcagcagggtcagtggccatccttttctaccttcagctgttgtgcatctcctccacgttttcctggagtaaaggaacaagcaggttcttatccaaatacccaacctgtgaagatgagacggcccttgggaagaggtattagccaagttttcagtatgatgcccggcagaaagaatttgttgtctttgtcttaagcttattatcctcccaggtcataggaagatctaaagtccaatcagtctccttactcagaattcacagctttcccctcaaacttaaaatgcccatgtcatttcacgagtacccataactacccatcgtttagatacatgtcctcccttggnctagaaatctgcagcagttcctacttaaactgatggatgctttgggctttggaggtatctcatccctatgcctgttgccctgaagctgccggaaggaaaggccccactcaactactgggaagaaagcccataattcaaggcttttaatacagtcactacacaagctctccctctgatttaggagatcttgttacctcctcatctacatgtgcttaaaaacaaaaagaaacctataattattcaattcacctgtggtccaaataagtctcacatccagccattcccctgagagggcaggaggccagactttgaactttccacagctgggtcttcattttactagtgagataaagaggtgcagattagggtgacagtccatctaagcaagtggacgatctggggaactgtaggccttgctgaagcatcctcccacagaaaggagataagggccttatccaattggctgtacacaatagatcagtgcttctttcctagacaaggctgaaaggggccaacattatttctgaagacttcattattggaattctatgggagtgatctcactgagctattttggaatagaaatgtggctagttgcctgacctccctcaatggtttcacgtggctttcaaagggaaggaagggcagtgctgacttttggtaaaatgggcgaaagggtccatgccagcaacacaatcactcaaagtccagatgagggatcagtaaatacaacgtgcctgaaaggtggcccttgagcacattcctccggtagacattaacttattaaattgattctgattacaaatataaactttgcccccatctcacccagtaacaatgcaagagttgatgtcagtctataaaaggaagtaggaactgtccctggctttcaggctccaacatcctccccctgtcaagatgtggcacctcaaactttgtgcagtcctcatgatcttcctgttgctgttgggccaggtaaggagggaaggatacttatgtgtgtgtgtggagtgtggagatgatagtggtggtggaacttgaaagctagattcagtcctgaggaatggttcctctgttctgagtctacagcatctgcggaatggaatgatcactcttccaaggtgtgcagcagggtgtcaacactttcatatctgaatgtctttgcccttacagatagatggctccccaataccagaagtgagttcggcaaagagaaggccacggagaatgaccccattttggagaggggtttccctcaggcctattggagcctcctgccgggatgattctgagtgtatcacaaggctatgcagaaaaagacgctgttccttaagtgtggcccaggaatgatgtacataccagggaaagaaaggacagcagtcacctccgacaatgctccgttctatggaatattgattaactgcattttggctggagacacccaagtgaagcaatcttgtatttttaatatttaaaggcagatgtacgctttaaattggtctccatttcttcttagaatgttgatatatggataagcataactaaacttgtcaatttagagtttatttttctatggatactattaaatgtctcaaattgaaattttagcagtctggaattcaagcttttgagggaaagaaggattcattttgtatactaaagaaaaaaacagcattgcccaataatgtgttaacttctcaatctggaaagtgtagtgagagctacataatcaatagctacgtaatcaacttcagcaagttcctaagctgtggccctggatcccttcactccatactcttcagggaggtgtcaaaggtggtcaagcttgggaggctgaggcaggagaatcacttgaacctgggaggtggaggttgcagtgagccaagatcatgccactgcaccctggttcctggttcagcggtctgctgctcagccaatataaatacactctgacttggtatcactcgcttgcttccgagtgtgaattcaagtggagcacaa

SEQ ID NO: 31325 - DNA, 3398 bp, Homo sapiens
  misc_feature (1714)..(1714): n is a, c, g, or t
ttagggacagcaaaaagtttccaattactgccaactcctagtgatcgacctggaatgtgtttcaaacagctgctcatgtagctataccctctttctcccatttcatcctaagcatttgcctcagaagcataaaatctcttgagagttgtatccagagttaccaagctctcagctatcaaatctgcttcagtctcattttcttcttgtaaattagtcatttgaacccccaaactgacagaataggagactaaagcccaaaaaggggaagggctggcctatgggcagttgcactctgtagaccccaggctactgcttaccagccaagcattctaccttcttacggctgcaactgttaaaggctacttaggcctttctattggatgaaggagcatgcagttacgtgtatattcactgagcaaaatacttgattgtagaatccatgaaatttttttttttttaatttcaagaagaggccttcacagtctctcaagtatgggatggctgtggacaaatactgccaattcagctaactgctgcctggatgttgctttgagtttgatttttgctccatacttaactaaaacaactagcattcacgtagacatgttaaaatactttccccttccccaacagtggttccttccacagacagtgactaatggttttttcttttggggagagggtggcatacaacatagaggcttgaaccaaaggcctctgcaatgttgtcacactcatgaggatgaatggtcctttccgcctacacacagaggggcaagggcttcaagctctttctttccttgactgtgttatcagctttacaaattaacaccatgctagtttgatcctgctagaagtacaggaaggcagaaatggaggattaggagaattactcatcttttggatgaacagtttccaaatcccatttggcacatcactctagactggtaaaggggaggctgacactgaggccacagacccaactggctctaggacatcacgttgttcagtcctttgcttatctaatcatttgtgttcttacccagtgctcactaggtcacccacatagccacttcccctcccagcaaaagttcccagtttaggcacctgtctgggatcatccagtatccaagcttaggggtgaagggagggagcagagaactagtctcaactggttcgttggtatataggtctcttctcaatgttcctaaagtgcatgcagtggcatccccctcaaggcctggctccatgattctgagaggactagaatcaggacagtcagatctgtggtcacatcctgcccaattccagctctgaggtccatcaaaccatctgcttctcccttggcaagaagctccctctgtctgactggcagcagggtcagtggccatccttttctaccttcagctgttgtgcatctcctccacgttttcctggagtaaaggaacaagcaggttcttatccaaatacccaacctgtgaagatgagacggcccttgggaagaggtattagccaagttttcagtatgatgcccggcagaaagaatttgttgtctttgtcttaagcttattatcctcccaggtcataggaagatctaaagtccaatcagtctccttactcagaattcacagctttcccctcaaacttaaaatgcccatgtcatttcacgagtacccataactacccatcgtttagatacatgtcctcccttggnctagaaatctgcagcagttcctacttaaactgatggatgctttgggctttggaggtatctcatccctatgcctgttgccctgaagctgccggaaggaaaggccccactcaactactgggaagaaagcccataattcaaggcttttaatacagtcactacacaagctctccctctgatttaggagatcttgttacctcctcatctacatgtgcttaaaaacaaaaagaaacctataattattcaattcacctgtggtccaaataagtctcacatccagccattcccctgagagggcaggaggccagactttgaactttccacagctgggtcttcattttactagtgagataaagaggtgcagattagggtgacagtccatctaagcaagtggacgatctggggaactgtaggccttgctgaagcatcctcccacagaaaggagataagggccttatccaattggctgtacacaatagatcagtgcttctttcctagacaaggctgaaaggggccaacattatttctgaagacttcattattggaattctatgggagtgatctcactgagctattttggaatagaaatgtggctagttgcctgacctccctcaatggtttcacgtggctttcaaagggaaggaagggcagtgctgacttttggtaaaatgggcgaaagggtccatgccagcaacacaatcactcaaagtccagatgagggatcagtaaatacaacgtgcctgaaaggtggcccttgagcacattcctccggtagacattaacttattaaattgattctgattacaaatataaactttgcccccatctcacccagtaacaatgcaagagttgatgtcagtctataaaaggaagtaggaactgtccctggctttcaggctccaacatcctccccctgtcaagatgtggcacctcaaactttgtgcagtcctcatgatcttcctgttgctgttgggccagatagatggctccccaataccagaagtgagttcggcaaagagaaggccacggagaatgaccccattttggagaggggtttccctcaggcctattggagcctcctgccgggatgattctgagtgtatcacaaggctatgcagaaaggacagcagtcacctccgacaatgctccgttctatggaatattgattaactgcattttggctggagacacccaagtgaagcaatcttgtatttttaatatttaaaggcagatgtacgctttaaattggtctccatttcttcttagaatgttgatatatggataagcataactaaacttgtcaatttagagtttatttttctatggatactattaaatgtctcaaattgaaattttagcagtctggaattcaagcttttgagggaaagaaggattcattttgtatactaaagaaaaaaacagcattgcccaataatgtgttaacttctcaatctggaaagtgtagtgagagctacataatcaatagctacgtaatcaacttcagcaagttcctaagctgtggccctggatcccttcactccatactcttcagggaggtgtcaaaggtggtcaagcttgggaggctgaggcaggagaatcacttgaacctgggaggtggaggttgcagtgagccaagatcatgccactgcaccccagcctgggtgacatagagagactctgtctcaaa

SEQ ID NO: 31326 - DNA, 3115 bp, Homo sapiens
  misc_feature (1714)..(1714): n is a, c, g, or t
ttagggacagcaaaaagtttccaattactgccaactcctagtgatcgacctggaatgtgtttcaaacagctgctcatgtagctataccctctttctcccatttcatcctaagcatttgcctcagaagcataaaatctcttgagagttgtatccagagttaccaagctctcagctatcaaatctgcttcagtctcattttcttcttgtaaattagtcatttgaacccccaaactgacagaataggagactaaagcccaaaaaggggaagggctggcctatgggcagttgcactctgtagaccccaggctactgcttaccagccaagcattctaccttcttacggctgcaactgttaaaggctacttaggcctttctattggatgaaggagcatgcagttacgtgtatattcactgagcaaaatacttgattgtagaatccatgaaatttttttttttttaatttcaagaagaggccttcacagtctctcaagtatgggatggctgtggacaaatactgccaattcagctaactgctgcctggatgttgctttgagtttgatttttgctccatacttaactaaaacaactagcattcacgtagacatgttaaaatactttccccttccccaacagtggttccttccacagacagtgactaatggttttttcttttggggagagggtggcatacaacatagaggcttgaaccaaaggcctctgcaatgttgtcacactcatgaggatgaatggtcctttccgcctacacacagaggggcaagggcttcaagctctttctttccttgactgtgttatcagctttacaaattaacaccatgctagtttgatcctgctagaagtacaggaaggcagaaatggaggattaggagaattactcatcttttggatgaacagtttccaaatcccatttggcacatcactctagactggtaaaggggaggctgacactgaggccacagacccaactggctctaggacatcacgttgttcagtcctttgcttatctaatcatttgtgttcttacccagtgctcactaggtcacccacatagccacttcccctcccagcaaaagttcccagtttaggcacctgtctgggatcatccagtatccaagcttaggggtgaagggagggagcagagaactagtctcaactggttcgttggtatataggtctcttctcaatgttcctaaagtgcatgcagtggcatccccctcaaggcctggctccatgattctgagaggactagaatcaggacagtcagatctgtggtcacatcctgcccaattccagctctgaggtccatcaaaccatctgcttctcccttggcaagaagctccctctgtctgactggcagcagggtcagtggccatccttttctaccttcagctgttgtgcatctcctccacgttttcctggagtaaaggaacaagcaggttcttatccaaatacccaacctgtgaagatgagacggcccttgggaagaggtattagccaagttttcagtatgatgcccggcagaaagaatttgttgtctttgtcttaagcttattatcctcccaggtcataggaagatctaaagtccaatcagtctccttactcagaattcacagctttcccctcaaacttaaaatgcccatgtcatttcacgagtacccataactacccatcgtttagatacatgtcctcccttggnctagaaatctgcagcagttcctacttaaactgatggatgctttgggctttggaggtatctcatccctatgcctgttgccctgaagctgccggaaggaaaggccccactcaactactgggaagaaagcccataattcaaggcttttaatacagtcactacacaagctctccctctgatttaggagatcttgttacctcctcatctacatgtgcttaaaaacaaaaagaaacctataattattcaattcacctgtggtccaaataagtctcacatccagccattcccctgagagggcaggaggccagactttgaactttccacagctgggtcttcattttactagtgagataaagaggtgcagattagggtgacagtccatctaagcaagtggacgatctggggaactgtaggccttgctgaagcatcctcccacagaaaggagataagggccttatccaattggctgtacacaatagatcagtgcttctttcctagacaaggctgaaaggggccaacattatttctgaagacttcattattggaattctatgggagtgatctcactgagctattttggaatagaaatgtggctagttgcctgacctccctcaatggtttcacgtggctttcaaagggaaggaagggcagtgctgacttttggtaaaatgggcgaaagggtccatgccagcaacacaatcactcaaagtccagatgagggatcagtaaatacaacgtgcctgaaaggtggcccttgagcacattcctccggtagacattaacttattaaattgattctgattacaaatataaactttgcccccatctcacccagtaacaatgcaagagttgatgtcagtctataaaaggaagtaggaactgtccctggctttcaggctccaacatcctccccctgtcaagatgtggcacctcaaactttgtgcagtcctcatgatcttcctgttgctgttgggccagatagatggctccccaataccagaagtgagttcggcaaagagaaggccacggagaatgaccccattttggagaggggtttccctcaggcctattggagcctcctgccgggatgattctgagtgtatcacaaggctatgcagaaaaagacgctgttccttaagtgtggcccaggaatgatgtacataccagggaaagaaaggacagcagtcacctccgacaatgctccgttctatggaatattgattaactgcattttggctggagacacccaagtgaagcaatcttgtatttttaatatttaaaggcagatgtacgctttaaattggtctccatttcttcttagaatgttgatatatggataagcataactaaacttgtcaatttagagtttatttttctatggatactattaaatgtctcaaattg

SEQ ID NO: 31327 - DNA, 222 bp, Homo sapiens
ctttctgtggtcttttctttcttttaaacccttggttatagatagaacgttgtcctttacacttaagctctacatgataagagcaaacttaaggcacttttgtttcctccaaaatttccgggctcttcatgaagagatttttctcgaatggtcaagatttagatgaaacttaggaacacacagttctctgctaagaagccatcagatcagccggaaaaaaaa

SEQ ID NO: 31328 - DNA, 354 bp, Homo sapiens
aatacagaattatgcagtatatagttacataactgagtgattgtatttctcaggtcattgtttaaatattactaagacactttttttcctgaaatcacactgcataaaatgatatgctactggccaggcatggtggctcacacctgtaatcctagcactttgggaggtcgagatgggcagatcaccaggtcaagagattgggaccatcctggccaacatggtgaaactctgtctctactaaaaatacaaaaattagctgggcgtggtggcacacacctgtaatcccagatactcgggaggctgcggcaggagaattgcttgaacccgggaggtggaggttgcagtgagccgaga

SEQ ID NO: 31329 - DNA, 350 bp, Homo sapiens
ttttcatatcattaaataatttgtaaaaatatgactttttcataaatgcataatttatcccatagatgtattgtgatttattttcctgttaagacattttgttaatgtctaaatgttttacttttataaataatgttgcattgaacagccctatacatagatatttgtaataattcaactactattttttgaacactagttactgctctgaatgttggagatacattagtgaacaaacagtccaaagtccctgccctcatggggaggaggaaagagagacaataaggatgtaaactataaattacatcaaatagtgatgagtgctctggagaaaactaaatcagggatgg

SEQ ID NO: 31330 - DNA, 406 bp, Homo sapiens
aaatttgttagtatcgtgataaatggacataccatttctgcttctggaaagtcgctaatgactaatagccacaaaggaagcattatgctttgttttctaagagctttactagactacttatttaatgcaaatgctattcccctgagataggccagcagctctcaaacttgcggcacatcggaatgacatcacaagcttgtaaacatggaactgcccagggccccattccagaccaaccgagttagaatctccaggggtggggcccaggcatctgatgtttattacactccccgggtgattctcacacacacataagtttgagaatcattgaggtctgtgagtggtagggttttgttattgttttaggaattacaatgttcaggtttgtcagtttagtcagggcctc

SEQ ID NO: 31331 - DNA, 615 bp, Homo sapiens
ggatgccacattgcccttcacagatgctttgccacctgattctaagatgtgacatccaagatctccagccagaaaaggagttgctgccacatcttgtatgaactagcaatcaagtggctatttcgtccagcccattagccctccacccacccccttggtctttcacttggcattactttcagtatcttgaggattattgtagtactgtgtaacacatggcctttcagtaagaaaagcgttgatggcattgcctggcagaaggaagtagagagcagaggcttaggggctgtgtgccagatggcattttgggagaaggagaacatctcacttctttgaaggcttgagatctcaggtccaaaggagactgagtgtgtgggaggagtggtagctactgaccaggaagttgttgctggctgcacttccctcctgatagggaatcctggattgcctacagaggggtctgaggcaattgtatctggtttggggttctaccaagtgaagctggagatttgtaaaagcttgtcatctattgatcgttggtccttgtactataccaatgtggagatggagacatagtgcaatttgcttagatttaggtgccaaaaaaaaaaaaaa

SEQ ID NO: 31332 - DNA, 293 bp, Homo sapiens
ttttttttagctgagtcctgaaagatttgtacggattgagaaaaacagaagggatcgttaaacaaaagaacaaacccaagcagtggtacatccagacactatgactcctatctcctggttaggaacagaggcaccttacagtgggagatcagattggaatgatgggttaaggcaggacagtatagcactccagtgcaggctaagaggttgaacatggtgtccaaggcacagagcgtcatttccccagctcctccccacaattgtgagctctagaaatcccttaccccataaac

SEQ ID NO: 31333 - DNA, 939 bp, Homo sapiens
atgccaagtgcaatagaggcaatatatattattttaattgctggtgaattgaccatagggatttggggaaatggattcattgtactagttaactgcattgactggctcaaaagaagagatatttccttgattgacatcatcctgatcagcttggccatctccagaatctgtctgctgtgtgtaatatcattagatggcttctttatgctgctctttccaggtacatatggcaatagcgtgctagtaagcattgtgaatgttgtctggacatttgccaataattcaagtctctggtttacttcttgcctcagtatcttctatttactcaagatagccaatatatcgcacccatttttcttctggctgaagctaaagatcaacaaggtcatgcttgcgattcttctggggtcctttcttatctctttaattattagtgttccaaagaatgatgatatgtggtatcaccttttcaaagtcagtcatgaagaaaacattacttggaaattcaaagtgagtaaaattccaggtactttcaaacagttaaccctgaacctgggggtgatggttccctttatcctttgcctgatctcatttttcttgttacttttctccctagttagacacaccaagcagattcgactgcatgctacagggttcagagaccccagtacagaggcccacatgagggccataaaggcagtgatcatctttctgctcctcctcatcgtgtactacccagtctttcttgttatgacctctagcgctctgattcctcagggaaaattagtgttgatgattggtgacatagtaactgtcattttcccatcaagccattcattcattctaattatgggaaatagcaagttgagggaagcttttctgaagatgttaagatttgtgaagtgtttccttagaagaagaaagccttttgttccatag

SEQ ID NO: 31334 - DNA, 386 bp, Homo sapiens
tttccaaaagaaaatagaggagttatggagaccaatatttaatagaataatgcctgattattttgcttttgaggtctagtaactgctagtaaacttgcctaattaattcacatttagaagtagagtaaagagggtttcaaccacttgaaacaccactgacttcatttcatgtgagagttgctatggagagctaatgaactatgaggctgcaggtctctcagccaataggtcttctagatttcctatgtgactcccttttctggtcataggcgattttgcttttgctttgagtgttatagcacaataaggtgtcagacactctactcttaccaagtcttacacaaagtttatcttgttatttggtggagcttggctcataaaaacaa

SEQ ID NO: 31335 - DNA, 1422 bp, Homo sapiens
acgctatgacccgcttgacgctatgacagcgggaaacggggggcgcgcccgtacatagggaggctttaaaaccttgaggtgattcatcttccaggctctccttccatcaagtctctcctccctagcgctctgggtccttaatggcagcagccgccgctaccaagatccttctgtgcctcccgcttctgctcctgctgtccggctggtcccgggctgggcgagccgaccctcactctctttgctatgacatcaccgtcatccctaagttcagacctggaccacggtggtgtgcggttcaaggccaggtggatgaaaagacttttcttcactatgactgtggcaacaagacagtcacacctgtcagtcccctggggaagaaactaaatgtcacaacggcctggaaagcacagaacccagtactgagagaggtggtggacatacttacagagcaactgcgtgacattcagctggagaattacacacccaaggaacccctcaccctgcaggccaggatgtcttgtgagcagaaagctgaaggacacagcagtggatcttggcagttcagtttcgatgggcagatcttcctcctctttgactcagagaagagaatgtggacaacggttcatcctggagccagaaagatgaaagaaaagtgggagaatgacaaggttgtggccatgtccttccattacttctcaatgggagactgtataggatggcttgaggacttcttgatgggcatggacagcaccctggagccaagtgcaggagcaccactcgccatgtcctcaggcacaacccaactcagggccacagccaccaccctcatcctttgctgcctcctcatcatcctcccctgcttcatcctccctggcatctgaggagagtcctttagagtgacaggttaaagctgataccaaaaggctcctgtgagcacggtcttgatcaaactcgcccttctgtctggccagctgcccacgacctacggtgtatgtccagtggcctccagcagatcatgatgacatcatggacccaatagctcattcactgccttgattccttttgccaacaattttaccagcagttatacctaacatattatgcaattttctcttggtgctacctgatggaattcctgcacttaaagttctggctgactaaacaagatatatcattttctttcttctctttttgtttggaaaatcaagtacttctttgaatgatgatctctttcttgcaaatgatattgtcagtaaaataatcacgttagacttcagacctctggggattctttccgtgtcctgaaagagaatttttaaattatttaataagaaaaaatttatattaatgattgtttcctttagtaatttattgttctgtactgatatttaaataaagagttctatttcccaaaaaaaaaaa

SEQ ID NO: 31336 - DNA, 413 bp, Homo sapiens
ctgtggaacttttccctgaaagtaatcctcttgcatttttatttgcttggttttctatttgtcactaattcaaccccaatcatatctgaagatcatgacatcatttatcagttattattcttgacccaccccaatctggactggtttctccccgtgcttggtgtgtcactgtcaccctgggcactccccacactgctcctctgttggatctctgttttctgtgtaacctcttcttttatcaccttaaaaatacaaaaaaattagctgggcgtggtggcgggcacctgtggtcccagctactcgggaggctgaggcaggagaatggcatgaacccgggaggtggagcctgcagtgagccgagattgcaccactgcactccagcctgggtgacagagtgagactccgtctcaaaa

SEQ ID NO: 31337 - DNA, 339 bp, Homo sapiens
ctgtggaacttttccctgaaagtaatcctcttgcatttttatttgcttggttttctatttgtcactaattcaaccccaatcatatctgaagatcatgacatcatttatcagttattattcttgacccaccccaatctggactggtttctccccgtgcttggtgtgtcactgtcaccctgggcactccccacactgctcctctgttggatctctgttttctgtgtaacctcttcttttatcaccttattttgggggagtatctgcatgtctaaaaatgtgctcacacttgatttgattgggtatgaaattctatgttggaattagtgccgggcgcagtgg

SEQ ID NO: 31338 - DNA, 361 bp, Homo sapiens
ccagagagcttaagtgacttcctcgaggtcatagttacttactgccttagtcccaatttgaattcaattctgattccaaataagttgcgcttaaataagacaacagatgtgggaaaaatatgtgaatgtgtagtgttgctatgtgtactgtctttacaagtagctaattattttagcacaaagatgtgcaaagaaaggagactttatggagagttcaggagaaaaaggattttgtggtggccatcactttcattcaatttgcgactgctctgatggcacattagatgaagttactgttgatcctgagttacgtgaataagaaaaacaattgaactgcttattaaaaaagtaaacatgtctt

SEQ ID NO: 31339 - DNA, 469 bp, Homo sapiens
gattttctctggtgctatgatttagtttcttgctttttattttttgtgtatccattatatgatttttgatttgaggttaccatgagcttgcaagtagtatcttataacctattgttttaagctgataacaacttgacactgcttgcatgaactacctaacaagcaaaaagaaaactaataaaaactctacacttcaaattcatcccctgctatttaattttttgttatttctgtgtatatcttatactatctatatgtttgaaagttgttgtagttattttttattggttttctgtgaccttactattactagtgaggtttttgttttgttttgttttgttttgagacagagttttactctgttgcccaggttggagtgcagtgacgtgatctcggctcactgcaacttccacctcttgggttcaagaaattctcctgtctcagcctcccgagtagctgggactacagg

SEQ ID NO: 31340 - DNA, 2210 bp, Homo sapiens
tcttggccctcctataaagaagcagcctctccttcctctgatgtgcagggtgtaggactagtggtagggctgccacggaagtgtcctctgaggctctgcaggtagcggggaaagccagtagggagtctgctgtcttcttcaagatggagccggccattacagaaagatgttgacatttgctaggggctatgcagtctgtggctgatgcagggagttttcagaaagttctggagggttctgctgtcactggactggggttggtgctgagctctgggcctggctttgggagatgtcaccctgggatagggaggaggaagctgcatttctaatggcttcctcctccagagaggcacgtatatgcaggctgacatccgagggcctgtgtcgcctcagacagccctgacagtggccacagtcccgtacccattgtgaggggctggggcatgcctaggagggctaggtgctgaacatctatgtgcctataaactcgtcttcgttccaaacagctactgctgtctgccctgggcacgtcacgttgcatcctaggccttagcttctccactgtttgctacctcagattatgccctctgggaacccagccgtatccctcccctaggacagtggtgacctggtccttccaccacactcagtctttggagagcgagctgtccagccacagaaatgagggtgtggtgcgtggcttcctgctccccacagcccagccccctgttggggctccaaagccgaagacagggcctcttcagactccttgggagtaggtttcaggaggcaccaagaatcaatgactgacccagggggcctggcagccactagtatgaactgctggagacctgtctgtcttatagacatgtcaggaaaatagaaacaggcattttctctagctccaagtggggagatattttggggtcacagcttctttggctaagcagggtgtttcttgaaggttcagatgccccactgtgtacatgggatattctgcttctgagtgtaggtgatgaatccaggtcctcagtggagaattttctggagctaagatcaaagcatgtgtcttcctgggagagaagagttccgttcttttatgtgggtttccctaatagtcagaatccacaaaccagccagccagccagccaagcctctgcgatgatgttctcatccggtctaacgctgggctggaaaccttggacagagttcatgcgggggcagagggggtgccagtctctgaggcagggctgcagtcacccctgaagaactaagtgaacaggaacccctctgtgccagtgaccactgtggggctaaagggacaaaaaggaccagggtaccaggcagaagcagatccttgatagctgacgacagcactgcgccctgtgcttggtgcactccctccttcaggaggagagggtggcatggggtctgtgcgggatggcagggggattgggtgggtgggaagagaggtgccatcggtaggaggctggcctccagtagaggagagcagcttttgccatcagtcactttacaaaccatttcaaggaaggacaacctctctggctcctgacacaagccaggcctcggtgcttttatctgttgtggtggtttttcttctttccctttttaaaagacgcatgaccaagacaacctagggagtttgtcttgcttgcctttgactatttccttaatccaaccatgctctcgagggctgagcagagactagactcaaggcacaggtttctggtgatggagtaaagttacagcggtatctcatgtctacacaagaagaggaacgttctgaaagctccaacaacttcttgagggggatggaccaatacagctttgggctcaggattccctagcctcctctgcccatcgcgtgcactgattggaggagtctggcccaaacactctcatatgaacctcgacatgctggagtggggtctggcaggagctgatgacagtttgagggacttgagtgtccctagcctggcagttggctcccggaagcactagacactgacactcattggtagaccctccctccccgccgttgtgtttggttcttttgcactccatgtactgcagaaggatggaaggacctgggtgctggctgggctgtgtatactgtgtatacaagggagctggctgctgaggtgaccacagccttctcctaataaagctgtaagtatttaaaacctgtg

SEQ ID NO: 31341 - DNA, 281 bp, Homo sapiens
gtgctcgaataattactattccgaatattaggatcctactatttccttatcaatgtttttatttccacatagaagtctgttaaccgaacatactttgtagctcaataatcggtaaattctgattagcacctgattttgtttcagttagcccattctgtttacatgagtagatatatcaattatgcttaagtttagaagacatccatagaaattctcaggtttattctttctctctagttgttcttgcttaataactgcctttttcacagattttcccgtta

SEQ ID NO: 31342 - DNA, 451 bp, Homo sapiens
gctagttaaagaaattttttcttcaatattttcttaattattttttattgaattaactcgagggtaacaactttcttcctaagaataaataaataaaccctattggagctattcccagagttggcaaaatttgagattattataagaaaataaaagaaattggaggctgggcacagtggctcacacctgtaatcccagcactttgggaagccgaggtgggtggatcacaaggtcaggagttcaagaccagcctggccaacatagtgaaaccccatctctactaaaaatacaaaaacaattagctgggtgtggtagcgggcgcctgtagtcccagctacttgggaggctgaggcaggagaattggttgaacctgggaggcggaggttgcagtgagccaagattgtgccactgcaatgcagcctgggtgacatagcgagactctgtctcaaaa

SEQ ID NO: 31343 - DNA, 403 bp, Homo sapiens
tatatcagcttacgttgacttaatagattcagattgcacgtctgtaataattgttgcatatagactagacttttgaaatcgattaatataatcagggacaagttaaaaccaggagttggtaacccattaattatagtttgaaactttgcctgctagaatccccacttgccacctccttacccaggggagggtgaaggaagggatagaggaaggcctggcatggtggctcatacctataatcctagtactttgggaggctgaggcagaaggatcacttgagcctaggagtttgagaccagcctgggcaacatggtgaaacctacaaaagattcaaaaatttaacagggcatggttggcacgtgcctgtggtcccagctacgtgggaggctgaggtgggaggctg

SEQ ID NO: 31344 - DNA, 485 bp, Homo sapiens
cgcggccgcaccccccacccaccccggcgcgggggcccggccgcgggaacgccctcccggaatgaagcgcttcccggtgccttcaagtttctcagcatcccctggactggggactggagggccacccacacaaggcatttcttaccattccgacacaaaagcattccagtttgtgttgtagcagagacacagatgaggggatctccttcatccttctccagaagagaagaggaaacagaagaagaaacgcctggtgcagagtcccgattcctacttcatggatatgacatgcccaggatgctataaaatcaccatggtctgtagccatgcacaaacggtagttttgtgtgttgcctgctccactgttctctgccagcctacaggaggaaaaggaaggctacagaaggatgttccttcaggaggaagcagcacccaaagcactctgaatcaagatgagtgggaaaccatctcaataaacacatttt

SEQ ID NO: 31345 - DNA, 506 bp, Homo sapiens
gactagattgcctaaagcttccctagccgaaagaaactacctgccacgtcaataacatgcaactgtgggtgactcagggacatataacctaaagctactgggtaaaatattttaagaatgagacttgggaagctgaacagcatactgatttgccgtcttcttccgccattgtattgaccaggcaagtccacgcctgagttcagagttgcagtgggcaggagagatgtgtgtccaggaagaaattgtggcttctgctctgaagatctggtcacatctcgggtcaattgcagtttgaagaacctaggaaagactgtatttggttctaatcttggtgatatttgggcctcttctaagaggtattcagtgtctctcttgagaaggcttaggccttcctggcagccctgactgccttcatttctcttggaacttccaggtccaggcctgctctgaatcctcctttctggtcctggatacagagagtgtatgtcttaacaccaaaaaaaaga

SEQ ID NO: 31346 - DNA, 130 bp, Homo sapiens
gatcacactcctcattgttgaggaatccctctttctatgtgaccataggatttccagagcctactaacagcatgatctctcctcactgtttctgctacacttggtcattaaaacatcaccaaactaccga

SEQ ID NO: 31347 - DNA, 332 bp, Homo sapiens
tgataatgtaagtacattacatgaatcgtattgtcttcctcttctatagtcacatagcactcaaaattattaccactcaaatacagggtattttattgattatgaactgcttatgaacaagaggcatatcctattcatcactgtattctagcattaggcacagaataaatatttataaagttgagtttttaaaatattaggagctggatgagtgggatggctcaggcctgtaatcccagaacttttgagaggccaaggcatgaggatgacttgagcccaggagttagagaccagactgggcaacataatgagaccccatctctacaaaaaaa

SEQ ID NO: 31348 - DNA, 424 bp, Homo sapiens
ttgagacaaggtacaaatacagctcacctcaacctcaacttgctgggctcaggtgatcctcctgcctagcctcccaaataggtgggaccacaggggcataatttttttaatttttttttttgacacaggatctcaccatgttgtccaggctggtctcacactcctaagctcaagtgatcctcctgcctcagcctccaaaagggtaggattgtagtcacgagccaccacactcaccccagagattttcttaaatgacttgaaacaatgagtcccctaggcttcagtaagaagttctggaagaggggagggcatctacaatgctcagtcaggtcattgagaattctgcctatgccttcacttcctgcttacacagaaacttcaggttagtcacagatgagaactcagaacctcctcggatctttct

SEQ ID NO: 31349 - DNA, 670 bp, Homo sapiens
  misc_feature (4)..(5): n is a, c, g, or t
  misc_feature (87)..(87): n is a, c, g, or t
  misc_feature (279)..(279): n is a, c, g, or t
  misc_feature (665)..(665): n is a, c, g, or t
gctnntcccgccatttcctggggcttggaggaggggttaaaggagcggactgtaggcgtcacatttcctgcgcgcttttcagtctcngtgtccgctggaggtgggggcaggggtaacgtagatatataaagatcggtttcctattctctcacttgctcttggttcacttcttgggaagtcatgtctggacgtggtaagggcgggaagggtttgggtaaggggggtgccaagcgccaccgcaaggtgttgcgtgacaacatccagggcatcaccaagccngccatccggcgtctggcccggcgtggcggtgtgaagcggatctctggtctgatctacgaggagactcgcggggtgctcaaggtgtttttggagaacgtgatccgtgacgctgtcacctatacggagcacgccaagcgcaagacagtcactgccatggacgtggtctacgcgcttaagcgccagggacgcaccctttatggctttggcggttaaggttgctgatttctccacagcttgcatttctgaaccaaaggcccttttcagggccgcccaactaaacaaaagaagagctgtatccattaagtcaagaagctcaatgtgtaattaagatgaatgatactgagctgacatcctaaaaaggaaaattaggggaactccaagtttgncctcc

SEQ ID NO: 31350 - DNA, 392 bp, Homo sapiens
aatagaaaaggggggtgaagtgccaaaggaactccaacactcttctcttagggagaggaggagaaaactataaaagatagacagaacagctagggaggagggaggaaaacaatgggaggatgatgtcttgaaggtcaagagagaaaaaacacaggaataaggagctgtgttcaatgctgccaccataaggagcagtttcagtggaatcagggagagaagtcacgctggagtggattataaaatgaaaaagagctcaaaaaaatggagacatgaccaggtgtgatggctcacacctgtagttccaacatttttggaggttgaagttgaagtatcagttgagtcccagagttcaagtccaccttgggcaacatatggagaccctgtctttatgg

SEQ ID NO: 31351 - DNA, 613 bp, Homo sapiens
gcttttctttgtttgtattaaatattgaaccttcattgatatggttaccatggctacactacctcccaaacttagtggcataaaacattcattcattatgctcacagattctgtgggttagcgatttgactagaacacagtgggggaaggccaatctgtgctctgtgatgtctggggcctcagttggaagacttagaagtctgaggctggaattgtctgaagtttgctcactcataggtctggcagttgctgctggctgtcagctgagaccttattagcagaaacacctacatgtggctttctttgtgggctgggctttatccctgcatggtggctgggttccagggcgggtgtctcaagagaaagtgagccaagagaaagttgtattttctttttaatgacctagccttgtaataagattggacattaccgtgtttacccttgttccacattgattttcctgggatatttgtttttatcacaaccactcctgagaaacaatcttgacaaagatataatgtcattgataggaatggagcaatatacagttggtcctctgtatgtgcaggttctgtatccacagattcaaccaatttctgattgaaaatattaa

SEQ ID NO: 31352 - DNA, 372 bp, Homo sapiens
acctgacaccattttcacaccctccacataggaccagtgcttgccgttattctttgtactcctttcctggactgctcgtcgtgttcaccaagatcaatgctgcccttcttaatactgacataaggtcaggagctgacttgaatcttcacagccctcaactcaacatcctctcctcctgttctaagtctggcaaacattgttgaaaatcatcctgtgactatgttaatatttcacttttatctactgtcaactggtcctgtcccatgtagctgctctcctactaagtgtgatttccatgacgaaagggactgtatcttctctgctcctgtgtctagcacaatgtcttaacatggtacattttcatcagacttt

SEQ ID NO: 31353 - DNA, 224 bp, Homo sapiens
tgcatctctatcaaaactcttaagacaccagtttttactaattagcacacaggatatagttgtgatttgttaggtcttacttgccctgcctatgtatgtatttccgttggcaatccttgatcttatcgtatcttatcattttttaaatgaagaaaatgaggccaaaagaagtgcagtgatttctataatgccactttttttggtaactccataactgatagaat

SEQ ID NO: 31354 - DNA, 254 bp, Homo sapiens
tttttgccacagcttataacaaaaaatagcagtcatgccctgtcctcttcctttcctacttcttattctccagaggctatcactggcaactctttcagttttgatatttacctctatatttataagtaattttttccctagttgttttagatggaatcagttggcctagtacaggaaggagatagggactatcttactgtctcactattgatctcactattgagcatgttcactatgtacactttgattatacc

SEQ ID NO: 31355 - DNA, 432 bp, Homo sapiens
aacatctgaactaaatactgcattaaaaaggagaggcacaaaaattacataaccagttttaacattatattcttcttgggctaggaattaagtcatcgccaccacctgacgcgtgtaaccaatctgctgagagcagaacaagcgcccctcctcaccaccccccagaactggtccgaaacaggattgaaccgcttctaacaaagggtggaaacttagaaaaacaagcctagagtctcctatatttccacaatgtaaccatttaaacaatagattggaaatctcaggactccttctccttttgacaaccctttatctctctcttctaaccaaaaatcaaatccagtgtgccctatacttttcaattccatttgactggcatgggtttcattgaatgcacgttccaaagttagacatgatgctcggaaaagaaaa

SEQ ID NO: 31356 - DNA, 581 bp, Homo sapiens
ccaccagccactcgagttgctgttctgttgatacttgcttagcaaacctagacaaagtgtgccctttatccagaagtgagcagaagctcctggactgagtctaattgtcctggctggcggacttcgtatacatatcattgcatcacttgtgcttcaggagataaaaagctctgattgctcaggcctgagatggggagtggacttagcttcatccaaaccacattgctgagagacagggaggggttgttcccaaaggaaaattagaaggatgttacggaagaatggggaatgactgctggctaggcagaaaccaccgatgtccactacaatgaagttagagaaaaaaaatagataccttagcacagtagctgctttcctcctttcttgcttctgctgtctctgtccctatgcaaagatatttttgtggttataatcatagtatgtatacattgagaaattcatttttcacttgatattattggaaacactcttcgaagttgctatatagtcttcatgatcatatattcatcatcaccccgtccattagaggagatttcccgttttttccccccatgtggggc

SEQ ID NO: 31357 - DNA, 521 bp, Homo sapiens
ccacgcaactgtagtgccagctactcaggaggctgaggtaggaggattgcttgagtctaggaggttgaggctgcagtgacctacacttgtgccactgcactccggcctgggccacaaagccagaccctgtcccctgccaaaaaaacaaaagggagatggagacttcctcctggatttcttcaacttttttttttaactgtaaattgacagtttataataatgtataaatttatgaggtataaagtgatggctaattcatgaatatcatgtggaataattaaatgaagctagttaatgcattcatcacctcaaatacttaacatcttgtgagaacatttgaaatttcctctagcaatttggagatacacaatactcttatttttttttttttttgagacggagtcttgctctgttgcccaggctggagtgcagtggcgccgtctctgctcactgcaagctccacctcctgggttcacaccattctgcctcagcctccagagtagctgggaccacaggcgccc

SEQ ID NO: 31358 - DNA, 860 bp, Homo sapiens
  misc_feature (1)..(1): n is a, c, g, or t
natttgatatctttggtacaaatttgatatttttgtgaaatcacctcataattttatttagtgttgaagaaacaacattggccccttgccttgttcagacagatttgcgtataatgtaaatatatatattagtggcagaaacaaagtactgtagaaacctagaagagggagaattctgcatgaagtctgggaaactcagcagaaatggcgtttgcaaaggtacagtgtggtatgttgggtgatgggggactttgtgagggacagagtggaaaaatttttaagaggggctgccaaattgcaaaagagaagaattttttttgtcagtgattcctagtctttttggaatcctacaccttctccccagaaaaattcattctagtccagggtttattgtttgttttttccctatatttgacagggtctgtctctgtcacacagtgcagtgggtgcaatcatggcttactgcagactccacttactggtctcaagcaatcctcccccacttcggcctcttaagtagcttggaccacaggtgcacacccaccatgctcagttaattttaatttgttttgtagagatggggtctcactatattgcctaggctggtcttgaattcctgggctcaagtgatccttccacctctgcctcccaaagtgttgggattataggcgtgagccaccacgcttggccaaatctggagtctaaagggtatacaaggtttttttttttcccatgttggcttttatttgatgttataaagtcttcatgatatgaatatattttttaaaaaggtgtcatgtatattgtcatgtaacatgattcatgccacttcattgtattaaatacgtttaagatacagt

SEQ ID NO: 31359 - DNA, 391 bp, Homo sapiens
gtatgtctgacttgtttttaaataacttcctcagcaatgcagaccttaatttttatatttttttaaagtagctaacatagcagtaggcacttaagcatttagtcaatgatattggtagaaatagtaaaatacatcctttaaatatatatctaagcatatattttaaaaggagcaaaaataaaaccaaagtgttagtaaattttgatttattagatattttagaaaaataatagaattctgaagttttaaaaatgtcagtaattaatttattttcattttcagaaatatatgcatgcagttatgttttatttgattgttgacttaggctatgtctgtatacagtaaccaaataaactctttcactattaaagagatttcttactgacacaag

SEQ ID NO: 31360 - DNA, 516 bp, Homo sapiens
gtcatcggcagccttgccagacactgtaccgtggctccagacagtcagctggtactatcgctttgtctcaactataaatcacagtctcgtaatggccaaggctgacaccttgacattttcaagaagagtaaaagacctgatttgaatggaaatcaatttcatttcacaaatcttgggtgactactccaagccttttcttgtgtcttcttgagacttatttgggattttcatgatcatcagaggattatttgagtgttatattatgactttttaaagctataaaaccatattcttacttccttcttcattcctaacatgagaaaattgatttttaaagttttatgtaagaaaaatcactaataagcactgatagtttttaaaatggcaatagcagccaatgctgtttagttttgcaaaacttttgtaaaatgttctctgatttaaaagtacaagctgtgtacacacgtatccagattaacctttgattacctgataataaatattagcaattatcaa

SEQ ID NO: 31361 - DNA, 1220 bp, Homo sapiens
gctaggtttactgactcatatactaaggaagtagctaaaattataaaaataatttgtttttaaaaccatatttaactaagggaactaagtaagttccaatgagcagtggtctcatgcaaggtattttcaatattttaaaatttacagatgaatatttaaatatattataaaagttttaatcagctatctctaagaaaatacatttcttaaagggaaatgaaattcacttgactttaaataaaacaaatgaactcatttcatgtttttaactattatctaactcttccttactttatgatgctggcaagctgttgagagccttgacatctccatctgcagaaaaatcacagtcttagaaatcctattaatcgtgtgaggtacctgggtcatagtagcagcttcatgcagtgttaaaattatatgatgattatatgcagtaacagatgaagaaaaaaagaaagaaagcaggagaaatgcaccacctcattcattgtaaatgcagtatagttgattttttaatttgttttatgtcctctagtgatctaagcatgaagcttgaattattataataaagaaaataaatgcaatgcagttggggatggcaaatgttaatgcttatctgtatcaaagactaacactgtcttcaggattatccttggtggattatccttggcagacacttaatgagcagagagaagctacaatgttgaaggacaaaagtcctttgtcatcttattatcgaaataatgtttaatacaaataaactttttaaattaaaatgtttgactactttttaccactaagaaatattcttggcaaagttaaacaacatcaaaattttaaacaattctttcaaagctaagaagtaaaaacctatgaaattaaaattatgtaattactctgcaggataatttgatgcctctggaaaaatgcatggactgttttagtccctaattctaatttatcacagtagtattaacacgtgcttttttttttttttaagaggatgagggattgagacagtaaacatgaattcctcatagatattggccaagttgtttcattgaacttgttgcaacttaccttgtaattggaaccacaattttatgagacccatatcttgtcttcttttatctatcatgttaagaaataaaccagttccctcttaattatagcatttatttcaaaaagcaatgttaaaaataaatgtagagttagca

SEQ ID NO: 31362 - DNA, 357 bp, Homo sapiens
tggggcccagggcaaaatgcaaatgcaggccccttaaaagtttgtttaaaatgttttcagactgtgacagcagagtatgaaaccaaaaccaggtccttctaagtctaaggctttgtgtgatggcacaggtcacactcctgtacagccagccagccctgtctgttccagcacagggagcccccagggctgcattcaggtcctcaagcggctcttgcctctcccctgctgccccaggaggccatggctgtggttccagagcctggtccagccctggctcagaaatggaggctgacaggatttccccacccgcttggggccctttgagagtttccaggacaaggcccccactgtgcagaa

SEQ ID NO: 31363 - DNA, 412 bp, Homo sapiens
aattgggagaacagctcttacttgacaactggaaaagccttagaacagagaggccccctatgccatacctcagcagagaggccctgttagaacagaatgccttgttttcattgcctgcaggatttcccattgccagagacaaagatgaacctgtttgggtgctgagagatcctacattcatgagtaggccaaaaaaaaagttgcatcccatttaaggaaaccctgtaacttgaaagatagagactaaactgatcaaacagaacagatggaacagaattaatgaaacaggagacaacttacaaaatagaatctcaaggagacgcaataagagtattaagaaatctttttaggactctaaagtaatttacagttttcaaaattcaaaacaggaccaaaaagaaaacaaaagaac

SEQ ID NO: 31364 - DNA, 3443 bp, Homo sapiens
gaggaacatgattttattggttctttcagttcaccacatccgactcgcgtctcggccctggcccgccttgcggaccttaaagcagtcagtccagggtttgggggaaacgtgctcacccgacggcagctcacaggaccccggagagtcctggcatggtatctcggtccggactctccgctgggcccacgaaggagaaaggctgcctcggattcctgcgcccaagccaaggtccggcgcccacggaggcaagtccggtctcacggtgacctcccgctggcgccgccttcgccgccaaccatccagttcttcctccaggccacgttctcctgcgtggtcgctgcctcctgcagagtggccagcaatagctgctgggtcctggccgcctcctccctgctccttgggtcctgcagtggcatctcctgagggcaggaaggggagttcgcaggagctccagtccggggctctccacccgcccacccttcctcgggactaccagttgcttctacctttagcatttcctgcttccgccgctctcccggggtcacgataacgaggagcgcgtagcccacgccagcccctgcgcccagcattgcgactgagatcagcattttccgcaaggaatccatggccgcctgcacagccagcggagcgcccacgggagctccccgcagccgcaagctgttgccgcgcggtctcactaccccttggcgcaggctagagcgccctatagcagaaaccatagataagcggccggctagagaggacctgctcgaggaaacgtttggaatccggagcgcttggatctcaggtttagctgagggggttgaggtgtccaagaagtgctggcaccaagggctgagcgcggggaccctgtgtcctcaattccggggtgggattgctagggggagagtgcgtgtcttcatggttgccgtgggttttatgattgcccatttttctgtcttccgacgtttcccgatcagtagaggcccgagctgtgctctgtggtttcctgcagtcacccgcgagttttcaacacagcgcatggagggcatctacacacatacacatccctctccatcccctcaactctggaacaaacactcaaagtcaagtatactggttggagaaatgggtaatagttacttatctttaacatttattttacaaacaacctattccttttctcgtcatggtacacacttggtattgtttgggtttttttttggttttgttgttgttgttagtgtgtgggcgtggttttgtttgtttttggagacaaggtctcgctctgtcgcccagggctggagtgcagtggcgcgatcatggctcactgaagcctcgacttccagggcccaagcgatcctcctgcctcaacctcccggatagctgggattacaggcgtgcaccaccacgcccggctggtattgctttttgttttgcttcgttttcttttttgctttttgagacagagtctcactctgttgcccagctggagtgcagtggcgtgatctcggctcactgcaagctctgcctcccgggttcacgccattctcctgcctcagcctcccgagtagctgggactacaggcgcccgccaccacggccggctaattttttgtatttttagtagagaaagagtttcactatgtaggtcaggctggtctcgaactcctgacctcgtgatccgcccaatccgcccacctcggcctcccaaagtgctgggattacaggtgtgagccaccgcgcccggctgttttgctttgttttcaaccactaaaaggctggattcgtgtaacatactgaattctgctttacagaagaaaacacctcttagctgtgtgactgattataggcaagttcttgtgccccggtttctgcatcagaaaatgaagcttataacaacagtacttgtctcacagttttaggataattaaattagttatatgtaaagcaattaaaacagctcctgccaaagagtaaacaccatataaatattcattaaataacatacaaacataccaggttgggaaaaatcagtaagcataggagtcaggaaattccaagttggttatcacaactcttggcccacagggctttaatccaggtgcccttgtctcctacccttgttgccatcccagtgtctccagggagtaagtagaaataaagatcctatctcacctcttgggcattttcccctgccctgaaagcgtataatcgcttagcacagtcggtgcttaaggggccaggctccaaagaagattaaaggaacagtttgtggggtgcactgggcagcagtactctcctctgagttcaatcatcttgcactctaagaatcaccaccatggcccttgtgccagggagaagcaaggaggatgggctttggactagaaatagcccaggctcctcccagcatccagaaagtcccaggctgcccaaccctctctgggacagaggaaaaattggcaaggttgaaggtcaccagcacattcaggatttctctcaaaagtcccatctgccgtctattgtggtggaatccagtgaggtgaatgaagagagtggggatctccatttgccccatgaggagctgctgctgctcactgatggtgaggaagaggatgctgaggccttcttccaagaccaaagtgaagagccaggctgggcttggagcccacaggaccctagaagtcctttaagaacatttaacgctggactcagctgggggcaggaccaggatgaagaagatgcttgttggattcttgaggacacagcatgtctggaagccaccaaccactgtcccttctgggactcaacaggctcccgtgtttgtagaagtggctttgtggaatattcccatctcctgcctcctaatagctttgagggagctgaagaagaagctgttcaaacgccggcgggtgttgaatcgggagcggcgtctgaggcaccgggtggtcggggctgtgatagaccaagggctgatcacgcggcaccacctcaagaagcgggcgtccagtgcacgtgccaacattacactgtcagggaagaagcgcagaaaactcctccagcagatccggcttgcccagaaagagaagacagccatggaagtggaagccccttcaaagccagccaggactagtgaaccacagctcaaaaggcaaaagaagacaaaagccccccaggatgtagaaatgaaggaccttgaagatgagagctaaacctcttccactagaagattctcaactggagccagccttcagactcagtggttgtttcagaggactttgacaaaagcaaggccccttttcactctccagatttcctcctacctaatggcctactgacctcccctagagggatgtctttgggagggaagaaggtacagaagaaagattggagaagggcctctctagcagtcaactccatttgtaataaagccctagcactctg

SEQ ID NO: 31365 - DNA, 163 bp, Homo sapiens
ggcgatggtaagaggattgcttgaacccaggagtttgggctgcagtgagctcagattgtaccactgcactccagcctgggtaacagagccagatcctgtcttaaaataaaagatgggactgaacagatgcctgggcacaacaaagcactgttggtcgcaggaa

SEQ ID NO: 31366 - DNA, 1544 bp, Homo sapiens
agctccgcccatcggagaagcgaccttacagcgcctgcctctttctgagcggcatgaagccacctcccaggcggcgagcggccccggcgcgctatctgggcgaggtgaccggtcccgcgacctggagcgctcgcgagaagcggcagctagtgcgactcctgcaggcgcggcagggccagccggagccggacgccaccgagctggcccgggagctgcggggccggagcgaggctgagatccgggtcttcctccagcagctcaagggccgcgtagcccgggaggccattcagaaagtgcatccgggtggccttcagggaccaaggcgccgggaggcacagcccccagcccccatagaggtctggacggatctggctgagaagataacagggccactggaagaagccctggcagtggctttctcgcaggtgctcaccatcgcggccacggaaccggtcaccctcctgcactccaagccccccaagcccacgcaggcccgtggaaagcctttgctcctgagcgcccctggaggacaggaagaccccgcccctgaaatacctagctctgcccctgctgcacctagctccgcacccaggactcctgaccctgcccctgagaaaccttctgagtcgtcggctggtccctccactgaagaagactttgctgtggactttgagaagatctacaagtacttgtcctctgtctcccgaagtggccgcagccccgagctctcagcagctgagtccgctgtggtcctcgacctgctcatgtcacttccagaggagctgccactcctgccctgcacagccctggttgagcatatgacggagacgtacctacgcctgacagccccccagcccattcccgctggagggagcctggggcctgcagcagaaggggatggggctggctccaaggcaccagaggagacccccccagccaccgagaaggccgagcacagcgaactgaaatcgccttggcaagcagctgggatctgtcccctgaacccgttcctggtgcccctggagcttctgggtcgggcagccacccctgccaggtgaggggcatggcgggcaggaggccacaccaggccccccgccctgcccctcggttctgctcggctggccctggctctttctgaggatcccgtcatgggggaaggtccttgagatgatgctcagctgtggggcgggcctctaagatgccccatactttgggggtctcagaaatggaacccccgttgtacaggggttgggtgggggttgcaggactccactcacaagcctcctgatgtcaaggacaggcggacagggctggcctcccccagtccccaagccccactgtgccttgttgtctgctggggggccatagctggcactgcccaccgtaaaggccctcgcacattttcccccttcctgtacacctcggggccagcatcctcaccttcttcaactgaccagtcgtggttactccctgctgccaggtccttccccttcccgggggtattctgtgaccatgaataaagttatcattctctttctctttca

SEQ ID NO: 31367 - DNA, 429 bp, Homo sapiens
catactttgggggtctcagaaatggaaccccgtttgtacaggggttgggtgggggtgcaggactcactcacaagcctcctgatgtcaaggacaggcgggcagccacccctgccaggtgaggggcatggcgggcaggaggccacaccaggccccccgccctgcccctcggttctgctcggctggccctggctctttctgaggatccccagtccccaagccccactgtgccttgttgtctgctggggggccatagctggcactgcccaccgtaaaggccctcgcacattttcccccttcctgtacacctcggggccagcatcctcaccttcttcaactgaccagtcgtggttactccctgctgccaggtccttccccttcccgggggtattctgtgaccatgaataaagttatcattctctttctctttca

SEQ ID NO: 31368 - DNA, 2079 bp, Homo sapiens
agctccgcccatcggagaagcgaccttacagcgcctgcctctttctgagcggcatgaagccacctcccaggcggcgagcggccccggcgcgctatctgggcgaggtgaccggtcccgcgacctggagcgctcgcgagaagcggcagctagtgcgactcctgcaggcgcggcagggccagccggagccggacgccaccgagctggcccgggagctgcggggccggagcgaggctgagatccgggtcttcctccagcagctcaagggccgcgtagcccgggaggccattcagaaagtgcatccgggtggccttcagggaccaaggcgccgggaggcacagcccccagcccccatagaggtctggacggatctggctgagaagataacagggccactggaagaagccctggcagtggctttctcgcaggtgctcaccatcgcggccacggaaccggtcaccctcctgcactccaagccccccaagcccacgcaggcccgtggaaagcctttgctcctgagcgcccctggaggacaggaagaccccgcccctgaaatacctagctctgcccctgctgcacctagctccgcacccaggactcctgaccctgcccctgagaaaccttctgagtcgtcggctggtccctccactgaagaagactttgctgtggactttgagaagatctacaagtacttgtcctctgtctcccgaagtggccgcagccccgagctctcagcagctgagtccgctgtggtcctcgacctgctcatgtcacttccagaggagctgccactcctgccctgcacagccctggttgagcatatgacggagacgtacctacgcctgacagccccccagcccattcccgctggagggagcctggggcctgcagcagaaggggatggggctggctccaaggcaccagaggagacccccccagccaccgagaaggccgagcacagcgaactgaaatcgccttggcaagcagctgggatctgtcccctgaacccgttcctggtgcccctggagcttctgggtcgggcagccacccctgccaggtgaggggcatggcgggcaggaggccacaccaggccccccgccctgcccctcggttctgctcggctggccctggctctttctgaggatcccgtcatgggggaaggtccttgagatgatgctcagctgtggggcgggcctctaagatgccccatactttgggggtctcagaaatggaacccccgttgtacaggggttgggtgggggttgcaggactccactcacaagcctcctgatgtcaaggacaggcggacagggctggcctcccccagtccccaagccccactgtgccttgttgtctgctggggggccatagctggcactgcccaccgtaaaggccctcgcacattttcccccttcctgtacacctcggggccagcatcctcaccttcttcaactgaccagtcgtggttactccctgctgccaggtccttccccttcccgggggtattctgtgaccatgaataaagttatcattctctttctctttcaaaaaaaaaaaaaaaaaaaaaaaaaaaaaaaaaaaaaaaaaaaaaaaaaaaaaaaaaagggggggggggtaaaatttcccccggggggggccaaagtttatgagctcatcaccggttttttggttggagaagaggcgctcctagatgagagaagctctataatataaaagcaagaggcagaggggagcgctggttaaaaaaaaaggtgtggatcagtgggggaaacaccgttgacagcggaggaaatctgttggggaaaggaacccatatctcttctggtgggggggggcaacaatatagtggggcacaaactatcatccactatagaagaatattatagaagagcacttcgagaggggataataataataaatattttgaagggtgttattagtggttgttctaatacaaacgggtataatttatcagtggtgcgggctgtgaataaaaattttgtgctccatcaagggaagtattaatattgaggaaacaaattttaattacgaggtggatgattgtaaataaaaaataagggc

SEQ ID NO: 31369 - DNA, 1630 bp, Homo sapiens
agctccgcccatcggagaagcgaccttacagcgcctgcctctttctgagcggcatgaagccacctcccaggcggcgagcggccccggcgcgctatctgggcgaggtgaccggtcccgcgacctggagcgctcgcgagaagcggcagctagtgcgactcctgcaggcgcggcagggccagccggagccggacgccaccgagctggcccgggagctgcggggccggagcgaggctgagatccgggtcttcctccagcagctcaagggccgcgtagcccgggaggccattcagaaagtgcatccgggtggccttcagggaccaaggcgccgggaggcacagcccccagcccccatagaggtctggacggatctggctgagaagataacagggccactggaagaagccctggcagtggctttctcgcaggtgctcaccatcgcggccacggaaccggtcaccctcctgcactccaagccccccaagcccacgcaggcccgtggaaagcctttgctcctgagcgcccctggaggacaggaagaccccgcccctgaaatacctagctctgcccctgctgcacctagctccgcacccaggactcctgaccctgcccctgagaaaccttctgagtcgtcggctggtccctccactgaagaagactttgctgtggactttgagaagatctacaagtacttgtcctctgtctcccgaagtggccgcagccccgagctctcagcagctgagtccgctgtggtcctcgacctgctcatgtcacttccagaggagctgccactcctgccctgcacagccctggttgagcatatgacggagacgtacctacgcctgacagccccccagcccattcccgctggagggagcctggggcctgcagcagaaggggatggggctggctccaaggcaccagaggagacccccccagccaccgagaaggccgagcacagcgaactgaaatcgccttggcaagcagctgggatctgtcccctgaacccgttcctggtgcccctggagcttctgggtcgggcagccacccctgccaggtgaggggcatggcgggcaggaggccacaccaggccccccgccctgcccctcggttctgctcggctggccctggctctttctgaggatcccgtcatgggggaaggtccttgagatgatgctcagctgtggggcgggcctctaagatgccccatactttgggggtctcagaaatggaacccccgttgtacaggggttgggtgggggttgcaggactccactcacaagcctcctgatgtcaaggacaggcggacagggctggcctcccccagtccccaagccccactgtgccttgttgtctgctggggggccatagctggcactgcccaccgtaaaggccctcgcacattttcccccttcctgtacacctcggggccagcatcctcaccttcttcaactgaccagtcgtggttactccctgctgccaggtccttccccttcccgggggtattctgtgaccatgaataaagttatcattctctttctctttcatttttttttttttttttttttttttttttttttttttttttttttttttttttttttttttttttttttttttttttttttttttt

SEQ ID NO: 31370 - DNA, 1426 bp, Homo sapiens
gcctcggggtaatgcgtgggtgaggcgagggctaaacgggcggaatgaactgggagtaagatgctgccgagtccgggcgaaaagcaacgcatgctgttggacaggatacgagcttgaaatccgggtcttcctccagcagctcaagggccgcgtagcccgggaggccattcagaaagtgcatccgggtggccttcagggaccaaggcgccgggaggcacagcccccagcccccatagaggtctggacggatctggctgagaagataacagggccactggaagaagccctggcagtggctttctcgcaggtgctcaccatcgcggccacggaaccggtcaccctcctgcactccaagccccccaagcccacgcaggcccgtggaaagcctttgctcctgagcgcccctggaggacaggaagaccccgcccctgaaatacctagctctgcccctgctgcacctagctccgcacccaggactcctgaccctgcccctgagaaaccttctgagtcgtcggctggtccctccactgaagaagactttgctgtggactttgagaagatctacaagtacttgtcctctgtctcccgaagtggccgcagccccgagctctcagcagctgagtccgctgtggtcctcgacctgctcatgtcacttccagaggagctgccactcctgccctgcacagccctggttgagcatatgacggagacgtacctacgcctgacagccccccagcccattcccgctggagggagcctggggcctgcagcagaaggggatggggctggctccaaggcaccagaggagacccccccagccaccgagaaggccgagcacagcgaactgaaatcgccttggcaagcagctgggatctgtcccctgaacccgttcctggtgcccctggagcttctgggtcgggcagccacccctgccaggtgaggggcatggcgggcaggaggccacaccaggccccccgccctgcccctcggttctgctcggctggccctggctctttctgaggatcccgtcatgggggaaggtccttgagatgatgctcagctgtggggcgggcctctaagatgccccatactttgggggtctcagaaatggaacccccgttgtacaggggttgggtgggggttgcaggactccactcacaagcctcctgatgtcaaggacaggcggacagggctggcctcccccagtccccaagccccactgtgccttgttgtctgctggggggccatagctggcactgcccaccgtaaaggccctcgcacattttcccccttcctgtacacctcggggccagcatcctcaccttcttcaactgaccagtcgtggttactccctgctgccaggtccttccccttcccgggggtattctgtgaccatgaataaagttatcattctctttctctttca

SEQ ID NO: 31371 - DNA, 1164 bp, Homo sapiens
  misc_feature (1)..(1): n is a, c, g, or t
nttgacgtttgctaaaaataaagccactgaaaaccgtgcatggttttggagggtcacatggggcaggaaccggtcaccctcctgcactccaagccccccaagcccacgcaggcccgtggaaagcctttgctcctgagcgcccctggaggacaggaagaccccgcccctgaaatacctagctctgcccctgctgcacctagctccgcacccaggactcctgaccctgcccctgagaaaccttctgagtcgtcggctggtccctccactgaagaagactttgctgtggactttgagaagatctacaagtacttgtcctctgtctcccgaagtggccgcagccccgagctctcagcagctgagtccgctgtggtcctcgacctgctcatgtcacttccagaggagctgccactcctgccctgcacagccctggttgagcatatgacggagacgtacctacgcctgacagccccccagcccattcccgctggagggagcctggggcctgcagcagaaggggatggggctggctccaaggcaccagaggagacccccccagccaccgagaaggccgagcacagcgaactgaaatcgccttggcaagcagctgggatctgtcccctgaacccgttcctggtgcccctggagcttctgggtcgggcagccacccctgccaggtgaggggcatggcgggcaggaggccacaccaggccccccgccctgcccctcggttctgctcggctggccctggctctttctgaggatcccgtcatgggggaaggtccttgagatgatgctcagctgtggggcgggcctctaagatgccccatactttgggggtctcagaaatggaacccccgttgtacaggggttgggtgggggttgcaggactccactcacaagcctcctgatgtcaaggacaggcggacagggctggcctcccccagtccccaagccccactgtgccttgttgtctgctggggggccatagctggcactgcccaccgtaaaggccctcgcacattttcccccttcctgtacacctcggggccagcatcctcaccttcttcaactgaccagtcgtggttactccctgctgccaggtccttccccttcccgggggtattctgtgaccatgaataaagttatcattctctttctctttca

SEQ ID NO: 31372 - DNA, 1191 bp, Homo sapiens
gcctcggggtaatgcgtgggtgaggcgagggctaaacgggcggaatgaactgggagtaagatgctgccgagtccgggcgaaaagcaacgcatgctgttggacaggatacgagcttgaaatccgggtcttcctccagcagctcaagggccgcgtagcccgggaggccattcagaaagtgcatccgggtggccttcagggaccaaggcgccgggaggcacagcccccagcccccatagaggtgaggcagatgaacaggctgagaaaccttctgagtcgtcggctggtccctccactgaagaagactttgctgtggactttgagaagatctacaagtacttgtcctctgtctcccgaagtggccgcagccccgagctctcagcagctgagtccgctgtggtcctcgacctgctcatgtcacttccagaggagctgccactcctgccctgcacagccctggttgagcatatgacggagacgtacctacgcctgacagccccccagcccattcccgctggagggagcctggggcctgcagcagaaggggatggggctggctccaaggcaccagaggagacccccccagccaccgagaaggccgagcacagcgaactgaaatcgccttggcaagcagctgggatctgtcccctgaacccgttcctggtgcccctggagcttctgggtcgggcagccacccctgccaggtgaggggcatggcgggcaggaggccacaccaggccccccgccctgcccctcggttctgctcggctggccctggctctttctgaggatcccgtcatgggggaaggtccttgagatgatgctcagctgtggggcgggcctctaagatgccccatactttgggggtctcagaaatggaacccccgttgtacaggggttgggtgggggttgcaggactccactcacaagcctcctgatgtcaaggacaggcggacagggctggcctcccccagtccccaagccccactgtgccttgttgtctgctggggggccatagctggcactgcccaccgtaaaggccctcgcacattttcccccttcctgtacacctcggggccagcatcctcaccttcttcaactgaccagtcgtggttactccctgctgccaggtccttccccttcccgggggtattctgtgaccatgaataaagttatcattctctttctctttca

SEQ ID NO: 31373 - DNA, 1523 bp, Homo sapiens
gcctcggggtaatgcgtgggtgaggcgagggctaaacgggcggaatgaactgggagtaagatgctgccgagtccgggcgaaaagcaacgcatgctgttggacaggatacgagcttgaaatccgggtcttcctccagcagctcaagggccgcgtagcccgggaggccattcagaaagtgcatccgggtggccttcagggaccaaggcgccgggaggcacagcccccagcccccatagaggtctggacggatctggctgagaagataacagggccactggaagaagccctggcagtggctttctcgcaggtgctcaccatcgcggccacggaaccggtcaccctcctgcactccaagccccccaagcccacgcaggcccgtggaaagcctttgctcctgagcgcccctggaggacaggaagaccccgcccctgaaatacctagctctgcccctgctgcacctagctccgcacccaggactcctgaccctgcccctgagaaaccttctgagtcgtcggctggtccctccactgaagaagactttgctgtggactttgagaagatctacaagtacttgtcctctgtctcccgaagtggccgcagccccgagctctcagcagctggtgagaagggtgagggagggggcaggagcagagggatcaagggtccctggcagcaggcaggggtgtccccttacccctctcctccatccatcactagagtccgctgtggtcctcgacctgctcatgtcacttccagaggagctgccactcctgccctgcacagccctggttgagcatatgacggagacgtacctacgcctgacagccccccagcccattcccgctggagggagcctggggcctgcagcagaaggggatggggctggctccaaggcaccagaggagacccccccagccaccgagaaggccgagcacagcgaactgaaatcgccttggcaagcagctgggatctgtcccctgaacccgttcctggtgcccctggagcttctgggtcgggcagccacccctgccaggtgaggggcatggcgggcaggaggccacaccaggccccccgccctgcccctcggttctgctcggctggccctggctctttctgaggatcccgtcatgggggaaggtccttgagatgatgctcagctgtggggcgggcctctaagatgccccatactttgggggtctcagaaatggaacccccgttgtacaggggttgggtgggggttgcaggactccactcacaagcctcctgatgtcaaggacaggcggacagggctggcctcccccagtccccaagccccactgtgccttgttgtctgctggggggccatagctggcactgcccaccgtaaaggccctcgcacattttcccccttcctgtacacctcggggccagcatcctcaccttcttcaactgaccagtcgtggttactccctgctgccaggtccttccccttcccgggggtattctgtgaccatgaataaagttatcattctctttctctttca

SEQ ID NO: 31374 - DNA, 449 bp, Homo sapiens
gagctcatagaagcctcattccgccgcctctttcctttctagatccgggtcttcctccagcagctcaagggccgcgtagcccgggaggccattcagaaagtgcatccgggtggccttcagggaccaaggcgccgggaggcacagcccccagcccccatagaggtgaggcagatgaacagggtgaggctgtccagggcaggtccctggtgggtaggtgggagttgcgggggataacctgattaggggatccccaggaggagcagggcttggggggccattgcaggctgatccctgggctgaccctgtacctctggcttcactcaggtctggacggatctggctgagaagataacagggccactggaagaagccctggcagtggctttctcgcaggtaccgccattcccccaggcaggtcagggtgtcccagaggacagggtcacatgggc

SEQ ID NO: 31375 - DNA, 565 bp, Homo sapiens
caggaaaattagctcattagaacaatgacaccattaagggacattataagggtcctggggctgaggtgggaagatttttctatctgccccatatagtttacccttccttgccttgaaaatgaatattatagaacagagtacagctcttaaaagttattagtatcattattattatagttgttatataatactttaattaagaaagatgaaaaccttttttctttcctaagtcagcccaatggtgctattttacatatcaacacagttgaaaggaagtactgttattttgggctgcagtgtttcctccacatctaaagaaagcccattttgaaactggatactgcattaaaacaaagaaggaaaaattattttaactgtgtgcagtttttgaaattaggcatttgtactattttggttttacataattctcttgcattaacaatttactgttttgtgaatcatgtgtactaaagcaaattaagaaaaagaaaataattatctgtgaaagactttgtatattaaacaagtgacgcaaaccttagttgtggtttccacaatttttgcc

SEQ ID NO: 31376 - DNA, 534 bp, Homo sapiens
caggaaaattagctcattagaacaatgacaccattaagggacattataagggtcctggggctgaggtgggaagatttttctatctgccccatatagtttacccttccttgccttgaaaatgaatattatagaacagagtacagctcttaaaagttattagtatcattattattatagttgttatataatactttaattaagaaagatgaaaaccttttttctttcctaagtcagcccaatggtgctattttacatatcaacacagttgaaaggaagtactgttattttgggctgcagtgtttcctccacatctaaagaaagcccattttgaaactggatactgcattaaaacaaagaaggaaaaattattttaactgtgtgcagtttttgaaattaggcatttgtactattttggttttacataattctcttgcattaacaatttactgttttgtgaatcatgtgtactaaagcaaattaagaaaaagaaaataattatctgtgaaagactttgtatattaaacaagtgacgca

SEQ ID NO: 31377 - DNA, 577 bp, Homo sapiens
caactccaaaacccccttctacacataacaccatgctctcctaatggtaggaggagacaaaaatggcagccgcagttcagttttcagttggtggaatgatttttgtgcacctggtgaaatcactttcacccttaggtattaaaatctccaaacttcatacatgcaattaaaaattattttttatttttaaaaaatctttttccacatgttctatgcaatttttcatacaactcttccttaagaaactcctagaggatgtacgcaattaaaatgaagtcaactcagaaaaacacggctccaggaaagtggtgggttcaatgtaggaaaaaagtgaaggcaatatccaggtgaagagagatgaagagagagtccagaatgacaggagaacagcagccccagaaagcagtcagctcttactggagcaggagagaggactctgctaaatacatctccgcaaagatcaaattgatggaatacctgatgtgtttgaatgcactgagagacttacgcttatggcaaagtttaggggtgtgttaggaataggactattaagccaagcaaacaaaaaataatataa

SEQ ID NO: 31378 - DNA, 334 bp, Homo sapiens
tatttgtagtagagacggggtttcaccatgttagtcagactagtctcaaactcctgaccttaagtgattcacccaacttggcctcccaaagtgctgggattacaggcatgagccattgtgcctggccttaatcttaagtttaaatttaactgggcatcctgcatttttatttgttaaatctggcagccctactttcttcccaacaaaattcttaaagaagagctactatcttgttcacttctgtgtccccactgtaagcacagtatctttacaggctattcaatttttgctgaactaattaataaaaaatatggactaaacaaatataatatgt

SEQ ID NO: 31379 - DNA, 3150 bp, Homo sapiens
gaaaataaagtaagataaacatagtgattaggagcatgaggtttagaatcaatatcatcacctttttgtcctagcagtgccatttaagtagttgtggtactgttgatgagtttcctagatccccacccctttttaatttatttttagaaaaaaacattgattacatataaagcttagaattctccttaaacaactttcctcaatctctgtattttaccctcaagtataatcacttatacgtaatacatctttacacacacacaaccatatacacagacatagatgcagttggttctcattattcaaagagtacagagttaggttcctacaagcctctggtcacaacattttatctactgattaatatataaccacgtattatgtgtgtttctgtttaaagattcctcatttaatatatattgttgattcactaacattaagttcatggtcaacatcactctaactcatacctgaaccaagcttatctaatgtgcatatttttccccataaggcctttttgcacttaggaatgccagacagcactttggcactacatttgggggccattttaaacagtgaagccaccaaaaacacaaaaatgtggcaccaaacagatggtgaaagggctgttgtggatagtaagagctgaaactagaaagcagcagagatcacagagttcagcttcagctggggacgtgtgcatatggtaactcaaatattttgccactttgcacatgtctgcaatgaccacagaaataccacaagtattggtttgggggttacacatgaattttagcaaacaggcaaattcacaaatatggaatctgtaaatgatcaagatcaactgtatatacgcatgcatacactcatataaatatataggtttgtatgggctgttttaatttattatataatgtaaaaacattctgcagcatagtttttttaagttaatgatgtggcttgtagacgtttttatgaagctacactagatcagttgtattcttatgaagtgatacataattattcataatagggatctaccataatttaaccattcgtctaatgatagtgtaagtttcaatttcctcataggtaaatagtaaataaaaataaaagatgtgcctttgagagttaaatgagcttagtacattgccctacaacttaagcacttaatgagtgtgagttaataaaaattaaagggctttggagtcagacagacatgggttccacattccatctcttccctccctagctgtgagacttcactgaattactgaatctctttctgtgtaaaagaggtagatgaagaacaaaaatagtaataaccttaagattattgaatctctctaagtcatctcatctgaaactggagattataatacttcattgtttgtgtgacaatgaaatgtaatcatacctaaagtacctaccacacaggaactcagtgttttttccttcttagataatttgatctcaagaaaatggtgttactttataaagagtagcattacagaatcaatatcttcttttaaaaatataacacagcattgtacttctacatactcagaacgtaagagaaagaactaagccattttagtacagtgcttagactgtatactttcagtgaggtatagtctacaaacaaaagcaaagaaatgttgagtttggttggtagtggtacatatatagcaaatctagaactcttatgtattttaagttgagcaaatgagtacatatgatgttgctgggagtcagggttttcttggtggaagaaaggagatatggaatggaataagagaaggaagaatcctctggggctttaagaaattagaattaacaataaaagcatgaactataatagtgtaaaacaatgtatgcatatgataggcatatatgcataggcctagaaacaatgacaccctggcaattagcacagctgttcttgtttggtttttaaataatagtcacagctaaaagaaagtaggactccagagctgtgtaaagatgaatttggatatataccagaaagtaaggaagtaccccaaaattaatgggtacatttcaaaaagacacagaagccagctcaaaaaggctctcactggtcaaatctaggacaatatgagtatcagaatgaatgatgacagtaatgagtataacattgagcaagagaagaatccctgagtacacagtgatgcgaacaaataagtaaaatgggaggaggggaagaaacagctcttctttacaatagaatgtcaacaactgtagaaggagtcatagagtcagaaaatcaccatcatataactgataattgtttcagcaagaatcatcaatgattgctaaattattggatgcagggctgtgggagaacaggatatttacacagtctcaaactatctccctatcaatagtttattaattacaaaggtagaaaagaacacctttaccttggagaaacttggcatataccaacttaagtagatgatcaaagttaacatcatcagtattgggataaactgataccacatgccttctgaggtgatgcactgaggacacacaatatcacttctgtagcattcttgccaaaactgcataaactgaatctgatcatgaagaaacaatcaggcaacccaaattcaacacattccactcataagtgttctgtactcttcaaaaatattcattaaagtcaaagagaggctgaggaactatttcaaactcaggagacttggaaactaaatgcagtgtgtgatcttggattggattttagattagtaggaaacatgactgtaaaaaagtgactgaaaaataactggtattattgggacatcaatgttaaatttcatgaatttaatatatattggttatgtaagttaatgttcttgttctgagctgaaattagtttgagcctatagggggcaaagctgtctaaaactcccaaatagttctgcaaaaagattttcagtggggtacacacatggagagagacagagagagagagagagagagaacatatttgatgaaacattaattgatgagatgaatctaagtgaaggctatatggggtgttcattgcacaattcttgaaacttttctgtgggtttgaaatttttcaaaataaaaagttgaaaaagaagcaatttggaaatttca

SEQ ID NO: 31380 - DNA, 2337 bp, Homo sapiens
  misc_feature (1452)..(1452): n is a, c, g, or t
  misc_feature (2035)..(2035): n is a, c, g, or t
  misc_feature (2148)..(2148): n is a, c, g, or t
  misc_feature (2164)..(2164): n is a, c, g, or t
  misc_feature (2200)..(2200): n is a, c, g, or t
ctaagacaccagatatttgttattttgtagttcgagtattttttaaaatacgaaattggcttttcggtgtgtgaaaagggctacttactagacgcttgtttttaaattaacattcaattaattaaagctagactctttatattcttaggcttggtatactatttatatgttttgtaataagtgtataaaaataatacctttgactttgtgtaaaaataatgcttttgacttgttctttgatgaatgtttattaaaatcccccaaaacaactaatgccattaataattttagttaagtcctttaaacattccagactacacatgtaaatttaatatatcaaattgactcaaccactccaaaaaacctaataaagtataagcactgaagtaatcaataaatcaaaattgtagaaattataagtcagagtctaacattcaaatactgtttacaacgtgaattagctaacaccttaacgaattcaaatcagttacacacataaaaattacaaagtcaagataacttctcattctggcagtgtggcagaccacgattaacttgaaaatctatctacaaagatttaaaaaaatggaaaaactaagaaaggacaaacccccagtgccaaaaatgaagtaggagccagcatggcaggcaaagagctaacttgccagctaccctggagaggagggcatacaccttttttagacacctgggttttattgctcaagtaactgtgtagggaccagagataaaacgtacggaccattaacgccaggtaatgggaactgagactcttaacataaattctagacttaatgtgttatggagttaaaggactgtacattatgtgaaggaatgaactggaaaaaaccttagtaccaacataagagatgacaaggtaacatggacgtttaggctccaggaaactttaagacaaattaacgtaaaaatggtttctgggctggtaatacccttggtgtttctgttaaaaacatgaagaacggctgggcgtggtggctcacgtctgtaatcccagcactttgggaggccgaggcgggtggatcacctaaggtcgagagttcgagaccagcttgaccaacctggagaaaccccatctctacttaaaaaattaaggcatcctacatgcctgtaatcccagctactcagaaggctgaggcaggagaatcgcttgaacctgggaggcggaggttgtggtgagccgagattgcgccattgcactccagcctggggaacaagagaaactctatctcaaaaaaaaaaaaaaaaaaaaaacctgaaaaacattttctggaggaaatttcatggtttagatcacaaggaatttcagataaagcaagccttgcaaaagatatgttcatagtaaattgcagagctttaggaaacatttcactgaaatgagagtcaatgacaaataggattagagcctctaacagnttatctgagagaatatttttatgtttaaaattgttaaaataaacctaaaggaaggaatcaaccctaagatcaaggttggccgggtgcggtggctcatgcctgtaatcccagccctttgggatcctgaagcaggtggatcacctgaggtcagaagttcgagaccagcctggccaccatggcgaaaccccatctctactaaaagtataaaaattgccaggtgaggtggcgggaacctgtaatcccagatccttgtgaggctgaggcaccagaattggttgaagctaggaggcagaggttgcagtttgagacactgcactccagcttgggtgacagagcaagactctgtctcaaaaaaaaaaaaaaaaaaaaaagatcaaggtgttaataaaacaagccacatagatttgaaaaagaatcaagtaaaacgtttagaattaattaggaaaagtgaataagttggaatagcagacctagcagaagaaagaattacagatatgatggatgtgacttatctcacagatgtggaaggtagatgtgatcttccagcattcaattcagggggataagatatgaaaatgaaagntttcaggcatggtggctcatgcctataatcccagcactttaagaggctgaggtgggtagatcgcgtgagctcaggagtttgaaaacagcctgggcaacgtgatgaaactcccntctctacaaaatacanaaaagatcagctgaatgtggcggtatgcatgtgtantcccagctactcgggaggttgaagtgggaggattgcttgagcccaggaaatcgaggctacagtgagctgtgattgtcctacagcacttcagccttggcaacagagcgagaccctgtcccccccccccgcaaaaaaag

SEQ ID NO: 31381 - DNA, 407 bp, Homo sapiens
tatactctgtgatgtttgcacaatgaagcagttgcctaatgacacatttctcagaatgaatcctgttgtcaagtgacacatgactttatttgataatgaatacaagaccatttcatcttgatcccagatagatacattgagatgcattgatgttctctaagtgaacgtgactcatcctgttctttattagttattgactgtttccgtagtcacctctactttttgatcgttcaccaggttttgaaatcactgtgtaggcagcacccactatgcagttcaaaactttatgtaggcctgttttgtactgggctccaggttcagtgctggcaaataaacaagttccttgttctcacagaatgtgtatggccttgggtgccaggcaccgttccatgccttaacctacattc

SEQ ID NO: 31382 - DNA, 446 bp, Homo sapiens
aaaaaaaaatggaataaacaggtaatttctcatccagttaggttgtgactgaagaaatgcacagccccaaagaatattaccaaaatgatgcaggcggggcaagccttgtgaactgaaggacaaaatgcttttgtgagtcctagaactgttttggtttgcatgtcatacttttccgattagtgaaatcaagtgtctttgagttgtttctgtgtattgaaaccatctacacatttggtaaatactacgggttaaatctttctctttagataaaatcttcaaagtaagtgattttcaaaatttaaaaaagctctactagaaactacttggttaagagtctaatgaagctcagaaatatttactttgatctcttgggtaaatggctaattaaaaagccgcatgtaaatgatgtttccctgtgagtccctgtgctgtcagcccgagtcaat

SEQ ID NO: 31383 - DNA, 357 bp, Homo sapiens
aggaggccataggggtgtggtgtggcagtgggaagaaagacaagtgcagtccaagagcagaggctgacaataagaaaggtgcagcaagggtccaaagatcatgatgaagtttggagtcataagactcagtgtggaaaaggcagagtacagagcattgttttcatctcacttctaattaatccttgtttagatcagcatttgtctaaccattgaggagtccataatggggtctacagaagaggccttgaggttaaaataggggtgagagatagaggctgaggtgtcaggtggcaagatttgttttgtagattagtacctgcctcacctttaaagcaaggcataccctaagaaaaaaag

SEQ ID NO: 31384 - DNA, 323 bp, Homo sapiens
acaagtttattatatatagtttatggtcatatgtatcttataaaaattttgaagcccatccccatggatttattataatacagctctgatatatcttaaagttaacccgttttccgtagatgttaagggctttactggttgaggtaacctatttcaaatggtctgttgggttttgtggtaccttgtcaagaattcaataagaattctcaggctgtctgtattttcttttaggactttggagatctctcaagttgtactgttttctagtattcctgagtatattcctttggtaacgtgaaagtaaatagtttatatttgatgat

SEQ ID NO: 31385 - DNA, 1162 bp, Homo sapiens
gtctcctgggctcaagccatctgcttgcctcggccacccgaagtactggggttacaggcatgagccaccgtgcttgtccagttttacctgtttttgaacctcatataaatggaatcatagagcataaaagctctttgatgtctgatttcttttactcagcaaaatggttttgagattcatctttgttcttgcatatatcagtagttcctttttttttttttaatttctgtgagaattccactatgtgaatataatgcaggggtttttgcttcttagttcaactaaatccaggttcttgtctcacaaccaggagaaattaggcatatggacacattgaagggtgaggagagtggaatttattaagcgaaaggggagctctcagcaaagagaggggtcccgccagctggcttccacctcaggttgaataccaggccaccacactccctagcctaaggcgtgaattcctggtggctccacccccttcccccagtgtgcagacgggcccttagtctgagccgctccacgttgatttatttcccttactgcacatatgttaagtgatggaatttttcactgtgggcgtatttaggcaagcctcctgtgcatgatgacctgggcaggtcgaaggttctccggggacccttccctctttgcctaggcattttgccgtctcttgactcttatcaaatatataacagtatttaaaaattgattctcatgttgatggacatttgggcacttttcagtttggggctattatgaataaagctaccacgaacatttatgtgtaagtctttgggtatatgtatgtttcattcaatccatgactaggagcagaattgctgggtgataggatatgtagatgtttaactttataagaaattgttcaactgtttttcaaagtgctgtaccaccttacactctgatcagctttatattagagttcatttgcctcatgtgtcagccaaactgacaacacgctgggtgttgtcagtttttaattttaggtattcttgtggactagtatttcctcattttaattttgttattgatccagtgattggtggtggtgagttttttatgtgcttaataggcattcacttatcttcttttgtgaatgttaagtcttttgtctattcttttaaagttgtttttttaaaaa

SEQ ID NO: 31386 - DNA, 132 bp, Homo sapiens
cttataggactgaacctaaaggcatgacatttccatacttgtcacaagcacacactgattctgcccttgtcacttctgtgctcactcttgtggctctatcctcctcctgcccttccgccttccactcctccc

SEQ ID NO: 31387 - DNA, 292 bp, Homo sapiens
caaaaattagccagacatggcagtgcgcgcctgtagccccagctactggggaggctgaggcaagagaatcgcttgaacccagtaggtggtggttgcagtgagccaagattgcaccactgcactccagcctgagcgatagagactgcatctgaaaacaaacaaacaaaaagaataagataccattggaaatttactcatgcagctttcatgatgtaaccaggcatggtggtgcacacccgtagtcctagctcctcaggaggctaaggtggggaggattcattgagatgaggag

SEQ ID NO: 31388 - DNA, 361 bp, Homo sapiens
gaaaacgtttacaagaatattcagtgaagcattatttgcaagagtgaatagaggctcatcatccagagactggataaattgtggagtataaatataacggaacactacacagcatctaaaataagctaactagaactgtattcattgacttgaacaaatgccaaaaatgatttaagtaaaaagcatgttgcagaatgatacataagtatatgcagtttaaaaaaagtgcaaaacaagctgaggtgcagtggtgcgcacctataatcccagctacttgggaggatgaagtggaaggattgattgaggcaaagggtttgagactatcctgggcaatcataatgagatcctatctcaaaaaaat

SEQ ID NO: 31389 - DNA, 769 bp, Homo sapiens
tgatccacccgccttggcctcccaacgtgctgggattacaggtgtgagccactgcactcagccagtgtggggagatcttacctggagaaaaggagaggcctgagaacacccagccttcccagcactctggggctgtagcctctcaactcttcttggctgctcttctgagaataaaagaattctcacataccaatttcagggggcacagctggaaaatagggagcagtggtgattaagaactctgcctccttctagctgctctgagccacagtttctttataggcaaaaggaaatactcatagtgtatgtttccaggttgctgtgagataatgtagcataaagaattgagagggcagtgctgggaacataccaagcagggatgaacttgaaaaacatgtaacaaccagtaagggcagaggaagctccttctttgtagattggaggtcaagattgtgctggagcaggttctggagaacacttcagtgccagcattaaccgattagctgctgggctgtggggagtttccagagaggcattgggtgaggaagaggggtgatgctatttataatcaactatgaaattatttaaatattttaataataagctatggctgtatactatgtaaatagtaactgtagttctaagtattagtaaatattaatggttaattagtataaagattagctatagggcttttatagctagattccctcttccccaacacgcacacatatacctccattcttatttatttatttaatttattctt

SEQ ID NO: 31390 - DNA, 478 bp, Homo sapiens
atataacatcagataggcctgggttttaataccatctctgctatctactccaagtatgggaatttaggcaccttcccttttctttctgagctttatttttcttttccattaaatagtataataagtacccccatttgatttttagatggactctgagataatgtactacatgccaggcaccttgtggtactcaaataaatgtctactattatgtacatatatttctctttttgtggggaactggtacaagtagttctcatgtagttataaaaccacagagaatacattgaaggaactccctatttttaaaagcctgtatcaggaatgccctggataaactagagtctttgtttatcagactctaatgattaatcagactctcattcttatattgagtgacaggcagcaaaacaaaaaaagagtatttggctgttaaaaaaagagagagagatgtcctatgagtcaccagagggttaaa

SEQ ID NO: 31391 - DNA, 385 bp, Homo sapiens
aaaatgccatggtacaaaaaaaaaatcatcttttatttctcacgcttgctgggcagctggggattagctgttctcagctgggtttacctggcatgactctgctttagggtgtcttaccctccttggagcagctggctggcccagggaagtcttctagcattggtagaagtacaagaaggcaagcagaaacacatgaagtctcttaaggcctaagtgcagaactgaacacgattacttccatttcattctgttgaccaaagcaaatcatgtggctgaacccaaaatcaacgggtagggaaatatactccactccttcagtggaaggaacttcaaagtcgtagcaaagggcatggatacagtgcatgatgaagtcctggggccaata

SEQ ID NO: 31392 - DNA, 298 bp, Homo sapiens
aatcaaatgcccagtgataatttaatgtgtcatttactcttgcaaaagtatacatttttacccataatgaagaggacactaattcaagaaagtatcatagaaaattagatattttttctactctgaagcaatcactgattgtcagtggattctatacactaaattatttcagaattcatacacctgaaaattgtcaaatatataaactctaattattaaattattgatatttagaagaaggatttgtgaagcatttgtgccagtttttccctgtcatttatatatcaaaaaagtactc

SEQ ID NO: 31393 - DNA, 1037 bp, Homo sapiens
gacggtggccgacaggctgcgcccgcccgcgcccggggtgatgcagttgccccccgcgctgtgcgcccgcctcgctgcggggcccggggcggcggagccactgcctgtagagcgggatcccgcggctggggccgcgccctttcgcttcgttgcgcgccccgtgcgcttcccgcgggagcaccagttcttcgaggatggggacgtgcagcgccacctctacctccaggacgtgatcatgcaggtggccgacgtgcctgagaagcccagggtgcccgcgtttgcctgccaggtggccggctgctgccaggtgttcgatgccctggacgactacgagcaccactaccacacgctgcacggaaatgtttgctccttttgcaagcgggccttcccttccggacacctgctggacgcccacatcctggagtggcacgattcgctcttccagatcctgtctgagaggcaggacatgtatcagtgcttggtagaaggctgcacagagaagttcaagaccagcagagaccggaaggatcacatgcccagcctcagcagaagccccaggggacagtggagagcggtcagaaggggaggccatggaaatctgctctgagcctgtggcagcctcccctgcaccggcaggtgagaggcggatctacagacatagaataccctctaccatctgctttggtcagggtgccgctcgaggatttaaaagcaacaagaagaaaaccaaacaatgctgatagactcagaaaaggagtggggggcagtcaccactgctgggcgtggcatccgccttgggcctttctccgaccttctggtgtggccgccctgggggccaggccttcgccatcctccccatccttgttcctcagcaaatggcattagcagctgtcatcagaagctgtgagggacccacagattttggaaacgacctggacacactatttgggaaggagatgtggacggcctgtctcctcctgcagggcccaccctaagaatgtatttttaaacacatgaaataagtatttttcactgaa

SEQ ID NO: 31394 - DNA, 1096 bp, Homo sapiens
gacggtggccgacaggctgcgcccgcccgcgcccggggtgatgcagttgccccccgcgctgtgcgcccgcctcgctgcggggcccggggcggcggagccactgcctgtagagcgggatcccgcggctggggccgcgccctttcgcttcgttgcgcgccccgtgcgcttcccgcgggagcaccagttcttcgaggatggggacgtgcagcgccacctctacctccaggacgtgatcatgcaggtggccgacgtgcctgagaagcccagggtgcccgcgtttgcctgccaggtggccggctgctgccaggtgttcgatgccctggacgactacgagcaccactaccacacgctgcacggaaatgtttgctccttttgcaagcgggccttcccttccggacacctgctggacgcccacatcctggagtggcacgattcgctcttccagatcctgtctgagaggcaggacatgtatcagtgcttggtagaaggctgcacagagaagttcaagaccagcagagaccggaaggatcacatggtgaggatgcacctgtaccccgcggacttccggtttgataagccaaagaaaagcagaagcccagcctcagcagaagccccaggggacagtggagagcggtcagaaggggaggccatggaaatctgctctgagcctgtggcagcctcccctgcaccggcaggtgagaggcggatctacagacatagaataccctctaccatctgctttggtcagggtgccgctcgaggatttaaaagcaacaagaagaaaaccaaacaatgctgatagactcagaaaaggagtggggggcagtcaccactgctgggcgtggcatccgccttgggcctttctccgaccttctggtgtggccgccctgggggccaggccttcgccatcctccccatccttgttcctcagcaaatggcattagcagctgtcatcagaagctgtgagggacccacagattttggaaacgacctggacacactatttgggaaggagatgtggacggcctgtctcctcctgcagggcccaccctaagaatgtatttttaaacacatgaaataagtatttttcactgaa

SEQ ID NO: 31395 - DNA, 824 bp, Homo sapiens
  misc_feature (797)..(797): n is a, c, g, or t
  misc_feature (806)..(806): n is a, c, g, or t
  misc_feature (820)..(820): n is a, c, g, or t
gacggtggccgacaggctgcgcccgcccgcgcccggggtgatgcagttgccccccgcgctgtgcgcccgcctcgctgcggggcccggggcggcggagccactgcctgtagagcgggatcccgcggctggggccgcgccctttcgcttcgttgcgcgccccgtgcgcttcccgcgggagcaccagttcttcgaggatggggacgtgcagcgccacctctacctccaggacgtgatcatgcaggtggccgacgtgcctgagaagcccagggtgcccgcgtttgcctgccaggtggccggctgctgccaggtgttcgatgccctggacgactacgagcaccactaccacacgctgcacggaaatgtttgctccttttgcaagcgggccttcccttccggacacctgctggacgcccacatcctggagtggcacgattcgctcttccagatcctgtctgagaggcaggacatgtatcagtgcttggtagaaggctgcacagagaagttcaagaccagcagagaccggaaggatcacatggtgaggatgcacctgtaccccgcggacttccggtttgataagccaaagaaaagcagaagcccagcctcagcagaagccccaggggacagtggagagcggtcagaaggggaggccatggaaatctgctctgagcctgtggcagcctcccctgcaccggcaggaataccctctaccatctgctttggtcagggtgccgctcgaggatttaaaagcaacaagaagaaaaccaaacaatgctgatagactcagaaaaggagtgganacagtcagnctgctggctatganttta

SEQ ID NO: 31396 - DNA, 543 bp, Homo sapiens
  misc_feature (23)..(23): n is a, c, g, or t
  misc_feature (38)..(38): n is a, c, g, or t
gtaaagaagtatgtgcaggaggngtggtacacaggganctcgtttcctattctgtgaaacagaagacattgtgatggagtggttcttcagctactggatggaaacatatgcctgttgatttgctgaaaaaacaaaaaaaatgaagaatgtgatctctgcagtacagttaccttaattactgtaatgtgcctaaatagtaaggctgccttctcaatgtaaccctctgtgcttaaaaaatttcattttgtgtgctttgtattcactacacaggaataagcactttttaaaaatgcagatacatactgcagttccctgataaaagctgaaaagaaaatttgagtattttaagttaagatgtgataaaaaatgtgcatgtgccataatcaaatatatatgaaaaggcagtgttccttgtatttatttttttttctttttgtggcaaaagaaacttaaacatactgtttcagtcacattgcattgtagtgtatggcctgtttcttgtatctttaaagacgttgctcaataaaacaaatcttgcaactg

SEQ ID NO: 31397 - DNA, 6922 bp, Homo sapiens
gacaacacctcacaaaagaaactgcagagatgttaaatcaactgcacattaaaagcagtggatgctttctttacctagaacgagttttagatggagttgtagaaaattttattatgttaagagaaattcgtgacatcccaggaactctaaatggtttatatctctggctgtgccaaagactttttgtaagaaaacaatttgcaaaggttcagcctattttgaatgtgattcttgcagcctgccgacctttgaccataacggaattatatcacgcagtatggaccaaaaacatgtcgttaactttggaagattttcaacgcaagttagatatcctctccaaacttcttgttgatggactaggaaatacaaaaatactgtttcattatagttttgccgagtggcttctggatgtgaaacactgtactcagaagtatttatgtaatgcagcagaaggacacagaatgttggctatgagttatacctgtcaagccaagaatttaacaccattggaagcacaagaatttgcattgcacttaattaactcaaacttacaattagagacagcggagttagctctgtggatgatatggaatggtacacctgtcagagattccctttctactttgatacccaaggaacaagaagtgctacagctgttggttaaagctggggctcatgtcaacagtgaagacgatcgcacatcatgcatagttcgacaagccttagaaagagaggatccattcggacattattagataatggagcttcagtaaatcagtgtgattcaaatgggagaacattattggctaatgctgcatatagtggcagtcttgatgtagtcaatttacttgtctctaggggagcagatttagagatagaagatgctcatggacatacaccactcactctagcggctagacagggacataccaaggtggttaattgtttgattgggtgtggagcaaatattaatcatactgatcaagatggttggacagcattaagatctgctgcttggggtggccatactgaggtagtttctgcactactttatgctggcgtaaaagtggattgtgcagatgctgatagccgaacagctttgagagcagcagcatggggaggacacgaggatattgtactgaatttgctacaacatggcgctgaagtgaacaaagctgataatgaaggtagaactgctttgatagcagcagcatacatgggacatagagagattgtggaacacctactggaccatggagcagaagtaaatcatgaggatgttgatggcaggactgcactctctgtagctgcactttgtgtgcctgcaagtaaagggcacgcatcagttgttagccttttaattgatcgaggtgctgaagtagatcattgtgataaagatggcatgactccactgctggtagctgcctatgaaggacatgttgatgtggttgacttgcttctagaagggggagcagatgtagatcacacagataacaatggccgtacacccctcttagcagcagcgtctatgggtcatgcatcagttgtaaatacacttttgttttggggtgcagctgtggatagtattgatagtgaaggtaggacagtcctcagtatagcttcagcacaaggaaatgttgaggtggtacgtactctactggatagagggttagatgaaaatcacagagatgatgctggatggacacctttgcacatggcagcttttgaagggcacagattgatatgtgaagcacttattgaacaaggtgctagaacaaatgagattgacaatgatggacgaatccctttcatattagcttcacaagagggtcattatgattgtgttcaaatattactggaaaacaaatccaacattgatcaaagaggttatgatggaagaaatgcactgcgggttgctgcattagaagggcacagggacattgttgaattgctttttagccatggtgctgatgttaactgcaaagatgctgatggtcggcctacactttatatcttggccttagaaaatcagcttacaatggccgaatattttttagaaaatggtgcaaacgtagaagcaagtgatgctgaaggaaggacagcacttcatgtgtcttgttggcaaggccatatggaaatggtgcaggtcctgatagcataccatgctgacgtcaatgctgcagacaatgaaaagcgctctgctttgcagtctgcagcctggcagggccatgtaaaagtggttcagcttctgattgagcatggtgctgtagttgaccatacatgtaaccaaggtgcaactgcactctgtattgcagcccaggaagggcacattgatgttgttcaggtcttattagagcatggtgctgatccaaaccatgctgatcaatttggacgcactgctatgcgtgttgcagccaaaaatggacattctcagataattaaattattagaaaaatatggtgcatctagtttgaatggctgttccccatctcctgttcacacaatggagcaaaaacctctacagtcattgtcttcaaaagtgcagtcattaacaattaaatcaaatagctctggtagtactggtggaggggatatgcagccttcgttacgtggtttacctaatgggcctactcatgcttttagttctccttcagaatctccagattctacagttgaccggcagaagtcatcactgtcaaataattccctgaaaagctcaaaaaattcatctttgagaactacttcatctacagcaacggctcaaacagtgccaattgatagctttcataacttgtcatttacagaacaaattcagcagcattcattgccacgcagtagaagtcgacagtcaattgtttccccatcttccacaacacagtccttaggacagagtcataattcaccaagtagtgaatttgagtggagtcaagtaaagcccagtttgaagtcaactaaagcaagtaaaggggggaaatcagaaaattctgccaagtctggatcagctgggaaaaaagcgaaacaaagtaattcttcacagccaaaggttttagaatatgaaatgactcagtttgatagaagaggacctatagccaaatccgggactgctgcaccacctaaacaaatgccagcagaatctcaatgcaaaattatgataccttcagctcagcaggaaattggtcgatctcaacagcagtttcttattcaccaacaaagtggggaacagaagaagagaaatggaataatgacaaatccaaattatcatcttcagagcaaccaggtttttcttggtagggtttcagtcccacgaacaatgcaagatagagggcatcaggaagtgttggagggatacccttcctcagagacagaattaagccttaaacaagctctgaagcttcagattgaaggttctgaccctagcttcaactataaaaaggaaacaccattataaaagtttcctattctgtgaaacagaagacattgtgatggagtggttcttcagctactggatggaaacatatgcctgttgatttgctgaaaaaacaaaaaaaatgaagaatgtgatctctgcagtacagttaccttaattactgtaatgtgcctaaatagtaaggctgccttctcaatgtaaccctctgtgcttaaaaaatttcattttgtgtgctttgtattcactacacaggaataagcactttttaaaaatgcagatacatactgcagttccctgataaaagctgaaaagaaaatttgagtattttaagttaagatgtgataaaaaatgtgcatgtgccataatcaaatatatatgaaaaggcagtgttccttgtatttatttttttttctttttgtggcaaaagaaacttaaacatactgtttcagtcacattgcattgtagtgtatggcctgtttcttgtatctttaaagacgttgctcaataaaacaaatcttgcaactgttctatgttcactacaccttcagcattggataaaaatcattttctatataaatatcacattgaaatgaaaaaatgatttcttggcagtttaaaaaaaatattttatagtagtttagggagctgctttaagtagtttaaatctggattttcccagtagaattcttctcatctctggctaaacatgtcagaacaaacaaccaaccagtctgtaggcagaacaaagtcctatttcatccgctgggatacaatttcatcttccattcactttgtcattccacctctaagaagacagactatcattcctgaggcatgaaaattctcagggacaaagccatgcctcagtcacatgtgtgtgcagagagaaatgcacctgtctatctaagggtagatttttgatccctgaataattcattgactaaactgacctcttcctcctggctaaataaattaattttgctggcttctctctcagcggtttctattttgtaaattgctgcatgaccaaaatagccccactcaaaatcaattggattaattttaatggtttggttggatgaatattctggatgaatataaaatgtgctgcccttcacagatgacaccactcccctgtcaatcatagcacatgtgtactttttattgttacttaatagtgatggatttgcacttttctatcctcatactctttcctgttttcttctttgtacaattgcatgcaggagggctggatgccagggttaagagagaaattcatgacaaggaaggtaaaattggttcaaatgagcatgtgtcccacagccttagtctccttactcttaaatcagtggagctgtagcttagatgggtcgtttatatgtctggaaaagttgtcataacagtttagaagccaaggttgtggatttgatcttagaatgggcctgttaatcttatagaacccagaaattctgttcttttcatgtactgttgatgaggaatgaggaaagagaatttggagattcagcacaaaaccattgctacttctagaacaaaatctttagaatatgtcctaataacaaaggtcagtaatgtcatcttcatatatgaaggacacatgtgatacattgttcgtggaaatagaaatgtataattatgataaatgtttcacttgaatcttattgtaaggcttttcttgcttttattttttaaagtcagcaaaactcattttgtctgtcatctataagtcatagtgaggactacgagataagttgataagttcaattgatattaaggtgacatggcaatattaataactcaaatgtgaatgtttcaagtattgaattcttgtccctatgggacatttattaaataaaattaatgggactcttgcaaagtagccttaaaagtgttaatgagtctattaataaatatgaacacatactattattagaaccaactttactcatatctcaaatacagtacatttacattactgtagaggatgaagctctaatttctattacatgtaattttctttagaaagagaaccctgaaagctgccagtttttctattaactttgaattattgaaattgtatttatttaattttattgtttttacaaaattgcaccttgtgtccaaagggcgaagatatgacattgcataagggatttatgtttttcaaagagctaactgttttcatatccatactatatacacttgaagcaattggtaggaagagaacctattggaaaaatacgattttcaaaagtaagtattcctcgggatgtttttatataaattatgttttggaatagaacataaatgactttgagttaggataaggatgataggatgggtgctggagatgccctgccttgcttatttgtttctgtgggggatttaatactataaatgaaaatggcttctgctccattaaaaagtaaaaattgtcctccaaatataaaactccttaatagatatttttgaaattaaaatctttaaattttataaatcagctgttgccactacacaactatgatggcatgtgcttataacatttttataacattccgtctgtgtctattccctaaatatcatgagtttataataaggaaagtgataaaaatacagtaatgaaataaaaatctgaatgtttctaagaaaggttttggaaggaaaaatgacctgaaatcagtgcgtactgcaaagtacagccaataatttttgttctttgttttcacccccaccctcactggaattctcaccaaaaatagtttgatacttaaaaaacagaagtaaatacttttctcaatattgttttggctatgcaaatatttgttttgcttaatgtcctccatttacacttctcagcaaatgtagttgcaaacaaatgctttctttttatttttcccttggtttgaggtatgtaaatagccaaaaatgtacattgaatttcacattgtaaaagttttattttatcccttgtatgatattactcaaaaaatccctgtgtatatgaaagtgcataataaatatatttgctttacagagaagatcttgttttaattttgtccttgaaccagtagaacatgcatgatatgcatatagcataaacaactgttagttgttttaagttattatcttaaataaatcctgagcaaatgaatttggaaacattttgcaaagaagaaagtgaaatataacactgtccaaaggaaggtagaaaaacaaagatttactgtttatgtcttcctaagcctttttaaagacttaatgttcttttcccccccgtgactgattatatactatatcacaccatgtcaggttttgtgcctctgagaattgcagtaatccaataacttttgtatatgtgtgctccttgatcatcagaatattatggccatcttatggcggatattttgggagtttattgcaaacatggtcattcattttctaaataaaatttgtgtgtttcttcactcagtaaaaaag

SEQ ID NO: 31398 - DNA, 6103 bp, Homo sapiens
gagacaagtaaattgactacatcaagactgccactatatgggagcagatttagagatagaagatgctcatggacatacaccactcactctagcggctagacagggacataccaaggtggttaattgtttgattgggtgtggagcaaatattaatcatactgatcaagatggttggacagcattaagatctgctgcttggggtggccatactgaggtagtttctgcactactttatgctggcgtaaaagtggattgtgcagatgctgatagccgaacagctttgagagcagcagcatggggaggacacgaggatattgtactgaatttgctacaacatggcgctgaagtgaacaaagctgataatgaaggtagaactgctttgatagcagcagcatacatgggacatagagagattgtggaacacctactggaccatggagcagaagtaaatcatgaggatgttgatggcaggactgcactctctgtagctgcactttgtgtgcctgcaagtaaagggcacgcatcagttgttagccttttaattgatcgaggtgctgaagtagatcattgtgataaagatggcatgactccactgctggtagctgcctatgaaggacatgttgatgtggttgacttgcttctagaagggggagcagatgtagatcacacagataacaatggccgtacacccctcttagcagcagcgtctatgggtcatgcatcagttgtaaatacacttttgttttggggtgcagctgtggatagtattgatagtgaaggtaggacagtcctcagtatagcttcagcacaaggaaatgttgaggtggtacgtactctactggatagagggttagatgaaaatcacagagatgatgctggatggacacctttgcacatggcagcttttgaagggcacagattgatatgtgaagcacttattgaacaaggtgctagaacaaatgagattgacaatgatggacgaatccctttcatattagcttcacaagagggtcattatgattgtgttcaaatattactggaaaacaaatccaacattgatcaaagaggttatgatggaagaaatgcactgcgggttgctgcattagaagggcacagggacattgttgaattgctttttagccatggtgctgatgttaactgcaaagatgctgatggtcggcctacactttatatcttggccttagaaaatcagcttacaatggccgaatattttttagaaaatggtgcaaacgtagaagcaagtgatgctgaaggaaggacagcacttcatgtgtcttgttggcaaggccatatggaaatggtgcaggtcctgatagcataccatgctgacgtcaatgctgcagacaatgaaaagcgctctgctttgcagtctgcagcctggcagggccatgtaaaagtggttcagcttctgattgagcatggtgctgtagttgaccatacatgtaaccaaggtgcaactgcactctgtattgcagcccaggaagggcacattgatgttgttcaggtcttattagagcatggtgctgatccaaaccatgctgatcaatttggacgcactgctatgcgtgttgcagccaaaaatggacattctcagataattaaattattagaaaaatatggtgcatctagtttgaatggctgttccccatctcctgttcacacaatggagcaaaaacctctacagtcattgtcttcaaaagtgcagtcattaacaattaaatcaaatagctctggtagtactggtggaggggatatgcagccttcgttacgtggtttacctaatgggcctactcatgcttttagttctccttcagaatctccagattctacagttgaccggcagaagtcatcactgtcaaataattccctgaaaagctcaaaaaattcatctttgagaactacttcatctacagcaacggctcaaacagtgccaattgatagctttcataacttgtcatttacagaacaaattcagcagcattcattgccacgcagtagaagtcgacagtcaattgtttccccatcttccacaacacagtccttaggacagagtcataattcaccaagtagtgaatttgagtggagtcaagtaaagcccagtttgaagtcaactaaagcaagtaaaggggggaaatcagaaaattctgccaagtctggatcagctgggaaaaaagcgaaacaaagtaattcttcacagccaaaggttttagaatatgaaatgactcagtttgatagaagaggacctatagccaaatccgggactgctgcaccacctaaacaaatgccagcagaatctcaatgcaaaattatgataccttcagctcagcaggaaattggtcgatctcaacagcagtttcttattcaccaacaaagtggggaacagaagaagagaaatggaataatgacaaatccaaattatcatcttcagagcaaccaggtttttcttggtagggtttcagtcccacgaacaatgcaagatagagggcatcaggaagtgttggagggatacccttcctcagagacagaattaagccttaaacaagctctgaagcttcagattgaaggttctgaccctagcttcaactataaaaaggaaacaccattataaaagtttcctattctgtgaaacagaagacattgtgatggagtggttcttcagctactggatggaaacatatgcctgttgatttgctgaaaaaacaaaaaaaatgaagaatgtgatctctgcagtacagttaccttaattactgtaatgtgcctaaatagtaaggctgccttctcaatgtaaccctctgtgcttaaaaaatttcattttgtgtgctttgtattcactacacaggaataagcactttttaaaaatgcagatacatactgcagttccctgataaaagctgaaaagaaaatttgagtattttaagttaagatgtgataaaaaatgtgcatgtgccataatcaaatatatatgaaaaggcagtgttccttgtatttatttttttttctttttgtggcaaaagaaacttaaacatactgtttcagtcacattgcattgtagtgtatggcctgtttcttgtatctttaaagacgttgctcaataaaacaaatcttgcaactgttctatgttcactacaccttcagcattggataaaaatcattttctatataaatatcacattgaaatgaaaaaatgatttcttggcagtttaaaaaaaatattttatagtagtttagggagctgctttaagtagtttaaatctggattttcccagtagaattcttctcatctctggctaaacatgtcagaacaaacaaccaaccagtctgtaggcagaacaaagtcctatttcatccgctgggatacaatttcatcttccattcactttgtcattccacctctaagaagacagactatcattcctgaggcatgaaaattctcagggacaaagccatgcctcagtcacatgtgtgtgcagagagaaatgcacctgtctatctaagggtagatttttgatccctgaataattcattgactaaactgacctcttcctcctggctaaataaattaattttgctggcttctctctcagcggtttctattttgtaaattgctgcatgaccaaaatagccccactcaaaatcaattggattaattttaatggtttggttggatgaatattctggatgaatataaaatgtgctgcccttcacagatgacaccactcccctgtcaatcatagcacatgtgtactttttattgttacttaatagtgatggatttgcacttttctatcctcatactctttcctgttttcttctttgtacaattgcatgcaggagggctggatgccagggttaagagagaaattcatgacaaggaaggtaaaattggttcaaatgagcatgtgtcccacagccttagtctccttactcttaaatcagtggagctgtagcttagatgggtcgtttatatgtctggaaaagttgtcataacagtttagaagccaaggttgtggatttgatcttagaatgggcctgttaatcttatagaacccagaaattctgttcttttcatgtactgttgatgaggaatgaggaaagagaatttggagattcagcacaaaaccattgctacttctagaacaaaatctttagaatatgtcctaataacaaaggtcagtaatgtcatcttcatatatgaaggacacatgtgatacattgttcgtggaaatagaaatgtataattatgataaatgtttcacttgaatcttattgtaaggcttttcttgcttttattttttaaagtcagcaaaactcattttgtctgtcatctataagtcatagtgaggactacgagataagttgataagttcaattgatattaaggtgacatggcaatattaataactcaaatgtgaatgtttcaagtattgaattcttgtccctatgggacatttattaaataaaattaatgggactcttgcaaagtagccttaaaagtgttaatgagtctattaataaatatgaacacatactattattagaaccaactttactcatatctcaaatacagtacatttacattactgtagaggatgaagctctaatttctattacatgtaattttctttagaaagagaaccctgaaagctgccagtttttctattaactttgaattattgaaattgtatttatttaattttattgtttttacaaaattgcaccttgtgtccaaagggcgaagatatgacattgcataagggatttatgtttttcaaagagctaactgttttcatatccatactatatacacttgaagcaattggtaggaagagaacctattggaaaaatacgattttcaaaagtaagtattcctcgggatgtttttatataaattatgttttggaatagaacataaatgactttgagttaggataaggatgataggatgggtgctggagatgccctgccttgcttatttgtttctgtgggggatttaatactataaatgaaaatggcttctgctccattaaaaagtaaaaattgtcctccaaatataaaactccttaatagatatttttgaaattaaaatctttaaattttataaatcagctgttgccactacacaactatgatggcatgtgcttataacatttttataacattccgtctgtgtctattccctaaatatcatgagtttataataaggaaagtgataaaaatacagtaatgaaataaaaatctgaatgtttctaagaaaggttttggaaggaaaaatgacctgaaatcagtgcgtactgcaaagtacagccaataatttttgttctttgttttcacccccaccctcactggaattctcaccaaaaatagtttgatacttaaaaaacagaagtaaatacttttctcaatattgttttggctatgcaaatatttgttttgcttaatgtcctccatttacacttctcagcaaatgtagttgcaaacaaatgctttctttttatttttcccttggtttgaggtatgtaaatagccaaaaatgtacattgaatttcacattgtaaaagttttattttatcccttgtatgatattactcaaaaaatccctgtgtatatgaaagtgcataataaatatatttgctttacagagaagatcttgttttaattttgtccttgaaccagtagaacatgcatgatatgcatatagcataaacaactgttagttgttttaagttattatcttaaataaatcctgagcaaatgaatttggaaacattttgcaaagaagaaagtgaaatataacactgtccaaaggaaggtagaaaaacaaagatttactgtttatgtcttcctaagcctttttaaagacttaatgttcttttcccccccgtgactgattatatactatatcacaccatgtcaggttttgtgcctctgagaattgcagtaatccaataacttttgtatatgtgtgctccttgatcatcagaatattatggccatcttatggcggatattttgggagtttattgcaaacatggtcattcattttctaaataaaatttgtgtgtttcttcactcagtaaaaaag

SEQ ID NO: 31399 - DNA, 3675 bp, Homo sapiens
  misc_feature (61)..(61): n is a, c, g, or t
catatcttcacatcttatattatagtcgttcccccacatcctaacatcaacctttatgctnccgccagcacagcagggcatcaggaagtgttggagggatacccttcctcagagacagaattaagccttaaacaagctctgaagcttcagattgaaggttctgaccctagcttcaactataaaaaggaaacaccattataaaagtttcctattctgtgaaacagaagacattgtgatggagtggttcttcagctactggatggaaacatatgcctgttgatttgctgaaaaaacaaaaaaaatgaagaatgtgatctctgcagtacagttaccttaattactgtaatgtgcctaaatagtaaggctgccttctcaatgtaaccctctgtgcttaaaaaatttcattttgtgtgctttgtattcactacacaggaataagcactttttaaaaatgcagatacatactgcagttccctgataaaagctgaaaagaaaatttgagtattttaagttaagatgtgataaaaaatgtgcatgtgccataatcaaatatatatgaaaaggcagtgttccttgtatttatttttttttctttttgtggcaaaagaaacttaaacatactgtttcagtcacattgcattgtagtgtatggcctgtttcttgtatctttaaagacgttgctcaataaaacaaatcttgcaactgttctatgttcactacaccttcagcattggataaaaatcattttctatataaatatcacattgaaatgaaaaaatgatttcttggcagtttaaaaaaaatattttatagtagtttagggagctgctttaagtagtttaaatctggattttcccagtagaattcttctcatctctggctaaacatgtcagaacaaacaaccaaccagtctgtaggcagaacaaagtcctatttcatccgctgggatacaatttcatcttccattcactttgtcattccacctctaagaagacagactatcattcctgaggcatgaaaattctcagggacaaagccatgcctcagtcacatgtgtgtgcagagagaaatgcacctgtctatctaagggtagatttttgatccctgaataattcattgactaaactgacctcttcctcctggctaaataaattaattttgctggcttctctctcagcggtttctattttgtaaattgctgcatgaccaaaatagccccactcaaaatcaattggattaattttaatggtttggttggatgaatattctggatgaatataaaatgtgctgcccttcacagatgacaccactcccctgtcaatcatagcacatgtgtactttttattgttacttaatagtgatggatttgcacttttctatcctcatactctttcctgttttcttctttgtacaattgcatgcaggagggctggatgccagggttaagagagaaattcatgacaaggaaggtaaaattggttcaaatgagcatgtgtcccacagccttagtctccttactcttaaatcagtggagctgtagcttagatgggtcgtttatatgtctggaaaagttgtcataacagtttagaagccaaggttgtggatttgatcttagaatgggcctgttaatcttatagaacccagaaattctgttcttttcatgtactgttgatgaggaatgaggaaagagaatttggagattcagcacaaaaccattgctacttctagaacaaaatctttagaatatgtcctaataacaaaggtcagtaatgtcatcttcatatatgaaggacacatgtgatacattgttcgtggaaatagaaatgtataattatgataaatgtttcacttgaatcttattgtaaggcttttcttgcttttattttttaaagtcagcaaaactcattttgtctgtcatctataagtcatagtgaggactacgagataagttgataagttcaattgatattaaggtgacatggcaatattaataactcaaatgtgaatgtttcaagtattgaattcttgtccctatgggacatttattaaataaaattaatgggactcttgcaaagtagccttaaaagtgttaatgagtctattaataaatatgaacacatactattattagaaccaactttactcatatctcaaatacagtacatttacattactgtagaggatgaagctctaatttctattacatgtaattttctttagaaagagaaccctgaaagctgccagtttttctattaactttgaattattgaaattgtatttatttaattttattgtttttacaaaattgcaccttgtgtccaaagggcgaagatatgacattgcataagggatttatgtttttcaaagagctaactgttttcatatccatactatatacacttgaagcaattggtaggaagagaacctattggaaaaatacgattttcaaaagtaagtattcctcgggatgtttttatataaattatgttttggaatagaacataaatgactttgagttaggataaggatgataggatgggtgctggagatgccctgccttgcttatttgtttctgtgggggatttaatactataaatgaaaatggcttctgctccattaaaaagtaaaaattgtcctccaaatataaaactccttaatagatatttttgaaattaaaatctttaaattttataaatcagctgttgccactacacaactatgatggcatgtgcttataacatttttataacattccgtctgtgtctattccctaaatatcatgagtttataataaggaaagtgataaaaatacagtaatgaaataaaaatctgaatgtttctaagaaaggttttggaaggaaaaatgacctgaaatcagtgcgtactgcaaagtacagccaataatttttgttctttgttttcacccccaccctcactggaattctcaccaaaaatagtttgatacttaaaaaacagaagtaaatacttttctcaatattgttttggctatgcaaatatttgttttgcttaatgtcctccatttacacttctcagcaaatgtagttgcaaacaaatgctttctttttatttttcccttggtttgaggtatgtaaatagccaaaaatgtacattgaatttcacattgtaaaagttttattttatcccttgtatgatattactcaaaaaatccctgtgtatatgaaagtgcataataaatatatttgctttacagagaagatcttgttttaattttgtccttgaaccagtagaacatgcatgatatgcatatagcataaacaactgttagttgttttaagttattatcttaaataaatcctgagcaaatgaatttggaaacattttgcaaagaagaaagtgaaatataacactgtccaaaggaaggtagaaaaacaaagatttactgtttatgtcttcctaagcctttttaaagacttaatgttcttttcccccccgtgactgattatatactatatcacaccatgtcaggttttgtgcctctgagaattgcagtaatccaataacttttgtatatgtgtgctccttgatcatcagaatattatggccatcttatggcggatattttgggagtttattgcaaacatggtcattcattttctaaataaaatttgtgtgtttcttcactcagtaaaaaag

SEQ ID NO: 31400 - DNA, 6869 bp, Homo sapiens
gacaacacctcacaaaagaaactgcagagatgttaaatcaactgcacattaaaagcagtggatgctttctttacctagaacgagttttagatggagttgtagaaaattttattatgttaagagaaattcgtgacatcccaggaactctaaatggtttatatctctggctgtgccaaagactttttgtaagaaaacaatttgcaaaggttcagcctattttgaatgtgattcttgcagcctgccgacctttgaccataacggaattatatcacgcagtatggaccaaaaacatgtcgttaactttggaagattttcaacgcaagttagatatcctctccaaacttcttgttgatggactaggaaatacaaaaatactgtttcattatagttttgccgagtggcttctggatgtgaaacactgtactcagaagtatttatgtaatgcagcagaaggacacagaatgttggctatgagttatacctgtcaagccaagaatttaacaccattggaagcacaagaatttgcattgcacttaattaactcaaacttacaattagagacagcggagttagctctgtggatgatatggaatggtacacctgtcagagattccctttctactttgatacccaaggaacaagaagtgctacagctgttggttaaagctggggctcatgtcaacagtgaagacgatcgcacatcatgcatagttcgacaagccttagaaagagaggatccattcggacattattagataatggagcttcagtaaatcagtgtgattcaaatgggagaacattattggctaatgctgcatatagtggcagtcttgatgtagtcaatttacttgtctctaggggagcagatttagagatagaagatgctcatggacatacaccactcactctagcggctagacagggacataccaaggtggttaattgtttgattgggtgtggagcaaatattaatcatactgatcaagatggttggacagcattaagatctgctgcttggggtggccatactgaggtagtttctgcactactttatgctggcgtaaaagtggattgtgcagatgctgatagccgaacagctttgagagcagcagcatggggaggacacgaggatattgtactgaatttgctacaacatggcgctgaagtgaacaaagctgataatgaaggtagaactgctttgatagcagcagcatacatgggacatagagagattgtggaacacctactggaccatggagcagaagtaaatcatgaggatgttgatggcaggactgcactctctgtagctgcactttgtgtgcctgcaagtaaagggcacgcatcagttgttagccttttaattgatcgaggtgctgaagtagatcattgtgataaagatggcatgactccactgctggtagctgcctatgaaggacatgttgatgtggttgacttgcttctagaagggggagcagatgtagatcacacagataacaatggccgtacacccctcttagcagcagcgtctatgggtcatgcatcagttgtaaatacacttttgttttggggtgcagctgtggatagtattgatagtgaaggtaggacagtcctcagtatagcttcagcacaaggaaatgttgaggtggtacgtactctactggatagagggttagatgaaaatcacagagatgatgctggatggacacctttgcacatggcagcttttgaagggcacagattgatatgtgaagcacttattgaacaaggtgctagaacaaatgagattgacaatgatggacgaatccctttcatattagcttcacaagagggtcattatgattgtgttcaaatattactggaaaacaaatccaacattgatcaaagaggttatgatggaagaaatgcactgcgggttgctgcattagaagggcacagggacattgttgaattgctttttagccatggtgctgatgttaactgcaaagatgctgatggtcggcctacactttatatcttggccttagaaaatcagcttacaatggccgaatattttttagaaaatggtgcaaacgtagaagcaagtgatgctgaaggaaggacagcacttcatgtgtcttgttggcaaggccatatggaaatggtgcaggtcctgatagcataccatgctgacgtcaatgctgcagacaatgaaaagcgctctgctttgcagtctgcagcctggcagggccatgtaaaagtggttcagcttctgattgagcatggtgctgtagttgaccatacatgtaaccaaggtgcaactgcactctgtattgcagcccaggaagggcacattgatgttgttcaggtcttattagagcatggtgctgatccaaaccatgctgatcaatttggacgcactgctatgcgtgttgcagccaaaaatggacattctcagataattaaattattagaaaaatatggtgcatctagtttgaatggctgttccccatctcctgttcacacaatggagcaaaaacctctacagtcattgtcttcaaaagtgcagtcattaacaattaaatcaaatagctctggtagtactggtggaggggatatgcagccttcgttacgtggtttacctaatgggcctactcatgcttttagttctccttcagaatctccagattctacagttgaccggcagaagtcatcactgtcaaataattccctgaaaagctcaaaaaattcatctttgagaactacttcatctacagcaacggctcaaacagtgccaattgatagctttcataacttgtcatttacagaacaaattcagcagcattcattgccacgcagtagaagtcgacagtcaattgtttccccatcttccacaacacagtccttaggacagagtcataattcaccaagtagtgaatttgagtggagtcaagtaaagcccagtttgaagtcaactaaagcaagtaaaggggggaaatcagaaaattctgccaagtctggatcagctgggaaaaaagcgaaacaaagtaattcttcacagccaaaggttttagaatatgaaatgactcagtttgatagaagaggacctatagccaaatccgggactgctgcaccacctaaacaaatgccagcagaatctcaatgcaaaattatgataccttcagctcagcaggaaattggtcgatctcaacagcagtttcttattcaccaacaaagtggggaacagaagaagagaaatggaataatgacaaatccaaattatcatcttcagagcaaccaggtttttcttggtagggtttcagtcccacgaacaatgcaagatagagggcatcaggaagtgttggagggatacccttcctcagagacagaattaagccttaaacaagctctgaagcttcagattgaaggttctgaccctagcttcaactataaaaaggaaacaccattataaaagtttcctattctgtgaaacagaagacattgtgatggagtggttcttcagctactggatggaaacatatgcctgttgatttgctgaaaaaacaaaaaaaatgaagaatgtgatctctgcagtacagttaccttaattactgtaatgtgcctaaatagtaaggctgccttctcaatgtaaccctctgtgcttaaaaaatttcattttgtgtgctttgtattcactacacaggaataagcactttttaaaaatgcagatacatactgcagttccctgataaaagctgaaaagaaaatttgagtattttaagttaagatgtgataaaaaatgtgcatgtgccataatcaaatatatatgaaaaggcagtgttccttgtatttatttttttttctttttgtggcaaaagaaacttaaacatactgtttcagtcacattgcattgtagtgtatggcctgtttcttgtatctttaaagacgttgctcaataaaacaaatcttgcaactgttctatgttcactacaccttcagcattggataaaaatcattttctatataaatatcacattgaaatgaaaaaatgatttcttggcagtttaaaaaaaatattttatagtagtttagggagctgctttaagtagtttaaatctggattttcccagtagaattcttctcatctctggctaaacatgtcagaacaaacaaccaaccagtctgtaggcagaacaaagtcctatttcatccgctgggatacaatttcatcttccattcactttgtcattccacctctaagaagacagactatcattcctgaggcatgaaaattctcagggacaaagccatgcctcagtcacatgtgtgtgcagagagaaatgcacctgtctatctaagggtagatttttgatccctgaataattcattgactaaactgacctcttcctcctggctaaataaattaattttgctggcttctctctcagcggtttctattttgtaaattgctgcatgaccaaaatagccccactcaaaatcaattggattaattttaatggtttggttggatgaatattctggatgaatataaaatgtgctgcccttcacagatgacaccactcccctgtcaatcatagcacatgtgtactttttattgttacttaatagtgatggatttgcacttttctatcctcatactctttcctgttttcttctttgtacaattgcatgcaggagggctggatgccagggttaagagagaaattcatgacaaggaaggtaaaattggttcaaatgagcatgtgtcccacagccttagtctccttactcttaaatcagtggagctgtagcttagatgggtcgtttatatgtaatgggcctgttaatcttatagaacccagaaattctgttcttttcatgtactgttgatgaggaatgaggaaagagaatttggagattcagcacaaaaccattgctacttctagaacaaaatctttagaatatgtcctaataacaaaggtcagtaatgtcatcttcatatatgaaggacacatgtgatacattgttcgtggaaatagaaatgtataattatgataaatgtttcacttgaatcttattgtaaggcttttcttgcttttattttttaaagtcagcaaaactcattttgtctgtcatctataagtcatagtgaggactacgagataagttgataagttcaattgatattaaggtgacatggcaatattaataactcaaatgtgaatgtttcaagtattgaattcttgtccctatgggacatttattaaataaaattaatgggactcttgcaaagtagccttaaaagtgttaatgagtctattaataaatatgaacacatactattattagaaccaactttactcatatctcaaatacagtacatttacattactgtagaggatgaagctctaatttctattacatgtaattttctttagaaagagaaccctgaaagctgccagtttttctattaactttgaattattgaaattgtatttatttaattttattgtttttacaaaattgcaccttgtgtccaaagggcgaagatatgacattgcataagggatttatgtttttcaaagagctaactgttttcatatccatactatatacacttgaagcaattggtaggaagagaacctattggaaaaatacgattttcaaaagtaagtattcctcgggatgtttttatataaattatgttttggaatagaacataaatgactttgagttaggataaggatgataggatgggtgctggagatgccctgccttgcttatttgtttctgtgggggatttaatactataaatgaaaatggcttctgctccattaaaaagtaaaaattgtcctccaaatataaaactccttaatagatatttttgaaattaaaatctttaaattttataaatcagctgttgccactacacaactatgatggcatgtgcttataacatttttataacattccgtctgtgtctattccctaaatatcatgagtttataataaggaaagtgataaaaatacagtaatgaaataaaaatctgaatgtttctaagaaaggttttggaaggaaaaatgacctgaaatcagtgcgtactgcaaagtacagccaataatttttgttctttgttttcacccccaccctcactggaattctcaccaaaaatagtttgatacttaaaaaacagaagtaaatacttttctcaatattgttttggctatgcaaatatttgttttgcttaatgtcctccatttacacttctcagcaaatgtagttgcaaacaaatgctttctttttatttttcccttggtttgaggtatgtaaatagccaaaaatgtacattgaatttcacattgtaaaagttttattttatcccttgtatgatattactcaaaaaatccctgtgtatatgaaagtgcataataaatatatttgctttacagagaagatcttgttttaattttgtccttgaaccagtagaacatgcatgatatgcatatagcataaacaactgttagttgttttaagttattatcttaaataaatcctgagcaaatgaatttggaaacattttgcaaagaagaaagtgaaatataacactgtccaaaggaaggtagaaaaacaaagatttactgtttatgtcttcctaagcctttttaaagacttaatgttcttttcccccccgtgactgattatatactatatcacaccatgtcaggttttgtgcctctgagaattgcagtaatccaataacttttgtatatgtgtgctccttgatcatcagaatattatggccatcttatggcggatattttgggagtttattgcaaacatggtcattcattttctaaataaaatttgtgtgtttcttcactcagtaaaaaag

SEQ ID NO: 31401 - DNA, 3952 bp, Homo sapiens
gacaacacctcacaaaagaaactgcagagatgttaaatcaactgcacattaaaagcagtggatgctttctttacctagaacgagttttagatggagttgtagaaaattttattatgttaagagaaattcgtgacatcccaggaactctaaatggtttatatctctggctgtgccaaagactttttgtaagaaaacaatttgcaaaggttcagcctattttgaatgtgattcttgcagcctgccgacctttgaccataacggaattatatcacgcagtatggaccaaaaacatgtcgttaactttggaagattttcaacgcaagttagatatcctctccaaacttcttgttgatggactaggaaatacaaaaatactgtttcattatagttttgccgagtggcttctggatgtgaaacactgtactcagaagtatttatgtaatgcagcagaaggacacagaatgttggctatgagttatacctgtcaagccaagaatttaacaccattggaagcacaagaatttgcattgcacttaattaactcaaacttacaattagagacagcggagttagctctgtggatgatatggaatggtacacctgtcagagattccctttctactttgatacccaaggaacaagaagtgctacagctgttggttaaagctggggctcatgtcaacagtgaagacgatcgcacatcatgcatagttcgacaagccttagaaagagaggatccattcggacattattagataatggagcttcagtaaatcagtgtgattcaaatgggagaacattattggctaatgctgcatatagtggcagtcttgatgtagtcaatttacttgtctctaggggagcagatttagagatagaagatgctcatggacatacaccactcactctagcggctagacagggacataccaaggtggttaattgtttgattgggtgtggagcaaatattaatcatactgatcaagatggttggacagcattaagatctgctgcttggggtggccatactgaggtagtttctgcactactttatgctggcgtaaaagtggattgtgcagatgctgatagccgaacagctttgagagcagcagcatggggaggacacgaggatattgtactgaatttgctacaacatggcgctgaagtgaacaaagctgataatgaaggtagaactgctttgatagcagcagcatacatgggacatagagagattgtggaacacctactggaccatggagcagaagtaaatcatgaggatgttgatggcaggactgcactctctgtagctgcactttgtgtgcctgcaagtaaagggcacgcatcagttgttagccttttaattgatcgaggtgctgaagtagatcattgtgataaagatggcatgactccactgctggtagctgcctatgaaggacatgttgatgtggttgacttgcttctagaagggggagcagatgtagatcacacagataacaatggccgtacacccctcttagcagcagcgtctatgggtcatgcatcagttgtaaatacacttttgttttggggtgcagctgtggatagtattgatagtgaaggtaggacagtcctcagtatagcttcagcacaaggaaatgttgaggtggtacgtactctactggatagagggttagatgaaaatcacagagatgatgctggatggacacctttgcacatggcagcttttgaagggcacagattgatatgtgaagcacttattgaacaaggtgctagaacaaatgagattgacaatgatggacgaatccctttcatattagcttcacaagagggtcattatgattgtgttcaaatattactggaaaacaaatccaacattgatcaaagaggttatgatggaagaaatgcactgcgggttgctgcattagaagggcacagggacattgttgaattgctttttagccatggtgctgatgttaactgcaaagatgctgatggtcggcctacactttatatcttggccttagaaaatcagcttacaatggccgaatattttttagaaaatggtgcaaacgtagaagcaagtgatgctgaaggaaggacagcacttcatgtgtcttgttggcaaggccatatggaaatggtgcaggtcctgatagcataccatgctgacgtcaatgctgcagacaatgaaaagcgctctgctttgcagtctgcagcctggcagggccatgtaaaagtggttcagcttctgattgagcatggtgctgtagttgaccatacatgtaaccaaggtgcaactgcactctgtattgcagcccaggaagggcacattgatgttgttcaggtcttattagagcatggtgctgatccaaaccatgctgatcaatttggacgcactgctatgcgtgttgcagccaaaaatggacattctcagataattaaattattagaaaaatatggtgcatctagtttgaatggctgttccccatctcctgttcacacaatggagcaaaaacctctacagtcattgtcttcaaaagtgcagtcattaacaattaaatcaaatagctctggtagtactggtggaggggatatgcagccttcgttacgtggtttacctaatgggcctactcatgcttttagttctccttcagaatctccagattctacagttgaccggcagaagtcatcactgtcaaataattccctgaaaagctcaaaaaattcatctttgagaactacttcatctacagcaacggctcaaacagtgccaattgatagctttcataacttgtcatttacagaacaaattcagcagcattcattgccacgcagtagaagtcgacagtcaattgtttccccatcttccacaacacagtccttaggacagagtcataattcaccaagtagtgaatttgagtggagtcaagtaaagcccagtttgaagtcaactaaagcaagtaaaggggggaaatcagaaaattctgccaagtctggatcagctgggaaaaaagcgaaacaaagtaattcttcacagccaaaggttttagaatatgaaatgactcagtttgatagaagaggacctatagccaaatccgggactgctgcaccacctaaacaaatgccagcagaatctcaatgcaaaattatgataccttcagctcagcaggaaattggtcgatctcaacagcagtttcttattcaccaacaaagtggggaacagaagaagagaaatggaataatgacaaatccaaattatcatcttcagagcaaccaggtttttcttggtagggtttcagtcccacgaacaatgcaagatagagggcatcaggaagtgttggagggatacccttcctcagagacagaattaagccttaaacaagctctgaagcttcagattgaaggttctgaccctagcttcaactataaaaaggaaacaccattataaaagtttcctattctgtgaaacagaagacattgtgatggagtggttcttcagctactggatggaaacatatgcctgttgatttgctgaaaaaacaaaaaaaatgaagaatgtgatctctgcagtacagttaccttaattactgtaatgtgcctaaatagtaaggctgccttctcaatgtaaccctctgtgcttaaaaaatttcattttgtgtgctttgtattcactacacaggaataagcactttttaaaaatgcagatacatactgcagttccctgataaaagctgaaaagaaaatttgagtattttaagttaagatgtgataaaaaatgtgcatgtgccataatcaaatatatatgaaaaggcagtgttccttgtatttatttttttttctttttgtggcaaaagaaacttaaacatactgtttcagtcacattgcattgtagtgtatggcctgtttcttgtatctttaaagacgttgctcaataaaacaaatcttgcaactg

SEQ ID NO: 31402 - DNA, 4038 bp, Homo sapiens
taaggcgtaccgcacactgtccagtgctgaatgcagccctatgattcacagcccagtttgaagtcaactaaagcaagtaaaggggggaaatcagaaaattctgccaagtctggatcagctgggaaaaaagcgaaacaaagtaattcttcacagccaaaggttttagaatatgaaatgactcagtttgatagaagaggacctatagccaaatccgggactgctgcaccacctaaacaaatgccagcagaatctcaatgcaaaattatgataccttcagctcagcaggaaattggtcgatctcaacagcagtttcttattcaccaacaaagtggggaacagaagaagagaaatggaataatgacaaatccaaattatcatcttcagagcaaccaggtttttcttggtagggtttcagtcccacgaacaatgcaagatagagggcatcaggaagtgttggagggatacccttcctcagagacagaattaagccttaaacaagctctgaagcttcagattgaaggttctgaccctagcttcaactataaaaaggaaacaccattataaaagtttcctattctgtgaaacagaagacattgtgatggagtggttcttcagctactggatggaaacatatgcctgttgatttgctgaaaaaacaaaaaaaatgaagaatgtgatctctgcagtacagttaccttaattactgtaatgtgcctaaatagtaaggctgccttctcaatgtaaccctctgtgcttaaaaaatttcattttgtgtgctttgtattcactacacaggaataagcactttttaaaaatgcagatacatactgcagttccctgataaaagctgaaaagaaaatttgagtattttaagttaagatgtgataaaaaatgtgcatgtgccataatcaaatatatatgaaaaggcagtgttccttgtatttatttttttttctttttgtggcaaaagaaacttaaacatactgtttcagtcacattgcattgtagtgtatggcctgtttcttgtatctttaaagacgttgctcaataaaacaaatcttgcaactgttctatgttcactacaccttcagcattggataaaaatcattttctatataaatatcacattgaaatgaaaaaatgatttcttggcagtttaaaaaaaatattttatagtagtttagggagctgctttaagtagtttaaatctggattttcccagtagaattcttctcatctctggctaaacatgtcagaacaaacaaccaaccagtctgtaggcagaacaaagtcctatttcatccgctgggatacaatttcatcttccattcactttgtcattccacctctaagaagacagactatcattcctgaggcatgaaaattctcagggacaaagccatgcctcagtcacatgtgtgtgcagagagaaatgcacctgtctatctaagggtagatttttgatccctgaataattcattgactaaactgacctcttcctcctggctaaataaattaattttgctggcttctctctcagcggtttctattttgtaaattgctgcatgaccaaaatagccccactcaaaatcaattggattaattttaatggtttggttggatgaatattctggatgaatataaaatgtgctgcccttcacagatgacaccactcccctgtcaatcatagcacatgtgtactttttattgttacttaatagtgatggatttgcacttttctatcctcatactctttcctgttttcttctttgtacaattgcatgcaggagggctggatgccagggttaagagagaaattcatgacaaggaaggtaaaattggttcaaatgagcatgtgtcccacagccttagtctccttactcttaaatcagtggagctgtagcttagatgggtcgtttatatgtctggaaaagttgtcataacagtttagaagccaaggttgtggatttgatcttagaatgggcctgttaatcttatagaacccagaaattctgttcttttcatgtactgttgatgaggaatgaggaaagagaatttggagattcagcacaaaaccattgctacttctagaacaaaatctttagaatatgtcctaataacaaaggtcagtaatgtcatcttcatatatgaaggacacatgtgatacattgttcgtggaaatagaaatgtataattatgataaatgtttcacttgaatcttattgtaaggcttttcttgcttttattttttaaagtcagcaaaactcattttgtctgtcatctataagtcatagtgaggactacgagataagttgataagttcaattgatattaaggtgacatggcaatattaataactcaaatgtgaatgtttcaagtattgaattcttgtccctatgggacatttattaaataaaattaatgggactcttgcaaagtagccttaaaagtgttaatgagtctattaataaatatgaacacatactattattagaaccaactttactcatatctcaaatacagtacatttacattactgtagaggatgaagctctaatttctattacatgtaattttctttagaaagagaaccctgaaagctgccagtttttctattaactttgaattattgaaattgtatttatttaattttattgtttttacaaaattgcaccttgtgtccaaagggcgaagatatgacattgcataagggatttatgtttttcaaagagctaactgttttcatatccatactatatacacttgaagcaattggtaggaagagaacctattggaaaaatacgattttcaaaagtaagtattcctcgggatgtttttatataaattatgttttggaatagaacataaatgactttgagttaggataaggatgataggatgggtgctggagatgccctgccttgcttatttgtttctgtgggggatttaatactataaatgaaaatggcttctgctccattaaaaagtaaaaattgtcctccaaatataaaactccttaatagatatttttgaaattaaaatctttaaattttataaatcagctgttgccactacacaactatgatggcatgtgcttataacatttttataacattccgtctgtgtctattccctaaatatcatgagtttataataaggaaagtgataaaaatacagtaatgaaataaaaatctgaatgtttctaagaaaggttttggaaggaaaaatgacctgaaatcagtgcgtactgcaaagtacagccaataatttttgttctttgttttcacccccaccctcactggaattctcaccaaaaatagtttgatacttaaaaaacagaagtaaatacttttctcaatattgttttggctatgcaaatatttgttttgcttaatgtcctccatttacacttctcagcaaatgtagttgcaaacaaatgctttctttttatttttcccttggtttgaggtatgtaaatagccaaaaatgtacattgaatttcacattgtaaaagttttattttatcccttgtatgatattactcaaaaaatccctgtgtatatgaaagtgcataataaatatatttgctttacagagaagatcttgttttaattttgtccttgaaccagtagaacatgcatgatatgcatatagcataaacaactgttagttgttttaagttattatcttaaataaatcctgagcaaatgaatttggaaacattttgcaaagaagaaagtgaaatataacactgtccaaaggaaggtagaaaaacaaagatttactgtttatgtcttcctaagcctttttaaagacttaatgttcttttcccccccgtgactgattatatactatatcacaccatgtcaggttttgtgcctctgagaattgcagtaatccaataacttttgtatatgtgtgctccttgatcatcagaatattatggccatcttatggcggatattttgggagtttattgcaaacatggtcattcattttctaaataaaatttgtgtgtttcttcactcagtaaaaaag

SEQ ID NO: 31403 - DNA, 521 bp, Homo sapiens
gagtggaaggggtgctgccatgcaggtgcccaggagacagggtcccctttaccaatcatggtgcacttctcaggctcttgggagatggtgtccagggggaaaccaagctcctagcagctggaggcatgagggagagggcgggcccctgggctggggagcaaagcaggccccaggctgcaccaggacaccccggccagccaatgcatgtgggtatgcctgaataccccctccagacagcgtgtgcgtggaccagacacacaagggtatgtatgtgtaccgctacccccccaaccccatgctccaagaatgaatcaggggcagcttccgccgggggcgccaccaccacctccgcccccaagcctggtccccaaatactttccaccctcacagagcagctgggatcggaaaataccaagggctgcaggccccgccctgcccgccgcgccacccgccctcccagcctgtcactaacgctttgcctaatgggcccagactctcagcagaagctccgtgggctgggc

SEQ ID NO: 31404 - DNA, 290 bp, Homo sapiens
gagtggaaggggtgctgccatgcaggtgcccaggagacagggtcccctttaccaatcatggtgcacttctcaggctcttgggagatggtgtccagggggaaaccaagctcctagcagctggaggcatgagggagagggcgggcccctgggctggggagcaaagcaggccccaggctgcaccaggacaccccggccagccaatgcatgtgggtatgcctgaataccccctccccgggtagcggtacacatacatacccttgtgtgtctggtccacgcacacgctgtctgga

SEQ ID NO: 31405 - DNA, 961 bp, Homo sapiens
agctgagtgactctcttattaccaccgctcaggaagatcatgcggtttctgggaagcattggagaaggaaaaggctgaagaaaggaagaccggaaaagaaatacaagtccttccgccttggcaaagatgatagtaccgttcccttcagtgttccggttctgctctattggataagttccggtttgactatgactacgtgaaaatgtggaaccagaccttcaccccacattccagctccagctctaccacagaggaagtgcaatatcaccttagttattcaacacattatgctcctcgtgatacaaccagagttcacatcagcaatcttggcagctctcaccacgctgctgactcacgactctctcatgtcccaatttcctgtccattgttctttcctctacttggcctgatttctaaaggcctctcttggttgcattaagcgggattcctgagggattcccttggcagttaccttgggggagctcttaggtttggggctgatccatgtcctctaaatgtaggacttcaaagctcccaaagataggcaggcccagtgggaagctgggaaatgctctctgacccctctgggagggctggcagtcagagggccttttggaaagagtcagacctgatccataagtccctggaaaacaccctgcccagggagcaaatgccactgtggccttgactgaggcttcagaagagtttgggagctgcaattcatccacacacgcattcattttcaagtagtggtttgcagttcaggctttggagccacataagcctggcttcaaagccactttccagctttgtaggaagtctctacatttttaaacctccatttttttttcctgtaaaactggggtcttcatggtacttaacttcatcgtgatgttgagagaatgaaaagaaaaaggataaataaatggcttagcctcgtgccttggcacatattgtgatt

SEQ ID NO: 31406 - DNA, 920 bp, Homo sapiens
acgacgcggacgacgcgaagaagggaggtagcagggcgggcagatttcttggaaaagaaatacaagtccttccgccttggcaaagatgatagtaccgttcccttcagtgttccggttctgctctattggataagttccggtttgactatgactacgtgaaaatgtggaaccagaccttcaccccacattccagctccagctctaccacagaggaagtgcaatatcaccttagttattcaacacattatgctcctcgtgatacaaccagagttcacatcagcaatcttggcagctctcaccacgctgctgactcacgactctctcatgtcccaatttcctgtccattgttctttcctctacttggcctgatttctaaaggcctctcttggttgcattaagcgggattcctgagggattcccttggcagttaccttgggggagctcttaggtttggggctgatccatgtcctctaaatgtaggacttcaaagctcccaaagataggcaggcccagtgggaagctgggaaatgctctctgacccctctgggagggctggcagtcagagggccttttggaaagagtcagacctgatccataagtccctggaaaacaccctgcccagggagcaaatgccactgtggccttgactgaggcttcagaagagtttgggagctgcaattcatccacacacgcattcattttcaagtagtggtttgcagttcaggctttggagccacataagcctggcttcaaagccactttccagctttgtaggaagtctctacatttttaaacctccatttttttttcctgtaaaactggggtcttcatggtacttaacttcatcgtgatgttgagagaatgaaaagaaaaaggataaataaatggcttagcctcgtgccttggcacatattgtgatt

SEQ ID NO: 31407 - DNA, 1001 bp, Homo sapiens
gccatcttcaccccaagcccactggtcctcgagatacgacatccagacccagtgcagctggacctggcccaggaagatcatgcggtttctgggaagcattggagaaggaaaaggctgaagaaaggaagaccggaaaagaaatacaagtccttccgccttggcaaagatgatagtaccgttcccttcagtgttccggttctgctctattggataagttccggtttgactatgactacgtgaaaatgtggaaccagaccttcaccccacattccagctccagctctaccacagaggaagtgcaatatcaccttagttattcaacacattatgctcctcgtgatacaaccagagttcacatcagcaatcttggcagctctcaccacgctgctgactcacgactctctcatgtcccaatttcctgtccattgttctttcctctacttggcctgatttctaaaggcctctcttggttgcattaagcgggattcctgagggattcccttggcagttaccttgggggagctcttaggtttggggctgatccatgtcctctaaatgtaggacttcaaagctcccaaagataggcaggcccagtgggaagctgggaaatgctctctgacccctctgggagggctggcagtcagagggccttttggaaagagtcagacctgatccataagtccctggaaaacaccctgcccagggagcaaatgccactgtggccttgactgaggcttcagaagagtttgggagctgcaattcatccacacacgcattcattttcaagtagtggtttgcagttcaggctttggagccacataagcctggcttcaaagccactttccagctttgtaggaagtctctacatttttaaacctccatttttttttcctgtaaaactggggtcttcatggtacttaacttcatcgtgatgttgagagaatgaaaagaaaaaggataaataaatggcttagcctcgtgccttggcacatattgtgatt

SEQ ID NO: 31408 - DNA, 406 bp, Homo sapiens
ggagatatttccaacacaccctctcttctatgccctttccctaggaaagggcaggatttcacattaaacttagtgaatatttaagtcagggtaagtcttatcctaactatagaatgaaaccatttttgtctcttagtgaatggattttacacctcagtgaacaggtaagagggtttatctttgtgaagtagaagtctttctcatccccttaagaggctacccacttctgcatataaagttaaactatatgagtttgtctccaaaatttataataactggattacctccttgatcccttcaaaatgaagtgtctgataaaaaaagagaattaaatttaaatgtgtcttatgaaagaacattatttaatcaaaagaaagataattattcttctattcttactctcctt

SEQ ID NO: 31409 - DNA, 396 bp, Homo sapiens
aggatcacagctcgctgttatctcagcttcctaggctcaagcaagattcccgcctcagcctcctgaataactgggaccacaggcatgcaccaccacacccaactcagtttttgagattttttatggagatggggtctcactatgttgtcaagtctagtcttgaactcctgggctcaagtgatccacctcagcttcccaaagtgccggcattacaggcgcgaagcagcacacccagcctctcttttttattttatagcatttatcactttcaaatatacttcgtgatttacttgaatatgatttacttatttaccatgttattattttcttcctctagtgcccagaacactatctggcacattgtagataatctatatatgtttgttaagtgaatga

SEQ ID NO: 31410 - DNA, 481 bp, Homo sapiens
agccacaattccctattctttattgggggcattcagtaaacaccactgaataaaattaagaaaatggaaataggcaaacatgaatgcaatatcagtaatatgcagagtagaatttagcacacattttatgatatgggattgagagggtttgttttactgacagtgattacaatccttaacaaaaatctggctgtatgcactgacacatctattacgcaataattgtcagcaattgccaaacaagttgagagaaacaattttaacacctctctcggtatgatacattacataaataaaaatgcctgatggaaagattactgaataagataattactgacttttatcttaaaaatttatatctgaggacatactccagacagaatatttattttaattccaagtacctacaccaaatacccatgcatggtttagaaaactgaagcctactttagcccacagaaagaagctcggtgtgttctac

SEQ ID NO: 31411 - DNA, 343 bp, Homo sapiens
tgagactgatcttgctctgttgccaggctgcagtgtggtggcacgacctcagctcactgcaacctccccctcctgggctcaaatgattctcctgcctcagcatcctgagtaactgggattacaggcacatgccaccacgcccagctaatttttgtatttttagtagagacggggtttcaccatgttggccaggatggtctcgatctcttgacctcgtgatccgcgcgggtcggcctcccaaagtgttgggattacaggcgtgagacatcgtattcccaaaaatattctttctttatccaatattttctttgttactttttcttatttgcatgtattattttcc

SEQ ID NO: 31412 - DNA, 555 bp, Homo sapiens
ttactattgcttttcttcataattttaccaaatttgcatgtttaaacaatgtatttcatgattttgaactgtttatatgtggaatgataatgaatgcattcttctgttacttttattgctcaatattcttcaaattgatctgtgttgcaaataggtacatttcacctgtgtgctattacactgggtaaattaccgctctactccttattctcattgcagttattttctgaattggtgtaggggtgtttgttctttttctgttatagagggtggctatccttgtttcctgatttgcatgtactgtaagaggttctctagggtatatacttggggtggaattcttaaatcaagggtacgcgtatttcattttgagtagataatgccaaattgttttctaaagtgttccttcttttcatagtcccattggcaaggataaagatcccctttgtggccaccacgcccggccctcggtgttattctggccctgattctattttagtaaatagattttactagcagatagggatgggttgggaagaggaaccttaattatag

SEQ ID NO: 31413 - DNA, 332 bp, Homo sapiens
ctttttattagactacatggtgggtgatcactatgtattcataatttgaactttgaaattttattactgtctacttgaaaccaatcacttaatttaattattgcttataagtttgtttcacctaccatggttcctttgtaatgcaaaaccacaaaccaaagtccagtagtttccccttatccatgggagatactttctaagaccccccagtggatgcctgaaactcagatagtactgaaccctatatatactatcttttccttataaatatgtacatatgataaaatttaatttgtcaattagacacagcaagaaattaacaacaaaaataa

SEQ ID NO: 31414 - DNA, 579 bp, Homo sapiens
gctaaaaccttgctgaagatgaatgtataatccaagattagtaaacatgacaattcatcataaatgagaatcagcagacagtaaaaaagcaggcctcatcccccaaaattttagaaaatcagacaactccagtaattctaactccttacttccagtaagtcaagcagcatacaccacctcagagtcttgtacctgtaattgccctttgtctgtaatttttttccctcacaaatagccacttggcctattctctcccattcaccaggtttcatactaacaaggccttccctaccccctctataagacaccatactgccccaacatattcctggtatacatattccttcataaatatctacatagcactttggacacaccaacttactgggtagtgcttactatgcgtctttcccccaccagaaatgtagctccatgaggcggtgactttgtttttttgttttttcttttttgagacgaagtctcactctgtcgcccaggctgcagtgcagttgcaaaatctcagctcactgcaacctccgcctggtgacaagagtgagactctgtctcaaaaataattaa

SEQ ID NO: 31415 - DNA, 549 bp, Homo sapiens
ggacaactgactttctgctttcacctttgcttgtcaactctcccttctcctcattctcttttaatgttaggccccttctccagtcttttccttttactctggtcttttactcgtttttgtatccatttttatttagccccatcacatcattgcttaaccgctgctctcctcccattttcgcttcaccctctttacagcagcctgtccctctcccgatctcagtgatgatgctctaagtggttaagagttgattccggagccaggctgcctgggtttgaacccagatctatttattagcttggtgacccagagcaagttattctgcctgtgactcaatttcctcacctttaaactggggatcatgctagttagcatttcataggattgttgtgaaatttaggtgagtgaatatatgaaacacttcatcagtgcttagcatatgtaggagagttggctgttcacatgattattcagtcctttagttttgtccagaactcatttttgtccctagctttctatatgtagaactagttttatgtcaaacccagg

SEQ ID NO: 31416 - DNA, 292 bp, Homo sapiens
ctcagaaattccaaggaaagtgcaaagaataaattcatcaggaagccaagcagagcacgtaaaatgaaatcacattagcaacgatggcaacaagaaaaattgatttcagaagtgtccacatactcatttcaaaaaaatataaagctgaaaattgtctcctgggcaatgaacatctggaagtgatcaagatgggacaaggtagttgcccatggagcaccttgcagagtgcttagtacatggtgtgttggggaagggggcttgaaacaaagtatggtccttgaaggtgtcccat

SEQ ID NO: 31417 - DNA, 798 bp, Homo sapiens
agggataacatgaacaatttgcccttctttaaagattaaatgccatgttttgtcagttagatgcatatttttcatatttaccacatctgaaattggtattttgtaggtttttttcttttgctcgcttggcgggacataatatagatagctatataaaaaacggtcatgacaaccatggtggtgcacccctgtaatcatagctacgcaagaggctgaggtggaggatcagttgagcccaggagtttgaggctacagtgaattatgattgtgccagttcactccagtctgggtgacagagtgagagcccatctcttaaaaaaagaaaaaaaaaaatagaaatgaatgatatcagtggtgtattctactttatggagaggtatccaaattctgtgaaatactgaagtaagtccccagctttatacttgatttaaaaatacccatgaatatgattattaattaaatattcattcttccccattgtctctccaaatgtctccttcctttcatttttctctcaatcctaaatactgaaaaatggggaatttcaatgtagtatcagtggagcccagttgggcagttggaactgaggcaaagaactgaggtgtctgtattagaagggaaagtaaggagggtaacattagcaatttatggtttactaattagactgtgggcctaatgtgaaggtctgcttatcagttttaatgttttgtttataggggaaaatttccaaccaaccgtcttatgaataaagttaccttgttgaatgtcacggatattcattcaccttgtaaagagcag

SEQ ID NO: 31418 - DNA, 375 bp, Homo sapiens
ggtagccatctggtaaatatacacagccaatgagttgttcttagaaaattgtcaaatttagatttttcttccagattaaaaaaaaagacagccaggcatggtgtctcacacctgtaatcccagcactttgggaggccaaggtgggcagatcatgaggtcaggagttcaagaccagcctgaccagtatggtgaaaccctgtctctactaaaaatacaaatattagccaggtgtggtagcgcgtgcctgtagtcccagttatttgggaggctgaggcaggagaatcacttaagtcggcagtcggggttgcagtgagccaagattgtgccactgcactccagcctgggtgacagagaaagactccgtctcaaaaaaaa

SEQ ID NO: 31419 - DNA, 1147 bp, Homo sapiens
ttaatagagatgaggtctcactatattgcccaggctggtctccaactcctgagctcaagtgatcttcctgccttagcctctccaagtgctgggattacagatgtgagccactgcacctggccaacaaacttctgattcttatagaatcagatgtaattccttagagacctgagaagttctatactcaggttctttcgtgccgtctgactccaagagctcttgcctgaaggaggtcccttccaggacactgagtcccaacccacaccacctccttggagggcgtgtgccctctcttccgctgaccttgacattcttgcacaggctgcttgtgcacagaggcatcacctcccagaggggacctctggagtggccccaggtaccaggtacagtcagccgcttctacctgtggaaggcgatcagggtagaaagctctgggaagcactaaaaatacacacaacccttacaaacacaactcggtgatacatgctaatagttctggactccaaactggggccaaagcacagactccacagctagttctagcatgtagcagatgtcacccaacctggaaagctacttggttgaaacttagttaaatccgtggccacagcagttttatacttgacctgagtcctccaatgtctgccacacctgcagtggcttccttcccattctctctctcctctaaaatacaagaggcatttccccccagtgcaggaagatggaacagactattttggttaatcatctacatttgtgttcttgagtttcttctggagttgtccagcctggggctgcatgcacattggcccaccacaaatgcctccctctgcggagagtgaggtgggccggtcggggcagaacgcctgcttctcaatgcaccccttgctcactcagctctgggagcccccctgccagcgtgcccgagagctactctaaatgaagttcgagctccatttcaggaaggtggtgagacaataaaataacccaggatgacgtgaacagttttgcatttgcttcaaactctgaaaggattcatggttcccacggcctccagactggatggaccactttgggtttcaatggcaggatgatttttctgtaaaacaatggctggctttaaatttcttcttctagaacaaaccaa

SEQ ID NO: 31420 - DNA, 235 bp, Homo sapiens
gactttttcaaagcatgtttcaagtgataatttcagagtctaactttctggtagaggactctagagctaggtcacacaattgcgtcacatagaggcttatgccccagagtatgaacttgcaatttctctgaatatattatataaatcaaataaggtatagatttaaaaacagtatgaaaagtttaaaaaatttcaaagtatattaacagtaattataattgtgtaaagtaagaat

SEQ ID NO: 31421 - DNA, 957 bp, Homo sapiens
atgcagagagccaatcactccacagtgacccaattcatcctcgtcggcttctctgtcttcccccacctccagctgatgctcttcctgctgttcctgctgatgtacctgttcacgctgctgggcaacctgctcatcatggccaccgtctggagcgagcgcagcctccacacgcccatgtacctcttcctgtgcgccctctccgtctccgagatcctctacaccgtggccatcatcccgcgcatgctggccgacctgctgtccacccagcgctccatcgccttcctggcctgtgccagtcagatgttcttctccttcagcttcggcttcacccactccttcctgctcaccgtcatgggctacgaccgctacgtggccatctgccaccccctgcgctacaacgtgctcatgagcccgcggggctgcgcctgcctggtgggctgctcctgggctggtggcttggtcatggggatggtggtgacctcggccattttccacctcgccttctgtggacacaaggagatccaccattttgcttgccatgtgccacctctgttgaagttggcctgtggagacgatgtgctggtggtggccaaaggcgtgggcttggtgtgtatcacggccctgctgggctgttttctcctcatcctcctctcctatgccttcatcgtggccgccatcttgaagatcccttctgctgaaggtcggaacaaggccttctccacctgtgcctctcacctcactgtggtggtcgtgcactatggctttgcctccgtcatttacctgaagcccaaaagtccccagtctctggaaggagacaccttgatgggcatcacctacacggtcctcacacccttcctcagccccatcatcttcagcctcaggaacaaggagctgaaggtcgccatgaagaagaccttcttcagtaaactctacccagaaaaaaatgtaatgatgtag

SEQ ID NO: 31422 - DNA, 2135 bp, Homo sapiens
tccatctcaaaaaaaaaaaaaaaagaaaaatattaataattgaccttggctgtatattaaaatagttacttttatagtagagcacatttctcaaacatgccctgaaaggcttttatcaagctcatataaagttaaagctttgagctaccttttcttggccaataaagtcactgacagtttatgtaaacattaatttcaacatggctgttgcattttaattatcaaaaatgtttaaaatgctttaagatgacacatagagaacatacacatacatacaaattagtgcatttgtaatttgttaaatttgaaatgaactattaccttgaaatatagtctttaaaaatttttaatggttaaagattaaattgaatgaaactgtagtctaatggtaactgatgatctgaatccgtctctctgataacctcctttccattttgaaaatgtgtcttattatacatggaagctagtaactacgtgaatgctgttggcaggatgagggtctgggtacctcagtctcttgtcctgtttccttcccccaaatccaccattgtgaagttgccaaccccctgccgccttcccctgccaagtacatgttgtcagagtcagccctataatgttcatttcccctcttgtttgtgggattatggatctctgcagaaatctgcatgccaattaacccatttctaaagcagaatccattttgcatgtcacaatcaagatgtacttggcaatctaagacacactgggagactgtaagaggaattaatatagaaaagctcttaattataataacatttggaagaaatttttcctttgttttgtaaagtggctaaggttgtaggagtgtgtggtatttattaccttttaaatgaactgtaaatttgccttagaaatttgtttaaaaggctagcaagtgagacccttgaggatgatcatatactaataaagattaccaaaagaaacttcttgtcctgttaggtcagtgttatgatttaatggttttaattacttaaccaattttaagaattgacaatttttaaaaatatttttttctaccattctaaagtaatgtcttttgttgtgggtttatgtgtaactacaggattttggaacataaacattttgaaggatagtcaatggtatttagtcttggatataaaaatagagaaaatttatagctttatgttattaaaataatttatcacacagagtgatttgaggttttcgcagagtagatttgtttgactcatggtttattagtctggattacttaagaacaatatgttgattttaatgttaattcccactaaatatataatattgataaatacatgtgaaattaatattgtttggaaaatgtagaggacacagctgggaattatgaatgcttttttcttaataggtttggtgtgtgtggctttgaatggttctgctgatgcatcatggaaagacagcagggaactgtagcctgccatcaaaactgtatcaactcttttaatgagcatgtgactgtattaggtacattttgaagaatataagtactgatgataaagtctagtatgcataataggattttggaggcatttcaggaattttccttttatagtatgctttttaggcatctgtatgtgtaatatcatagtatcatttattgctgggatggatcgaaaagcactgcttttacttttctgataagtatcaaaatgattttccagtaccaacttgactggcttttaattattgtcacacacacacaaaattcaactcctcaaggtttgggaaaattgtgtatttttttgtatacaagataaaagtgtcataaaaaggaatggatgaattgttgataggaacattagcagttaatttttacctgatactgagtttactgtaaaataggaaatgcataggaaggaatacctcctaaataatatgccttatagaatgatgaaatcttaccatagttcatactgaaaatgttgtttatttaaaagtattgtggagtgttgaaaataaagatacacaataagtattttctgaagagaaaattaatgaaggtatttaatgatataggaaataagtgacaagttaaagtccattttgtttcaataaaggagttgtgcaaactcaaaaaaaaa

SEQ ID NO: 31423 - DNA, 2093 bp, Homo sapiens
tccatctcaaaaaaaaaaaaaaaagaaaaatattaataattgaccttggctgtatattaaaatagttacttttatagtagagcacatttctcaaacatgccctgaaaggcttttatcaagctcatataaagttaaagctttgagctaccttttcttggccaataaagtcactgacagtttatgtaaacattaatttcaacatggctgttgcattttaattatcaaaaatgtttaaaatgctttaatttgtaatttgttaaatttgaaatgaactattaccttgaaatatagtctttaaaaatttttaatggttaaagattaaattgaatgaaactgtagtctaatggtaactgatgatctgaatccgtctctctgataacctcctttccattttgaaaatgtgtcttattatacatggaagctagtaactacgtgaatgctgttggcaggatgagggtctgggtacctcagtctcttgtcctgtttccttcccccaaatccaccattgtgaagttgccaaccccctgccgccttcccctgccaagtacatgttgtcagagtcagccctataatgttcatttcccctcttgtttgtgggattatggatctctgcagaaatctgcatgccaattaacccatttctaaagcagaatccattttgcatgtcacaatcaagatgtacttggcaatctaagacacactgggagactgtaagaggaattaatatagaaaagctcttaattataataacatttggaagaaatttttcctttgttttgtaaagtggctaaggttgtaggagtgtgtggtatttattaccttttaaatgaactgtaaatttgccttagaaatttgtttaaaaggctagcaagtgagacccttgaggatgatcatatactaataaagattaccaaaagaaacttcttgtcctgttaggtcagtgttatgatttaatggttttaattacttaaccaattttaagaattgacaatttttaaaaatatttttttctaccattctaaagtaatgtcttttgttgtgggtttatgtgtaactacaggattttggaacataaacattttgaaggatagtcaatggtatttagtcttggatataaaaatagagaaaatttatagctttatgttattaaaataatttatcacacagagtgatttgaggttttcgcagagtagatttgtttgactcatggtttattagtctggattacttaagaacaatatgttgattttaatgttaattcccactaaatatataatattgataaatacatgtgaaattaatattgtttggaaaatgtagaggacacagctgggaattatgaatgcttttttcttaataggtttggtgtgtgtggctttgaatggttctgctgatgcatcatggaaagacagcagggaactgtagcctgccatcaaaactgtatcaactcttttaatgagcatgtgactgtattaggtacattttgaagaatataagtactgatgataaagtctagtatgcataataggattttggaggcatttcaggaattttccttttatagtatgctttttaggcatctgtatgtgtaatatcatagtatcatttattgctgggatggatcgaaaagcactgcttttacttttctgataagtatcaaaatgattttccagtaccaacttgactggcttttaattattgtcacacacacacaaaattcaactcctcaaggtttgggaaaattgtgtatttttttgtatacaagataaaagtgtcataaaaaggaatggatgaattgttgataggaacattagcagttaatttttacctgatactgagtttactgtaaaataggaaatgcataggaaggaatacctcctaaataatatgccttatagaatgatgaaatcttaccatagttcatactgaaaatgttgtttatttaaaagtattgtggagtgttgaaaataaagatacacaataagtattttctgaagagaaaattaatgaaggtatttaatgatataggaaataagtgacaagttaaagtccattttgtttcaataaaggagttgtgcaaactcaaaaaaaaa

SEQ ID NO: 31424 - DNA, 573 bp, Homo sapiens
ggatcccagtttagccatctctgatctaaaggcacgtgacttctctaatgttcatggcagacctattctgtaagcccattgtgcagccaagtcagcatgccattccagtgcagtgtgagagggcagagatgggggccaagagtacaaatagagtgggacagttgtcattgcccagcctgtgagttgaagtctgtgcagtcagccagtgggtctgacaaagagggcagtgctggcactgcctcatgcttccgcagaggtgatgaggttcaggctgaggtggagaccacgctgcactcgccatgcattcaatggtgccccatctcttgttctctaggaagcattcccgctacctgtgtgatgcagttggttccacctattcccagagactccaccctggccctccttgccctggcccccagcactgagcccctagggccatttagctggccagcatgatctaagacagctttctgcaggcattcctcttgtaggagtcatgaagcagcaatgtgtattttgcttctttttgttgttgttatattaaaaaatatttttatattctagtccaaaaaa

SEQ ID NO: 31425 - DNA, 933 bp, Homo sapiens
gagaattcaagctttaagaggaattttcttgctggactctgagtccctgtcagccctcctaagtcttagatcatgcctctgagccctgtagtactgaatcaatggggatgctttggctgcaagtaacaaaacccaaataacagtaagtaagattaagcagagctcagatctcccaaagatgctctctgctcttggaaggtctctgtacacaggaatgggatatcagtgccacttccagcaagttcctgcatgggacaggtagccataaaggctgagtgtctggagttcagagtaataggttttgtcttcttgagtcacagcctctttaatatgttgatgagaagcccagggaacgttgatgtacaaagttggacatataattcaggggattcatggatctttctctaatgttcatggcagacctattctgtaagcccattgtgcagccaagtcagcatgccattccagtgcagtgtgagagggcagagatgggggccaagagtacaaatagagtgggacagttgtcattgcccagcctgtgagttgaagtctgtgcagtcagccagtgggtctgacaaagagggcagtgctggcactgcctcatgcttccgcagaggtgatgaggttcaggctgaggtggagaccacgctgcactcgccatgcattcaatggtgccccatctcttgttctctaggaagcattcccgctacctgtgtgatgcagttggttccacctattcccagagactccaccctggccctccttgccctggcccccagcactgagcccctagggccatttagctggccagcatgatctaagacagctttctgcaggcattcctcttgtaggagtcatgaagcagcaatgtgtattttgcttctttttgttgttgttatattaaaaaatatttttatattctagtccaaaaaa

SEQ ID NO: 31426 - DNA, 521 bp, Homo sapiens
ctcagaaacgtgcttagaaaagtgcagatgcactgttattcttggccaatgcagctgagccaggtgtaggtggatgactaccccaggatgttgagctgagaaacaggatctcagcctgaacccaatgtagctcagcagatgtttgaattatgtgatctccagcttttgggaaagatctgaatgtaagaggaacttaagagaattagcatgatattttaaagagaataactgcattacattctaacagcagacctgagtcggaaaacaagtaaagaatcgatgtattggtttgccgatggaagagcttcagtgagatctcagaccctgaccctgcagtgagccttggcaatgattgacagggaagtttgtaggataacgcagaagtaggattagtgtgccactgctccaggctgaaaatcagaaatgaaagctaaaatacatttgtacataagctataccttcaattgatagagcaagctgtgtgactcaaaacagcctgtacagaagtacgatggaccagc

SEQ ID NO: 31427 - DNA, 342 bp, Homo sapiens
tttgttttgtttttgagacagagtcttactcggttgcccaggctggagtgcaggttgcagtgagcccagattgcgctactgcactccagcctgggcagtcaaggaagactccatctcaaaaaaaagaaaaagaaaaagaaaaaaaattgaatccaaatattaggagatttcttagtgaggtgccaaacctaagtatttggtaactgaattggctaaattattggctgatattttggttttgtaaacaatcacatagagatctcttatgattctgccctatatgaatgttgagttttcttcttttgggtcactgaatgtttctagatcaataggaacccagcc

SEQ ID NO: 31428 - DNA, 767 bp, Homo sapiens
ttacaggttcatatgcagaagggacttgccttttctcagatgagatgttggactcggacttttgagttaatgctgaaatgagctaagactttggggaactgttgggaagacatgatcggttttgaaatgcgagaaggacatgagatgtgggaggggccaagggtggaattataaggtttagctctgtgtccccacccaaatttcatctcgaattgtaattcctaatgttggggaagggacctggtgggaagtgattggatcatgggggtggacttccctcatgctgttctcctgataatgagtgagttctcatgagatctgcttgtttaaaggtgtatggcacttccccccttgctcacgctttctctcttctgctgccatgagaagaaagtgcttgctttccctttgcttttctcccatgattcagtttctgaggcctcccagtcatgcttcctgttaagtctgtggaacttggagtcaattaaacctcttttcttcataaattacccagtctcaggtggttctttatagcagtgtgagaacagactaatgtactaagcaataagaaagatgtccaggccccaaatgccccaacctgacacctagctggctcttaaagagggtagctactgtgaagagggagaaaaaggccttggcatctgcagaccctctttctttatgatcctttaaatataaaggatgtgtttatgtctgtcttcctaagtaggaagttttattctttaaactaaatttgacctactggcatg

SEQ ID NO: 31429 - DNA, 963 bp, Homo sapiens
atggaccaaagcaattatagttctttacatggttttattctgcttggcttctctaaccatccaaaaatggagatgatcctgtcaggagttgtcgccatcttctacttaattacattggtgggtaacacagccatcattcttgcatctctcctggattcccagcttcatacaccaatgtactttttcctcagaaatttatctttcctagatctatgtttcacaaccagcatcatccctcagatgctggtcaacttgtggggacctgataagaccatcagctatgtgggttgtatcatccaactctatgtttacatgtggttgggctcagttgagtgccttctcctggctgttatgtcctatgatcgttttacagctatatgtaagcccttgcattattttgtagtcatgaacccacatctatgtctaaagatgattatcatgatctggagtattagtttggccaattctgtagtattatgtacactcactctgaatttgcccacatgtggaaacaacattctggatcatttcttgtgtgagttgccagctctggtcaagatagcttgtgtagacaccacaacagttgaaatgtctgttttcgctttaggcattataattgtcctcacacctctcatccttattcttatatcctatggctacattgccaaagctgtgctgagaacgaagtcaaaagcaagccagcgaaaagcaatgaatacctgtggatctcatcttactgtagtgtctatgttctatggaactattatctacatgtacctgcaaccaggtaacagggcttccaaagaccagggcaagttcctcaccctcttttacaccgtcatcactccaagtctcaacccgctcatttacaccttaagaaataaggacatgaaggatgccctgaagaaactgatgagatttcaccacaaatctacaaaaataaagaggaattgcaagtcatag

SEQ ID NO: 31430 - DNA, 320 bp, Homo sapiens
tgcaagggagtttcactctttttgcaacccccgcctcccaggttgaagcgattttcctgcctcagcctcccgagtagctggaaacacaggctcgcatcaccacgcccagctaattttgtattttcagtacagacagggttttgccatgttggccgggctggtctcgaactcctgatttcaggtgatccagtggcctcggcttcccaaagtgctggggattgcgggcgtgacacccatgactgggctaatttttgtattttaagtaggagacagatttcactatgttgaccagggttgtcttgaactcctgacctcaggtg

SEQ ID NO: 31431 - DNA, 394 bp, Homo sapiens
gaagtagctaggaccacgggcacatgtcaccacactcagctaatttttcaattttttgtagagataaggtctctacaaaaaatgttttttgtctaggctggtctcgaactcctgggctcaagcaatcctcctgctttggcctcccaaagttctgggattataggtgtgagccactgtacccagcctgtatttcattttctgcttcattaaagccactaccaaatttgagaacttggtggtttagtggagaaatttatcatagtgaccatttcatttgactatgaataagatttaatgtttgaataatgtgagaagtttgggccagtttcacagattttatagttgcagagtgctgccatgcagctttctctgtgagttagtccttcgatgcaaa

SEQ ID NO: 31432 - DNA, 605 bp, Homo sapiens
gcggccgcagagcactttgcccggagcccagcgtcctcccctgagttcgctgagtctcccgggaccagcaaaggctgcgcgccccgcatcggcccggaggcggggagccctgggaggcctggccgagctgcccgcagggaaatggcggagaaagcgcttctctgcccgagttcagccgggctggggacttggccctgggtcctgaactcggcatggccagttctgcctctggctgtggaccagggtgtggactggagaccgcgggggccaggtgtgtgggcaaaccggctttggcgagcgacagaccggctgtgaaccctgccagctgcacttcctggctgtgtgaccttgggctagtcactttacctctctgattctcagctttccttctctgttgtaagagttctcctagtacctggtagacgctcaggaaatgggagctgcagatattttgggaaagagctagctcctggcacctgcttcaagtgcagagaaccagcgtccagtattgatcaccaagagagggtggcccagctgtttgtgtgtcagctgaaaagcaacccctcttgacccccaatctaaatacccctttccaggagaactgg

SEQ ID NO: 31433 - DNA, 1623 bp, Homo sapiens
gcggccgcagagcactttgcccggagcccagcgtcctcccctgagttcgctgagtctcccgggaccagcaaaggctgcgcgccccgcatcggcccggaggcggggagccctgggaggcctggccgagctgcccgcagggaaatggcggagaaagcgcttctctgcccgagttcagccgggctggggacttggccctgggtcctgaactcggcatggccagttctgcctctggctgtggaccagggtgtggactggagaccgcgggggccagtctcatcggatcagatcgagcagctccatcggagatttaagcagctgagtggagatcagcctaccattcgcaaggagaacttcaacaatgtcccggacctggagctcaaccccatccgatccaaaattgttcgtgccttcttcgacaacaggaacctgcgcaagggacccagtggcctggctgatgagatcaatttcgaggacttcctgaccatcatgtcctacttccggcccatcgacaccaccatggacgaggaacaggtggagctgtcccggaaggagaagctgagatttctgttccacatgtacgactcggacagcgacggccgcatcactctggaagaatatcgaaatgtggtcgaggagctgctgtcgggaaaccctcacatcgagaaggagtccgctcgctccatcgccgacggggccatgatggaggcggccagcgtgtgcatggggcagatggagcctgatcaggtgtacgaggggatcaccttcgaggacttcctgaagatctggcaggggatcgacattgagaccaagatgcacgtccgcttccttaacatggaaaccatggccctctgccactgacccaccgccacctccgcggagaaactgcactttgcaatggggccgcctccccgcgtagctggagcagcccaggcccggcggacagcctcttcctgcagcgccggtacatagccaaggctcgtctgcgcaccttgtgtcttgtagggtatggtatgtgggacttcgctgtttttatctccaataaaaaaaaaaaaaggtttgttaattaaaaaaaaaaaaaaaaaaatcaaaaacaacaaaacaaagggggggcgcgccgactaaaagaataccccccagagggggcggcccaggttattacagggtagcaccacgagttttttatggaaaaaggggggccccataataggaggcggcgctaatatataaccgacgagggacactagggcgcggtgttttaaaaacgctgctaagatcggtggcaaaaaagacgtcgcataagcgtgaggaaacatcattgtggaaaaagaacggaccccctcaacttcagccgggcggagaggagacacaatatatggggggcacacaaaacaacctcccctcaccgggcgagaaatttattagacgcgccccaagcagggcaagacatattcaacaaacctttaacaacagggtgactcaataaggcgggtgtctcaacacaacaaagacgcggacaaaaatatgagccatggccccgcttcatagagaaaaagtatctggcgcatcaacgcggagcagcaaatctaatcttgatcgccaaaaacattttttattcccccggcg

SEQ ID NO: 31434 - DNA, 1396 bp, Homo sapiens
atatcttatgatggtgcgggagctcgaggtgctagtaacgcgcttctcatcggatcagatcgagcagctccatcggagatttaagcagctgagtggagatcagcctaccattcgcaaggagaacttcaacaatgtcccggacctggagctcaaccccatccgatccaaaattgttcgtgccttcttcgacaacaggaacctgcgcaagggacccagtggcctggctgatgagatcaatttcgaggacttcctgaccatcatgtcctacttccggcccatcgacaccaccatggacgaggaacaggtggagctgtcccggaaggagaagctgagatttctgttccacatgtacgactcggacagcgacggccgcatcactctggaagaatatcgaaatgtggtcgaggagctgctgtcgggaaaccctcacatcgagaaggagtccgctcgctccatcgccgacggggccatgatggaggcggccagcgtgtgcatggggcagatggagcctgatcaggtgtacgaggggatcaccttcgaggacttcctgaagatctggcaggggatcgacattgagaccaagatgcacgtccgcttccttaacatggaaaccatggccctctgccactgacccaccgccacctccgcggagaaactgcactttgcaatggggccgcctccccgcgtagctggagcagcccaggcccggcggacagcctcttcctgcagcgccggtacatagccaaggctcgtctgcgcaccttgtgtcttgtagggtatggtatgtgggacttcgctgtttttatctccaataaaaaaaaaaaaaggtttgttaattaaaaaaaaaaaaaaaaaaatcaaaaacaacaaaacaaagggggggcgcgccgactaaaagaataccccccagagggggcggcccaggttattacagggtagcaccacgagttttttatggaaaaaggggggccccataataggaggcggcgctaatatataaccgacgagggacactagggcgcggtgttttaaaaacgctgctaagatcggtggcaaaaaagacgtcgcataagcgtgaggaaacatcattgtggaaaaagaacggaccccctcaacttcagccgggcggagaggagacacaatatatggggggcacacaaaacaacctcccctcaccgggcgagaaatttattagacgcgccccaagcagggcaagacatattcaacaaacctttaacaacagggtgactcaataaggcgggtgtctcaacacaacaaagacgcggacaaaaatatgagccatggccccgcttcatagagaaaaagtatctggcgcatcaacgcggagcagcaaatctaatcttgatcgccaaaaacattttttattcccccggcg

SEQ ID NO: 31435 - DNA, 1569 bp, Homo sapiens
agatccagcaggtgcgcgaaaccgcggcgcgccgccctccgccgttatatgaggccccgctccggccccacgcggaacccgcggctccgagccttcgccggcgtcccgacccgaggccggacccgaggccagtcccgccgctgcgcagccgaagccagtgcggggcctgagagggacgcgcgccccggggcccccgccgcgggcaccatgggcgctgcccactccgcgtctgaggaggtgcgggagctcgagggcaagaccggcttctcatcggatcagatcgagcagctccatcggagatttaagcagctgagtggagatcagcctaccattcgcaaggagaacttcaacaatgtcccggacctggagctcaaccccatccgatccaaaattgttcgtgccttcttcgacaacaggaacctgcgcaagggacccagtggcctggctgatgagatcaatttcgaggacttcctgaccatcatgtcctacttccggcccatcgacaccaccatggacgaggaacaggtggagctgtcccggaaggagaagctgagatttctgttccacatgtacgactcggacagcgacggccgcatcactctggaagaatatcgaaatgtggtcgaggagctgctgtcgggaaaccctcacatcgagaaggagtccgctcgctccatcgccgacggggccatgatggaggcggccagcgtgtgcatggggcagatgatctggcaggggatcgacattgagaccaagatgcacgtccgcttccttaacatggaaaccatggccctctgccactgacccaccgccacctccgcggagaaactgcactttgcaatggggccgcctccccgcgtagctggagcagcccaggcccggcggacagcctcttcctgcagcgccggtacatagccaaggctcgtctgcgcaccttgtgtcttgtagggtatggtatgtgggacttcgctgtttttatctccaataaaaaaaaaaaaaggtttgttaattaaaaaaaaaaaaaaaaaaatcaaaaacaacaaaacaaagggggggcgcgccgactaaaagaataccccccagagggggcggcccaggttattacagggtagcaccacgagttttttatggaaaaaggggggccccataataggaggcggcgctaatatataaccgacgagggacactagggcgcggtgttttaaaaacgctgctaagatcggtggcaaaaaagacgtcgcataagcgtgaggaaacatcattgtggaaaaagaacggaccccctcaacttcagccgggcggagaggagacacaatatatggggggcacacaaaacaacctcccctcaccgggcgagaaatttattagacgcgccccaagcagggcaagacatattcaacaaacctttaacaacagggtgactcaataaggcgggtgtctcaacacaacaaagacgcggacaaaaatatgagccatggccccgcttcatagagaaaaagtatctggcgcatcaacgcggagcagcaaatctaatcttgatcgccaaaaacattttttattcccccggcg

SEQ ID NO: 31436 - DNA, 1426 bp, Homo sapiens
agatccagcaggtgcgcgaaaccgcggcgcgccgccctccgccgttatatgaggccccgctccggccccacgcggaacccgcggctccgagccttcgccggcgtcccgacccgaggccggacccgaggccagtcccgccgctgcgcagccgaagccagtgcggggcctgagagggacgcgcgccccggggcccccgccgcgggcaccatgggcgctgcccactccgcgtctgaggaggtgcgggagctcgagggcaagaccggcttctcatcggatcagatcgagcagctccatcggagatttaagcagctgagtggagatcagcctaccattcgcaaggagaacttcaacaatgtcccggacctggagctcaaccccatccgatccaaaattgttcgtgccttcttcgacaacaggaacctgcgcaagggacccagtggcctggctgatgagatcaatttcgaggacttcctgaccatcatgtcctacttccggcccatcgacaccaccatggacgaggaacaggtggagctgtcccggaaggagaagctgagatcttgtggcttcctgggactagaagggggttgtgcggtggatgtgaaacaaggcccttgatgcaaagacctgggttccagtgtggcccgtctcaccagccatgtgaccttgaaccttgacccagaacgtgggtatgccgatcatgcgtggttctgagggctgggtaagatcacacagtcagcctttggcacacaggaagcgctccctaaagtcagtttcctcctctccctcctccatgggctgtgctattgctgggttcctgagaccagccccactatgttctggctcccgagtgggttcagttgtggtcccagctggccagccgcacaggtcccaggcagtgccccgagtcacatctccttttcctgtggcctttcccatgactcctgacatccctctgtgtcccgccccaggtcagcctcctcatcaagaaaatgtaaacatgggacttcgctatatttagcactggaatgtgtatgcggggctggtgggaacagcccgggtggcgggggtggatccctggtgtgagcctggcttcctgtctgctccaaggggcgtggaacaggacggactcaggtccaaatccctggtttcctgtcccttagtggtgtggccgtgggcaaacgccttaacttccgtgagctttgacagtctgtctgggaggcagggctcaggcatccctggcctcttggggttgggtgagagggagacagaggtttgtgaagcgctttgcacacctgggcatctggtcagtgttcagtaaatgccagctgggctcagtggtgcactcctgtaatcccagcactttaggaggctgagtggggaggatcacttgaagccacgagttcagggctcagcctgggcagcagag

SEQ ID NO: 31437 - DNA, 1084 bp, Homo sapiens
gcggccgcagagcactttgcccggagcccagcgtcctcccctgagttcgctgagtctcccgggaccagcaaaggctgcgcgccccgcatcggcccggaggcggggagccctgggaggcctggccgagctgcccgcagggaaatggcggagaaagcgcttctctgcccgagttcagccgggctggggacttggccctgggtcctgaactcggcatggccagttctgcctctggctgtggaccagggtgtggactggagaccgcgggggccagtctcatcggatcagatcgagcagctccatcggagatttaagcagctgagtggagatcagcctaccattcgcaaggagaacttcaacaatgtcccggacctggagctcaaccccatccgatccaaaattgttcgtgccttcttcgacaacaggtacatagccaaggctcgtctgcgcaccttgtgtcttgtagggtatggtatgtgggacttcgctgtttttatctccaataaaaaaaaaaaaaggtttgttaattaaaaaaaaaaaaaaaaaaatcaaaaacaacaaaacaaagggggggcgcgccgactaaaagaataccccccagagggggcggcccaggttattacagggtagcaccacgagttttttatggaaaaaggggggccccataataggaggcggcgctaatatataaccgacgagggacactagggcgcggtgttttaaaaacgctgctaagatcggtggcaaaaaagacgtcgcataagcgtgaggaaacatcattgtggaaaaagaacggaccccctcaacttcagccgggcggagaggagacacaatatatggggggcacacaaaacaacctcccctcaccgggcgagaaatttattagacgcgccccaagcagggcaagacatattcaacaaacctttaacaacagggtgactcaataaggcgggtgtctcaacacaacaaagacgcggacaaaaatatgagccatggccccgcttcatagagaaaaagtatctggcgcatcaacgcggagcagcaaatctaatcttgatcgccaaaaacattttttattcccccggcg

SEQ ID NO: 31438 - DNA, 973 bp, Homo sapiens
gcttgggggcttggagggcttggggccaccagccctcgtccctgtgaggctggcattgctgtctcccgttcccggcaccttcatcctaaacattcctcagcagcttgtggcttcctgggactagaagggggttgtgcggtggatgtgaaacaaggcccttgatgcaaagacctgggttccagtgtggcccgtctcaccagccatgtgaccttgaaccttgacccagaacgtgggtatgccgatcatgcgtggttctgagggctgggtaagatcacacagtcagcctttggcacacaggaagcgctccctaaagtcagtttcctcctctccctcctccatgggctgtgctattgctgggttcctgagaccagccccactatgttctggctcccgagtgggttcagttgtggtcccagctggccagccgcacaggtcccaggcagtgccccgagtcacatctccttttcctgtggcctttcccatgactcctgacatccctctgtgtcccgccccaggtcagcctcctcatcaagaaaatgtaaacatgggacttcgctatatttagcactggaatgtgtatgcggggctggtgggaacagcccgggtggcgggggtggatccctggtgtgagcctggcttcctgtctgctccaaggggcgtggaacaggacggactcaggtccaaatccctggtttcctgtcccttagtggtgtggccgtgggcaaacgccttaacttccgtgagctttgacagtctgtctgggaggcagggctcaggcatccctggcctcttggggttgggtgagagggagacagaggtttgtgaagcgctttgcacacctgggcatctggtcagtgttcagtaaatgccagctgggctcagtggtgcactcctgtaatcccagcactttaggaggctgagtggggaggatcacttgaagccacgagttcagggctcagcctgggcagcagag

SEQ ID NO: 31439 - DNA, 1617 bp, Homo sapiens
agatccagcaggtgcgcgaaaccgcggcgcgccgccctccgccgttatatgaggccccgctccggccccacgcggaacccgcggctccgagccttcgccggcgtcccgacccgaggccggacccgaggccagtcccgccgctgcgcagccgaagccagtgcggggcctgagagggacgcgcgccccggggcccccgccgcgggcaccatgggcgctgcccactccgcgtctgaggaggtgcgggagctcgagggcaagaccggcttctcatcggatcagatcgagcagctccatcggagatttaagcagctgagtggagatcagcctaccattcgcaaggagaacttcaacaatgtcccggacctggagctcaaccccatccgatccaaaattgttcgtgccttcttcgacaacaggaacctgcgcaagggacccagtggcctggctgatgagatcaatttcgaggacttcctgaccatcatgtcctacttccggcccatcgacaccaccatggacgaggaacaggtggagctgtcccggaaggagaagctgagatttctgttccacatgtacgactcggacagcgacggccgcatcactctggaagaatatcgaaatgtggtcgaggagctgctgtcgggaaaccctcacatcgagaaggagtccgctcgctccatcgccgacggggccatgatggaggcggccagcgtgtgcatggggcagatggagcctgatcaggtgtacgaggggatcaccttcgaggacttcctgaagatctggcaggggatcgacattgagaccaagatgcacgtccgcttccttaacatggaaaccatggccctctgccactgacccaccgccacctccgcggagaaactgcactttgcaatggggccgcctccccgcgtagctggagcagcccaggcccggcggacagcctcttcctgcagcgccggtacatagccaaggctcgtctgcgcaccttgtgtcttgtagggtatggtatgtgggacttcgctgtttttatctccaataaaaaaaaaaaaaggtttgttaattaaaaaaaaaaaaaaaaaaatcaaaaacaacaaaacaaagggggggcgcgccgactaaaagaataccccccagagggggcggcccaggttattacagggtagcaccacgagttttttatggaaaaaggggggccccataataggaggcggcgctaatatataaccgacgagggacactagggcgcggtgttttaaaaacgctgctaagatcggtggcaaaaaagacgtcgcataagcgtgaggaaacatcattgtggaaaaagaacggaccccctcaacttcagccgggcggagaggagacacaatatatggggggcacacaaaacaacctcccctcaccgggcgagaaatttattagacgcgccccaagcagggcaagacatattcaacaaacctttaacaacagggtgactcaataaggcgggtgtctcaacacaacaaagacgcggacaaaaatatgagccatggccccgcttcatagagaaaaagtatctggcgcatcaacgcggagcagcaaatctaatcttgatcgccaaaaacattttttattcccccggcg

SEQ ID NO: 31440 - DNA, 1268 bp, Homo sapiens
caaagacagagtggaatccggtgccctcacctccttttaaatcctggttctcagagaaaggactcaggaacctgcgcaagggacccagtggcctggctgatgagatcaatttcgaggacttcctgaccatcatgtcctacttccggcccatcgacaccaccatggacgaggaacaggtggagctgtcccggaaggagaagctgagatttctgttccacatgtacgactcggacagcgacggccgcatcactctggaagaatatcgaaatgtggtcgaggagctgctgtcgggaaaccctcacatcgagaaggagtccgctcgctccatcgccgacggggccatgatggaggcggccagcgtgtgcatggggcagatggagcctgatcaggtgtacgaggggatcaccttcgaggacttcctgaagatctggcaggggatcgacattgagaccaagatgcacgtccgcttccttaacatggaaaccatggccctctgccactgacccaccgccacctccgcggagaaactgcactttgcaatggggccgcctccccgcgtagctggagcagcccaggcccggcggacagcctcttcctgcagcgccggtacatagccaaggctcgtctgcgcaccttgtgtcttgtagggtatggtatgtgggacttcgctgtttttatctccaataaaaaaaaaaaaaggtttgttaattaaaaaaaaaaaaaaaaaaatcaaaaacaacaaaacaaagggggggcgcgccgactaaaagaataccccccagagggggcggcccaggttattacagggtagcaccacgagttttttatggaaaaaggggggccccataataggaggcggcgctaatatataaccgacgagggacactagggcgcggtgttttaaaaacgctgctaagatcggtggcaaaaaagacgtcgcataagcgtgaggaaacatcattgtggaaaaagaacggaccccctcaacttcagccgggcggagaggagacacaatatatggggggcacacaaaacaacctcccctcaccgggcgagaaatttattagacgcgccccaagcagggcaagacatattcaacaaacctttaacaacagggtgactcaataaggcgggtgtctcaacacaacaaagacgcggacaaaaatatgagccatggccccgcttcatagagaaaaagtatctggcgcatcaacgcggagcagcaaatctaatcttgatcgccaaaaacattttttattcccccggcg

SEQ ID NO: 31441 - DNA, 1624 bp, Homo sapiens
  misc_feature (760)..(761): n is a, c, g, or t
  misc_feature (763)..(764): n is a, c, g, or t
agatccagcaggtgcgcgaaaccgcggcgcgccgccctccgccgttatatgaggccccgctccggccccacgcggaacccgcggctccgagccttcgccggcgtcccgacccgaggccggacccgaggccagtcccgccgctgcgcagccgaagccagtgcggggcctgagagggacgcgcgccccggggcccccgccgcgggcaccatgggcgctgcccactccgcgtctgaggaggtgcgggagctcgagggcaagaccggcttctcatcggatcagatcgagcagctccatcggagatttaagcagctgagtggagatcagcctaccattcgcaaggagaacttcaacaatgtcccggacctggagctcaaccccatccgatccaaaattgttcgtgccttcttcgacaacaggaacctgcgcaagggacccagtggcctggctgatgagatcaatttcgaggacttcctgaccatcatgtcctacttccggcccatcgacaccaccatggacgaggaacaggtggagctgtcccggaaggagaagctgagatttctgttccacatgtacgactcggacagcgacggccgcatcactctggaagaatatcgaaatgtggtcgaggagctgctgtcgggaaaccctcacatcgagaaggagtccgctcgctccatcgccgacggggccatgatggaggcggccagcgtgtgcatggggcagatgaacctgaacaaaaaaaaaaaaaaaaaacagaaannannacaaaacaaaaatcaaaatctggcaggggatcgacattgagaccaagatgcacgtccgcttccttaacatggaaaccatggccctctgccactgacccaccgccacctccgcggagaaactgcactttgcaatggggccgcctccccgcgtagctggagcagcccaggcccggcggacagcctcttcctgcagcgccggtacatagccaaggctcgtctgcgcaccttgtgtcttgtagggtatggtatgtgggacttcgctgtttttatctccaataaaaaaaaaaaaaggtttgttaattaaaaaaaaaaaaaaaaaaatcaaaaacaacaaaacaaagggggggcgcgccgactaaaagaataccccccagagggggcggcccaggttattacagggtagcaccacgagttttttatggaaaaaggggggccccataataggaggcggcgctaatatataaccgacgagggacactagggcgcggtgttttaaaaacgctgctaagatcggtggcaaaaaagacgtcgcataagcgtgaggaaacatcattgtggaaaaagaacggaccccctcaacttcagccgggcggagaggagacacaatatatggggggcacacaaaacaacctcccctcaccgggcgagaaatttattagacgcgccccaagcagggcaagacatattcaacaaacctttaacaacagggtgactcaataaggcgggtgtctcaacacaacaaagacgcggacaaaaatatgagccatggccccgcttcatagagaaaaagtatctggcgcatcaacgcggagcagcaaatctaatcttgatcgccaaaaacattttttattcccccggcg

SEQ ID NO: 31442 - DNA, 939 bp, Homo sapiens
acggtaggtgggaagggccgaggaccggggggcctggtcaggtgtgaaggtggcggcgggaacgtgcccttaacgctgctccgtcccttccagatcatctggcaggggatcgacattgagaccaagatgcacgtccgcttccttaacatggaaaccatggccctctgccactgacccaccgccacctccgcggagaaactgcactttgcaatggggccgcctccccgcgtagctggagcagcccaggcccggcggacagcctcttcctgcagcgccggtacatagccaaggctcgtctgcgcaccttgtgtcttgtagggtatggtatgtgggacttcgctgtttttatctccaataaaaaaaaaaaaaggtttgttaattaaaaaaaaaaaaaaaaaaatcaaaaacaacaaaacaaagggggggcgcgccgactaaaagaataccccccagagggggcggcccaggttattacagggtagcaccacgagttttttatggaaaaaggggggccccataataggaggcggcgctaatatataaccgacgagggacactagggcgcggtgttttaaaaacgctgctaagatcggtggcaaaaaagacgtcgcataagcgtgaggaaacatcattgtggaaaaagaacggaccccctcaacttcagccgggcggagaggagacacaatatatggggggcacacaaaacaacctcccctcaccgggcgagaaatttattagacgcgccccaagcagggcaagacatattcaacaaacctttaacaacagggtgactcaataaggcgggtgtctcaacacaacaaagacgcggacaaaaatatgagccatggccccgcttcatagagaaaaagtatctggcgcatcaacgcggagcagcaaatctaatcttgatcgccaaaaacattttttattcccccggcg

SEQ ID NO: 31443 - DNA, 628 bp, Homo sapiens
tcttggagaaagggccatctaggttgaaacttaagggttagtagacctaacaagattaaaagcctgagggatctaaagccttgggacttctggatctgcaagtggtccctgttttggtagctattgactgacgaggggctcttcgccccacaggtgactgctgtagccttgagtgaggacctcggccaaaaagaaggctcctaccgtggctgtttgctgatggtcttcgcagagcctgctgtctttgagcttcctgagagagggacactaccctcgcttaggtgagtgctccaggtccatggggcctgatgctctgtccctggtctggcttccgcccatgtatacatttgcactcttgatggtggcttaggatctgcttccaacaagtctgccaaatgtgctctgtaacacagggggaccctccaaatgtgcattgctttctgtcagtctcaggaaacccattcccttcccagcctatctcagaaacggagagtggtggctcagtggcctctggctctggcacagccccttgatgggtccacagtggcccctctgcccttggctctgttggcttcccaacagatgttcctcttcacatgtagtcctaagaactcaatcagtttaaaaa

SEQ ID NO: 31444 - DNA, 409 bp, Homo sapiens
ggagcagtaaacagcaattgaagacagagcagtactcttgggctttgcccccagtgtggaattctagtgagctggaatcgactacgttgaagacattttttttaatgccaggaagccaaagtagctttgaacccaaagcaggacaaaggtcattttctctttctctaaagccctgatggggtttgaccactcttgtaaagtatcagtaccagagaaaaagtaaaaagagcaaatgagacagttcctgaatgagtattttccctaatgcatatgtagagcagtccaggtctccccatacaagtgcccttgatgtcctccagtggaagaaaaataggtcccagccatttgtgctcactctgaaaaacctgtcttccggctgggcgcggtggctcacgcctataatcccagc

SEQ ID NO: 31445 - DNA, 648 bp, Homo sapiens
gttcatgtcctttgcagggacatggatgaagctggaaaccattgttatcagcaaactaacacaggaacagaaaaccaaacaccacatattctcacttataagtgggaattgaacaatgagaacacatggacacagggaggggaacatcacacaacggggcctgttgaggggtagggggctagaggagggatagcattagcagaaatacctaatgtagatgacaggtcgatggatgcagcaaaccaccatggcacgtgtatacctatgtaacctgcacgttctgcacatgtatcccagaacttaaagtataattttaaaaaaagggaaaaaaagtaaaaaaaaaaaataaacaaatcagcaaactacacagaagaatattagaacaatttctctcaaatttctcttccattgagcttcctgcctgaccctagagctccctcacctctttggcttaccagctcccatccttcaaagtttctgagttattctgtggggaatttgagctactctcttcctttaggtccaggccatctcagctaggtccagagagcctcactcacctccccaactaagcaagcatccctggaggtatgttcttcatgcaagggcagttcctgagagaatttatttggttagctcataaaggga

SEQ ID NO: 31446 - DNA, 543 bp, Homo sapiens
attagaataaaaacaaactatgaaatcaaaatagaaattaactacatgtcaactaaagtgttttttaaagcatgtttttaaaccaaaagataatctttgccccattcttcattcattttattggaataatacactctgccaaagcatgtaagtgttagggttcatgtacacacacagatttatcattaaaacctggaaactgctctcctcccacataatttctatatttggtattgaatcaaagctgtagaagggacagagcttccacaatttgttctgtccacaccctatgggttagctgcaaagtatgttaattttaaaagagatggtgtgtctgaatttttaccttgaggaaaccagggacgttagaaatttgccaaaggtcacacagctcactgatagtggagtcccacccaaccagagttctgtctttgattcaaggctgtttttatgctactgcctttgcctgcttttataggcactaaaggaatataagctgggttgaaatgagtgaagacagttacaacagaagcaaaaaaaaaa

SEQ ID NO: 31447 - DNA, 345 bp, Homo sapiens
ttttgaatgatagcagatttctcatcaaaacccataaagactggaagtaaatggttacattttttgaaatgctgtaacaaaagtactataaattcaaaatcttaaatctagcaaaaatatccttcaagagttaaggtgaaatgcaaagcattctcagatgaaggaaatctaagaacatttgtcaccacaggcttactctaaaagaatgaataaaggcagttttagaaacagatagataggaaataataggagaatcactagaaccagggaggcaaaggttgcaatgagccgagatcgtcccattgcactctagcctgggcaacaagagcaaaactccatctcaaa

SEQ ID NO: 31448 - DNA, 463 bp, Homo sapiens
ggaggttgcagtgagccaaggttgtgccagtgtgctccagcgtgggcagcctgggcaacagagcgacactctgtcaaaaaagaaaaaatcaacttataaacacagaagagttgaaaaaatactacagtgaacacctatatgctattcaattggattcaccagttaccattttgttatatttgctttctctccctagcatatgtaagattgtatatgtgccctttttttaagtaagttgccaatctcatggcacttcacttttaagtacttttgcagatatcgtctaagaactaggacattctcctatgtaatcacagtaccattaatccacccaaaaaatttaacaatacgctaatgatacctaatgtatagtttgtaatcagctttcttgtagtaatctgttttgaaggcttgcatcctgtcatggtccactgattaaattttgaacttcaacctgaaactg

SEQ ID NO: 31449 - DNA, 528 bp, Homo sapiens
ggtggggggacgggagggggtcccttctccccctcttggcgacagtgaccatggcattgggctcagcagaccccctcccacatacaccaggccccgcaaatccctgtgaccagtttcactgccaccatcttggtgagcgtgtggtgtctgacctccagaaatgcacatcgacccccagccagcccggtgactttgtcacctgtgttcaagtgatggctccccttcccttcacacccacacccacctgacctggggacacctggggccagtgtgactctaggcctgctcccgccgcgccccagcatacatccacctgctttctgatcagtcccaccacctcggtacctacctccctgacaccttgtcatcctagatcagtacctctcgcttcacacacacctggcctgggaacactgaccatatctagtctcccggctttttccccaagatcctggtctctaaatcctctgggctggaggaaattagattttcaaaccctgtgaacaccacccctgacccatgatcctt

SEQ ID NO: 31450 - DNA, 1477 bp, Homo sapiens
  misc_feature (1)..(1): n is a, c, g, or t
  misc_feature (3)..(4): n is a, c, g, or t
nanncgcaggcggtgtttgtctgccggactgacgggcggccgggcggtgcgcggcggcggtggcggcggggaagatggcggcgtcctccctggaacagaagctgtcccgcctggaagcaaagctgaagcaggagaaccgggaggcccggcggaggatcgacctcaacctggatatcagcccccagcggcccaggcccaccctgcagctcccgctggccaacgatgggggcagccgctcgccatcctcagagagctccccgcagcaccccacgccccccgcccggccccgccacatgctggggctcccgtcaaccctgttcacaccccgcagcatggagagcattgagattgaccagaagctgcaggagatcatgaagcagacgggctacctgaccatcgggggccagcgctaccaggcagaaatcaacgacctggagaacttgggcgagatgggcagcggcacctgcggccaggtgtggaagatgcgcttccggaagaccggccacgtcattgccgttaagcaaatgcggcgctccgggaacaaggaggagaacaagcgcatcctcatggacctggatgtggtgctgaagagccacgactgcccctacatcgtgcagtgctttgggacgttcatcaccaacacggacgtcttcatcgccatggagctcatgggcacctgcgctgagaagctcaagaagcggatgcagggccccatccccgagcgcattctgggcaagatgacagtggcgattgtgaaggcgctgtactacctgaaggagaagcacggtgtcatccaccgcgacgtcaagccctccaacatcctgctggacgagcggggccagatcaagctctgcgacttcggcatcagcggccgcctggtggactccaaagccaagacgcggagcgccggctgtgccgcctacatggcacccgagcgcattgaccccccagaccccaccaagccggactatgacatccgggccgacgtatggagcctgggcatctcgttggtggagctggcaacaggacagtttccctacaagaactgcaagacggactttgaggtcctcaccaaagtcctacaggaagagcccccgcttctgcccggacacatgggcttctcgggggacttccagtccttcgtcaaagactgccttactaaagatcacaggaagagaccaaagtataataagctacttgaacacagcttcatcaagcgctacgagacgctggaggtggacgtggcgtcctggttcaaggatgtcatggcgaagactgagtcaccgcggactagcggcgtcctgagccagccccacctgcccttcttcaggtagctgcttggcggcggccagccccacagggggccaggggcatggccacaggcccccctccccacttggccacccagctgcctgccaggggagacctgggacctggacggccacctaggactgaggacagagagtggggggtgccc

SEQ ID NO: 31451 - DNA, 1536 bp, Homo sapiens
  misc_feature (1)..(1): n is a, c, g, or t
  misc_feature (3)..(4): n is a, c, g, or t
  misc_feature (1093)..(1093): n is a, c, g, or t
  misc_feature (1536)..(1536): n is a, c, g, or t
nanncgcaggcggtgtttgtctgccggactgacgggcggccgggcggtgcgcggcggcggtggcggcggggaagatggcggcgtcctccctggaacagaagctgtcccgcctggaagcaaagctgaagcaggagaaccgggaggcccggcggaggatcgacctcaacctggatatcagcccccagcggcccaggcccaggactgtctggcgcccccctcccccggcctgggggcttgtcagccccgtgcagcgacgatctacgcacacgcgcacgcctggctcggggacacctgagttattgtgatcactctaagccctgctcctgccccgtcccaacgagcaggtaccagcctttttatcatcgctgcttggacatctgcaccattgacctaaccgctgccccggccgcagaatggcgtcccccagcccccatgctctgtgtgtgtccccatgtcccttcccctcactctcactttctctctcactccactcaagcagcggtcagcccagcccagcctcctctgcgtcctccctcctcctccccctcccttactcccagctccactttggactccctggaggaggaggtgggctcccccactgaatgggagtctgtggcctccgggggtggggggggtgcacgcctgtgtgtgtgtaactgagagaacgagaaagttgggcctggtgggtgggtggcctgtgcctatggatctctctcaacaactaggtgaacacatagcaccccccgggttccataccagccctgggcgccagggacacagcagtgaatagaacagatggagcccctctcctctgtagcggggggctgcaataggggggcccactggacaaggagcacattcccaccagagagaacattctagctgggtgagcggccctgcagggggccagcctgggggaacctctggagacggtgggaattgaacaaagcctctggggaggccaggcacggtggctcacacctgtgatcccaacactcggggaggttgaggctacagggagccatgatcacaccactgcaccccagcctgggtgacagcgagatcctgtctcaaaaatttaaaaactggnccaggcgcagtggctcatgcctgtaatttcagtactttgggaggccaaggagggtggatcacttgaggtcaggagttcgagaccagcctggccaacatggtgaaaccctgtctgcattaaaaatactagagattaggccaggcacagtgactcacacctgtaattccagcactttgggagaccgaggcgggtggctcacctgaggtcgggagttcgagaccaccctgaccaacatagagaaaccccgtctccactaaaaatacaaaattagccgggcatggtggcacatacctgtaatcccagctactcgggaggctgtaatcctagctactcgggaggctgaggcaggagaaccgcttgaacccgggaggcggagattgcagtgagctgagatcgcaccattgcacttcagcctgggcaacaagagcaaaactccatctcan

SEQ ID NO: 31452 - DNA, 1129 bp, Homo sapiens
  misc_feature (1)..(1): n is a, c, g, or t
  misc_feature (3)..(4): n is a, c, g, or t
nanncgcaggcggtgtttgtctgccggactgacgggcggccgggcggtgcgcggcggcggtggcggcggggaagatggcggcgtcctccctggaacagaagctgtcccgcctggaagcaaagctgaagcaggagaaccgggaggcccggcggaggatcgacctcaacctggatatcagcccccagcggcccaggcccaccctgcagctcccgctggccaacgatgggggcagccgctcgccatcctcagagagctccccgcagcaccccacgccccccgcccggccccgccacatgctggggctcccgtcaaccctgttcacaccccgcagcatggagagcattgagattgaccagaagctgcaggagatcatgaagcagacgggctacctgaccatcgggggccagcgctaccaggcagaaatcaacgacctggagaacttgggcgagatgggcagcggcacctgcggccaggtgtggaagatgcgcttccggaagaccggccacgtcattgccgttaagcaaatgcggcgctccgggaacaaggaggagaacaagcgcatcctcatggacctggatgtggtgctgaagagccacgactgcccctacatcgtgcagtgctttgggacgttcatcaccaacacggacgtcttcatcgccatggagctcatgggcacctgcgctgagaagctcaagaagcggatgcagggccccatccccgagcgcattctgggcaagatgacagtggcgattgtgaaggcgctgtactacctgaaggagaagcacggtgtcatccaccgcgacgtcaagccctccaacatcctgctggacgagcggggccagatcaagctctgcgacttcggcatcagcggccgcctggtggactccaaagccaagacgcggagcgccggctgtgccgcctacatggcagtgagtgggggccccccagcgggggagggggtgggggctgggaggccggccccagccttggagatacgtctcctcctcccccccctgcagcccgagcgcattgaccccccagaccccaccaagccggactatgacatccgggccgacgtatggagcctgggcatctcgttggtgagttgggccctcccctgttctccagc

SEQ ID NO: 31453 - DNA, 1189 bp, Homo sapiens
cgaacatgctaccgctctgggcaacattgttcacacccctcagtacggagagcattgagattgaccagaagctgcaggagatcatgaagcagacgggctacctgaccatcgggggccagcgctaccaggcagaaatcaacgacctggagaacttgggcgagatgggcagcggcacctgcggccaggtgtggaagatgcgcttccggaagaccggccacgtcattgccgttaagcaaatgcggcgctccgggaacaaggaggagaacaagcgcatcctcatggacctggatgtggtgctgaagagccacgactgcccctacatcgtgcagtgctttgggacgttcatcaccaacacggacgtcttcatcgccatggagctcatgggcacctgcgctgagaagctcaagaagcggatgcagggccccatccccgagcgcattctgggcaagatgacagtggcgattgtgaaggcgctgtactacctgaaggagaagcacggtgtcatccaccgcgacgtcaagccctccaacatcctgctggacgagcggggccagatcaagctctgcgacttcggcatcagcggccgcctggtggactccaaagccaagacgcggagcgccggctgtgccgcctacatggcacccgagcgcattgaccccccagaccccaccaagccggactatgacatccgggccgacgtatggagcctgggcatctcgttggtggagctggcaacaggacagtttccctacaagaactgcaagacggactttgaggtcctcaccaaagtcctacaggaagagcccccgcttctgcccggacacatgggcttctcgggggacttccagtccttcgtcaaagactgccttactaaagatcacaggaagagaccaaagtataataagctacttgaacacagcttcatcaagcgctacgagacgctggaggtggacgtggcgtcctggttcaaggatgtcatggcgaagactgagtcaccgcggactagcggcgtcctgagccagccccacctgcccttcttcaggtagctgcttggcggcggccagccccacagggggccaggggcatggccacaggcccccctccccacttggccacccagctgcctgccaggggagacctgggacctggacggccacctaggactgaggacagagagtggggggtgccc

SEQ ID NO: 31454 - DNA, 1556 bp, Homo sapiens
  misc_feature (1)..(1): n is a, c, g, or t
  misc_feature (3)..(4): n is a, c, g, or t
nanncgcaggcggtgtttgtctgccggactgacgggcggccgggcggtgcgcggcggcggtggcggcggggaagatggcggcgtcctccctggaacagaagctgtcccgcctggaagcaaagctgaagcaggagaaccgggaggcccggcggaggatcgacctcaacctggatatcagcccccagcggcccaggcccaccctgcagctcccgctggccaacgatgggggcagccgctcgccatcctcagagagctccccgcagcaccccacgccccccgcccggccccgccacatgctggggctcccgtcaaccctgttcacaccccgcagcatggagagcattgagattgaccagaagctgcaggagatcatgaagcagacgggctacctgaccatcgggggccagcgctaccaggcagaaatcaacgacctggagaacttgggcgagatgggcagcggcacctgcggccaggtgtggaagatgcgcttccggaagaccggccacgtcattgccgttaaggtgagccttggcggctaccccggctgcgccccacaccccaggccggtgctgaggctccctcctgtccctgcctgtgcagcaaatgcggcgctccgggaacaaggaggagaacaagcgcatcctcatggacctggatgtggtgctgaagagccacgactgcccctacatcgtgcagtgctttgggacgttcatcaccaacacggacgtcttcatcgccatggagctcatgggcacctgcgctgagaagctcaagaagcggatgcagggccccatccccgagcgcattctgggcaagatgacagtggcgattgtgaaggcgctgtactacctgaaggagaagcacggtgtcatccaccgcgacgtcaagccctccaacatcctgctggacgagcggggccagatcaagctctgcgacttcggcatcagcggccgcctggtggactccaaagccaagacgcggagcgccggctgtgccgcctacatggcacccgagcgcattgaccccccagaccccaccaagccggactatgacatccgggccgacgtatggagcctgggcatctcgttggtggagctggcaacaggacagtttccctacaagaactgcaagacggactttgaggtcctcaccaaagtcctacaggaagagcccccgcttctgcccggacacatgggcttctcgggggacttccagtccttcgtcaaagactgccttactaaagatcacaggaagagaccaaagtataataagctacttgaacacagcttcatcaagcgctacgagacgctggaggtggacgtggcgtcctggttcaaggatgtcatggcgaagactgagtcaccgcggactagcggcgtcctgagccagccccacctgcccttcttcaggtagctgcttggcggcggccagccccacagggggccaggggcatggccacaggcccccctccccacttggccacccagctgcctgccaggggagacctgggacctggacggccacctaggactgaggacagagagtggggggtgccc

SEQ ID NO: 31455 - DNA, 405 bp, Homo sapiens
gcttgggagcccagttcccggacccaggcgaggcccccagctgatgacccgcccccatcgccgtgatcctctgggtcgggcttccccgactccacgcgacagtgaccacatccaggtcgccccgaaaacacagacacgtccctgttgacctgatgctaccactctcgtcatctcagggactgtctggcgcccccctcccccggcctgggggcttgtcagccccgtgcagcgacgatctacgcacacgcgcacgcctggctcggggacacctgaggttacttgaccacatagagcccctccccatctcttctgacccgaggattctccctctcgctctccctgtgaccgtgtctgaggtggggggacgggagggggtcccttctccccctcttggcgacagtgacc

SEQ ID NO: 31456 - DNA, 1606 bp, Homo sapiens
  misc_feature (1)..(1): n is a, c, g, or t
  misc_feature (3)..(4): n is a, c, g, or t
nanncgcaggcggtgtttgtctgccggactgacgggcggccgggcggtgcgcggcggcggtggcggcggggaagatggcggcgtcctccctggaacagaagctgtcccgcctggaagcaaagctgaagcaggagaaccgggaggcccggcggaggatcgacctcaacctggatatcagcccccagcggcccaggcccaccctgcagctcccgctggccaacgatgggggcagccgctcgccatcctcagagagctccccgcagcaccccacgccccccgcccggccccgccacatgctggggctcccgtcaaccctgttcacaccccgcagcatggagagcattgagattgaccagaagctgcaggagatcatgaagcagacgggctacctgaccatcgggggccaggtaccaccttcactgtggcggggagagggaggaggcccagccaggctggacccatcctgggagcgccagtggggggcagggggcggtggcagagccccagggaccctccaaccctccctctcctcccagcgctaccaggcagaaatcaacgacctggagaacttgggcgagatgggcagcggcacctgcggccaggtgtggaagatgcgcttccggaagaccggccacgtcattgccgttaagcaaatgcggcgctccgggaacaaggaggagaacaagcgcatcctcatggacctggatgtggtgctgaagagccacgactgcccctacatcgtgcagtgctttgggacgttcatcaccaacacggacgtcttcatcgccatggagctcatgggcacctgcgctgagaagctcaagaagcggatgcagggccccatccccgagcgcattctgggcaagatgacagtggcgattgtgaaggcgctgtactacctgaaggagaagcacggtgtcatccaccgcgacgtcaagccctccaacatcctgctggacgagcggggccagatcaagctctgcgacttcggcatcagcggccgcctggtggactccaaagccaagacgcggagcgccggctgtgccgcctacatggcacccgagcgcattgaccccccagaccccaccaagccggactatgacatccgggccgacgtatggagcctgggcatctcgttggtggagctggcaacaggacagtttccctacaagaactgcaagacggactttgaggtcctcaccaaagtcctacaggaagagcccccgcttctgcccggacacatgggcttctcgggggacttccagtccttcgtcaaagactgccttactaaagatcacaggaagagaccaaagtataataagctacttgaacacagcttcatcaagcgctacgagacgctggaggtggacgtggcgtcctggttcaaggatgtcatggcgaagactgagtcaccgcggactagcggcgtcctgagccagccccacctgcccttcttcaggtagctgcttggcggcggccagccccacagggggccaggggcatggccacaggcccccctccccacttggccacccagctgcctgccaggggagacctgggacctggacggccacctaggactgaggacagagagtggggggtgccc

SEQ ID NO: 31457 - DNA, 1286 bp, Homo sapiens
  misc_feature (1)..(1): n is a, c, g, or t
  misc_feature (3)..(4): n is a, c, g, or t
  misc_feature (970)..(970): n is a, c, g, or t
  misc_feature (972)..(972): n is a, c, g, or t
  misc_feature (974)..(975): n is a, c, g, or t
  misc_feature (978)..(978): n is a, c, g, or t
  misc_feature (1012)..(1012): n is a, c, g, or t
nanncgcaggcggtgtttgtctgccggactgacgggcggccgggcggtgcgcggcggcggtggcggcggggaagatggcggcgtcctccctggaacagaagctgtcccgcctggaagcaaagctgaagcaggagaaccgggaggcccggcggaggatcgacctcaacctggatatcagcccccagcggcccaggcccaccctgcagctcccgctggccaacgatgggggcagccgctcgccatcctcagagagctccccgcagcaccccacgccccccgcccggccccgccacatgctggggctcccgtcaaccctgttcacaccccgcagcatggagagcattgagattgaccagaagctgcaggagatcatgaagcagacgggctacctgaccatcgggggccagcgctaccaggcagaaatcaacgacctggagaacttgggcgagatgggcagcggcacctgcggccaggtgtggaagatgcgcttccggaagaccggccacgtcattgccgttaagcaaatgcggcgctccgggaacaaggaggagaacaagcgcatcctcatggacctggatgtggtgctgaagagccacgactgcccctacatcgtgcagtgctttgggacgttcatcaccaacacggacgtcttcatcgccatggagctcatgggcacctgcgctgagaagctcaagaagcggatgcagggccccatccccgagcgcattctgggcaagatgacagtggcgattgtgaaggcgctgtactacctgaaggagaagcacggtgtcatccaccgcgacgtcaagccctccaacatcctgctggacgagcggggccagatcaagctctgcgacttcggcatcagcggccgcctggtggactccaaagccaagacgcggagcgccggctgtgccgcctacatggcagtgagtgggggccccccagcgggggagggggtggggtcttntnannatntttattgtggttcaatactttttgggaaaacttnataattttaacaggacttttttttttttgccactagtttttttttactgctttagggcatgatccacatgacaaactatgattaatgccatccatcttcctggccctccttagtacttaaaatattcagacttttaattttttttttttttttttttaaagatggagtctcatgatatttcccaggctgaagtggctttttacaggtgcaatcttataacaccacatcctttgactcctgaacttaatcaattctcctgccttagcctttttaa

SEQ ID NO: 31458 - DNA, 1039 bp, Homo sapiens
  misc_feature (1)..(1): n is a, c, g, or t
  misc_feature (3)..(4): n is a, c, g, or t
nanncgcaggcggtgtttgtctgccggactgacgggcggccgggcggtgcgcggcggcggtggcggcggggaagatggcggcgtcctccctggaacagaagctgtcccgcctggaagcaaagctgaagcaggagaaccgggaggcccggcggaggatcgacctcaacctggatatcagcccccagcggcccaggcccaccctgcagctcccgctggccaacgatgggggcagccgctcgccatcctcagagagctccccgcagcaccccacgccccccgcccggccccgccacatgctggggctcccgtcaaccctgttcacaccccgcagcatggagagcattgagattgaccagaagctgcaggagatcatgaagcagacgggctacctgaccatcgggggccagcgctaccaggcagaaatcaacgacctggagaacttgggcgagatgggcagcggcacctgcggccaggtgtggaagatgcgcttccggaagaccggccacgtcattgccgttaagcaaatgcggcgctccgggaacaaggaggagaacaagcgcatcctcatggacctggatgtggtgctgaagagccacgactgcccctacatcgtgcagtgctttgggacgttcatcaccaacacggacgtcttcatcgccatggagctcatgggcacctgcgctgagaagctcaagaagcggatgcagggccccatccccgagcgcattctgggcaagatgacagtggcgattgtgaaggcgctgtactacctgaaggagaagcacggtgtcatccaccgcgacgtcaagccctccaacatcctgctggacgagcggggccagatcaagctctgcgacttcggcatcagcggccgcctggtggactccaaagccaagacgcggagcgccggctgtgccgcctacatggcacccgagcgcattgaccccccagaccccaccaagccggactatgacatccgggccgacgtatggagcctgggcatctcgttggtgagttgggccctcccctgttctccagc

SEQ ID NO: 31459 - DNA, 1679 bp, Homo sapiens
  misc_feature (1)..(1): n is a, c, g, or t
  misc_feature (3)..(4): n is a, c, g, or t
nanncgcaggcggtgtttgtctgccggactgacgggcggccgggcggtgcgcggcggcggtggcggcggggaagatggcggcgtcctccctggaacagaagctgtcccgcctggaagcaaagctgaagcaggagaaccgggaggcccggcggaggatcgacctcaacctggatatcagcccccagcggcccaggcccaccctgcagctcccgctggccaacgatgggggcagccgctcgccatcctcagagagctccccgcagcaccccacgccccccgcccggccccgccacatgctggggctcccgtcaaccctgttcacaccccgcagcatggagagcattgagattgaccagaagctgcaggagatcatgaagcagacgggctacctgaccatcgggggccagcgctaccaggcagaaatcaacgacctggagaacttgggcgagatgggcagcggcacctgcggccaggtgtggaagatgcgcttccggaagaccggccacgtcattgccgttaaggtgagccttggcggctaccccggctgcgccccacaccccaggccggtgctgaggctccctcctgtccctgcctgtgcagcaaatgcggcgctccgggaacaaggaggagaacaagcgcatcctcatggacctggatgtggtgctgaagagccacgactgcccctacatcgtgcagtgctttgggacgttcatcaccaacgtgagtacctggccgcgccctgcagcgtctcctcctccctcacccctgccccttcctagggagcagagcctctggggggtgggccggaagacacagctcccccgggtgcccctctccctgcagacggacgtcttcatcgccatggagctcatgggcacctgcgctgagaagctcaagaagcggatgcagggccccatccccgagcgcattctgggcaagatgacagtggcgattgtgaaggcgctgtactacctgaaggagaagcacggtgtcatccaccgcgacgtcaagccctccaacatcctgctggacgagcggggccagatcaagctctgcgacttcggcatcagcggccgcctggtggactccaaagccaagacgcggagcgccggctgtgccgcctacatggcacccgagcgcattgaccccccagaccccaccaagccggactatgacatccgggccgacgtatggagcctgggcatctcgttggtggagctggcaacaggacagtttccctacaagaactgcaagacggactttgaggtcctcaccaaagtcctacaggaagagcccccgcttctgcccggacacatgggcttctcgggggacttccagtccttcgtcaaagactgccttactaaagatcacaggaagagaccaaagtataataagctacttgaacacagcttcatcaagcgctacgagacgctggaggtggacgtggcgtcctggttcaaggatgtcatggcgaagactgagtcaccgcggactagcggcgtcctgagccagccccacctgcccttcttcaggtagctgcttggcggcggccagccccacagggggccaggggcatggccacaggcccccctccccacttggccacccagctgcctgccaggggagacctgggacctggacggccacctaggactgaggacagagagtggggggtgccc

SEQ ID NO: 31460 - DNA, 281 bp, Homo sapiens
ggttagagaagtgtttagcgatggcgatgatgatgacaatgatcacaatgatgactggcaccacattttccacatagaaatgtgtagacactttgctaagagctttaccctcatcgcttccccaaaccctcaccacagccccctgcgacaggcacgatcatcgcgtgcattttatagacaaggaaattgaacctcggagaggccagatcacatgcccatcggtacctaccagacttcagaacttgcagccggatccaagctctctgtggccaggccacagg

SEQ ID NO: 31461 - DNA, 751 bp, Homo sapiens
ttctgaagaaagagtttcactctgtcgcccggcccgcagtgcagcgatgccatcacagctcactgcagcctccagctcctgggctcaggcgatcctcctgcctcggcctcccgaaatgctgagaccacaggcatgagtcactgcacccggcctctttttcttttatgagatataattcgcagaccataaaattccgccttaatgggaggctcatctgggcccgggacattgaggctgcaatgagctatgatggcacccctgcactccagcctgggccacagaccaagaccctgtctcaaaaacaagaaagaggagagaagccccatccccatcagctgtcacttcctgtcccctccccagtcagcgtcactccctatcccctccccagctctggcacccacgcatcccctcctgtctctctggattggcctgtcctggacatttcatagaaatgagatcacacggccgggtgcggtggctcacacctgtaatcccggcactttgggaggccgaggcgggtggatcacctgaggtcaggagttcgagaccagcctggccaacatggagaacccccgtctctgctaaaaatacaaaaattagctggacgtggtggcggacgcctgtaatcccagatactttggaggctgaagcaggagaatcacttgaacccaggaggcggaggttgcagtgagccgagatcgcgccactgctctccagcctgtgcgacaagagtgaaactctgtctcaaaaa

SEQ ID NO: 31462 - DNA, 480 bp, Homo sapiens
gaggcagcgcttgcagtaagccgagattgcgccactgcactccggcctggacaagagagcgagactccatctcaaaaaaaaaaggaaggggacagaaaactggaatagaaaattattaaggttcattcctgctctaaaatcacaaatcatcatattttctaaagcatttaaaaatggtatgcataaataattagaggcttaggttctaaactaattataattaaagttcattgaaggcagaggtagagtgtcattataaaagttttatgaattgtcttaatactgagtgaacactcaaattctaatggaatgaattttgcctgaattacacttttaaagcaaagtttccatgtgaattattatggagccatcattgattacctatttgattttgcaagtttattcatttgtagaacgggaataaaatacaccttacaaagttgtaagaataaatgaaataaagttctgaaatataagaat

SEQ ID NO: 31463 - DNA, 348 bp, Homo sapiens
tgaatcatagatggagaaacccgggctgaaaacagttaagtcccttcctcaagggcacgtagcaagtatgtgcaagtacgtggcagagctgggctataaacccaagttatcagttcccttttggaagtttttattttatcttcaagctcttttggtgcttgattttacttaatatttttcttggtgaagtcagtgttatttaatttggatagccaagtagtcaaaatatattctgttattgtcatcaagaaatgtctcagtcccctcttgggcatggtgctatattgttatgtatcataagagtgaaaaacagaaacagaagcagcaagcatatgggtttttaactaa

SEQ ID NO: 31464 - DNA, 309 bp, Homo sapiens
aaaaagaacaattattatgtatcaggtgctggattgagagttagggatacattagttaaagagctccaaagtaggagatagtgtatactatataaatatttatggaatttaatgactttattaatctagcaatagtatatattttttaatgttctttttgtttttctttgttgttgttgtttttgagacagagtctccctctgtcacctatgctgaagtgcagtgacgtgatctcagctcaccgcaacctctgcctctgggtttaaacaattctcgtgcctcagtctcctgagtagctgggactgcaga

SEQ ID NO: 31465 - DNA, 96 bp, Homo sapiens
ttttatttttaatgtctactgtagggaataataaatctacaaaaggagtatctgttctctctccttccaacaatactcttgcaattttgtttcatt

SEQ ID NO: 31466 - DNA, 258 bp, Homo sapiens
tgtgttttcattctaatacattggtagtaaatgcttggagaagaattaatattgttaccattaataacatagcttctaactttaacaaagtaggggtaaatcaacataaatttccttaactttcttttattattaaaataaaattaagtctcttaagcttcgtttaaagttaggtaaatgtcctgttgttgtagaacttctgaagattatagtagactagtgaagtcccatcatatacacatttaatgtatgtcctca

SEQ ID NO: 31467 - DNA, 586 bp, Homo sapiens
aattttcttccctactccccaactggcaaacaaatctttcttttttctctactcctttatttccataaaaatctcagctctctctccgtggaaaaatatgtcatgattattccttttgtctaacagtgtttattatattttaatctgtactcatttaaaagctacacagtagtcctacatcatttcatgcaaataaatgtttaatccttaacaggaatgtcagctccttgaggacagagccctgatttccattttgtcttccttaaaaaatctgttatgttgtgtgtctattgcggtagagaatccaaagagggtagccatggtctagaaaaatgtctgagtttaattagtgtttgactaaatagtggtcatccatcttcggtttgaatcatttcctttaatttatgtgaagagaagaaatcattcctgtgttaataaccattgaactcctaattttttaaagttgtgctttattgcattaagccactttgcatcaggaaaatgggtgtctttaatcgaatgtgattagaaatgctgctggcaatcagcagattttacttcctggttaatatcataggaggaggag

SEQ ID NO: 31468 - DNA, 456 bp, Homo sapiens
gtgtcagaattttctttccttttttaaggctgaataatattccactgtatggatatattacatcgtgtttatcccttcatctggtgatggacacttgagttgcttccactcactcccagatgttttttcccctctctgatcctcaaggaatagaaaatgcccagccttcatttttacattttacaggtagtggagctttaaaaaagagagtactttgggaggcacagataggagcatcacttgagcccaagagtttgagaccagcctgagcaacatagtaagacccagtctctacaaaaatcagctgggtgtggtggtgcgcacctgtagtctgagctactcaggaggctgaggtgggaggattgcttgagcccaggaggctcaggctgcagtgagctatgatcgtgccactgcactctagcctaggtgataggtgagaccctgtcttaaaaaaat

SEQ ID NO: 31469 - DNA, 1495 bp, Homo sapiens
ttggaacttcttggtattgcagaatatactcttttgaaactgacacactgtactaagtttttagactcctagaccaaaatttgctccccagggaacatttgtcaatgtctggagacattttcggttctcacacctggggagggtgtgatactggcatctagtgggtagaggccagagatgctgctacatattcgataatacaaaggaaagctgccacaacaaagaatgatctggcccaaattgtcacctgtgctgaggttgagacatcctgttttaaatgattcaaggtttttcaccttagtgtaatcttgcaatcccgtggtcatgctgctgatgtcttcagtttgtgtgacccagtaagctcaagaaagtgcctatggcagttgacatccgtggacttaatacacatttactaaattttgtaataagccatgctattgatagaagataatataaacttgtattcagtagtttggaggtacgtgtttgtggactgactgaagcatttttcagggaatgtatatgggtattggagacaattgtcatttagctattgtaataatgttataaaggatttcctgtcctcttcaagtagctctgggaaaatgtgtctgtacacataccatgcttatgaactaaaaatacttttaactagattgaaaaggttaaagaaatgtacatacacatatatacatacatatgcacacacaagaatgtgatccactgctggtgcagcatgtaaatacgaacacattcctgatggttgctatatatggatgagtagttgtagtaagttcacttcacctcaactaaaaaataaaagtgatgtttcatagaacttagtcttccacttgatctggaccctcatcttgaaacctcatatgataaaatggagaacttcttttaaacataagaaggtagtaatcacctgtggtcccagttacggggctggggcgagagaatctcttgagtccaggagttcgaggctgcaatgacctatgattgtgcctgggcaatagagtgaaaccccatctctttaaagaaaaaaaagaaaaagtgtgatagtcttggtttgtatttcctcatcattaaatatttgatttaatggtaagaaagttattgtgagcactttcacaggtcctccctcaggctgtggggccaggatttggtagctggtgctgagagaaaacctttgttggcatccttgccctgggactgtgccagtggcagctgtcattcaatgggacaatttcttctgattaaaaaaaaaggttattgtggttaaaaaaagattagttttctcaagttcattagtttcatttagtgccgttcacaattgttcgttttctagtattctttcattaacagagcattctgttttctttctaagcaggctgtctgcataaccttctgtgaactatgtgctgatgtcttgtaggcaattatatttgacaagattattctgtatctgtgattgactccttgaggaatagat

SEQ ID NO: 31470 - DNA, 352 bp, Homo sapiens
gaagaaagaaagaaagagagaaagagagagagaaagaaagaagaaagaaagagaaagaaagaaacaaagaaacaaagaaggaaagaaagaaagaaagaaagaaagaaagaaagaaagaaagaaagaaagaaagaaagaaagaaagaaaaagagaaagaaagaaaaaaaaaggaaggaagaatactttcaatatgccggtttcttaattttactatctggtactactgaatcaaaaattggtggtggcaattagattttcaggtggggcaacaatattttatgccactaagtttctggaattaccactaatttagagtgaagaatacagctcaactcaggaatgtggaaagtc

SEQ ID NO: 31471 - DNA, 345 bp, Homo sapiens
ctccttgatcaatcaaagggcatgaattttaatatttaaaaaatgtctttgtgaattaagcttaaaaaatcctacccaaacaatagcactctccaaaagtgaatgattttgccaccatcaaatgatcttcaggattctcccctgtcttgtggtgaggtttagtttcctaagaccaaaatgagattaagccttgctgaactttatctgagttttaataatcatagaattattacaaactctgaaagagtttgagattataagagtatgctgttttcacaacataaaagccaggtggatggacgcagggtgtatccaaggctgcacagtttgggaagttcccccaga

SEQ ID NO: 31472 - DNA, 408 bp, Homo sapiens
tggaaggtgattgtaccaagtttctgttctctctgagcccagtgtcctcttacctctgctctcttctcttcctgcagatctgcttctcaccttctcaaaggttaaggtttcccacagcacttgagtttgcacagcatcacttcaagagtctgtcctagagtgactcgcttttctcaattccaaattccccagagaaggaccctgattaccctgtcttgggcagcgtccacacccagaaatgagattagagacattcagtactttgaaaactggagaataaatgaatcccaacatgacatgactgagtgaaggtgcagccagcagtgatggaggactctggagaaacttaggagtaaataagtcccttggtgtgctgagatccatcctaaagactgaattctgaagtca

SEQ ID NO: 31473 - DNA, 468 bp, Homo sapiens
tgacgttttaaccaaaatatgtttcttctttatttgtggataaaagtctggagggtttttctgttttgtttttctacgaatattatttggaggcataactaggacctggggaaacgcttggctcctcttcgagccccgagggtgcaggttgggcagggcgggctccggtgggccgcacacccatcacccgtactagcgtgaggttgtcgaagagaaaatctcacgtttcgcatcctcaaatttccggatctgaaaccctatgcaagcagcaaccgcgggagagcgaacagcggcgggatgagcattcacaaggctgagcattcacagggctgcggggaaggcgggagtaacagctagcagcataccgcggccccgccccgcagaggccctgccccgcccccgccagagtacagagtacgagctccgacttggtctcgtccgcggtcgtccccacccctcagcgcgctg

SEQ ID NO: 31474 - DNA, 468 bp, Homo sapiens
catacagtgaaatatcagtttgcaaaaaaatgaagtactaatacatgttacaacatggatgaacctcaataactggactcaaaagatcacaaaaaggacacaaagacagaaagaaggttagtggtttccaggaactcagagaagtggggaatggtaggtgactgctaatagatacagagtttcttttggggaaatattctggaattagtggtgatgattgtacaaccataacctctgagttgtgctctggaagggcgaattttacaatgtaaattctatctcaacagagtagtataaccagcccccatggaatcaccatacagcttcaaatattaattcagattggtactgtgtcatttatatccttatgtacttcccctccctttgtattcatttgaagcataaccgagacatcatatcatgtcatctgttaatatttcagtaaatactctaaaggataaggacttt

SEQ ID NO: 31475 - DNA, 590 bp, Homo sapiens
aggggtgtttagtactgattggattgatgatgaccaagaaggaggaaaggtggggtgacaggagtaaacccttttctttaccccttccttttgacctttgtcccattgccttcatgtaagggtcactgattcttcataataatttaaatggaataaaatcttatttaaacctttttttattaattcaaataaagccgtttttttatgcctttattttttccctgtctttacaaaaattaaaaaattagctgggtgtgatggtgcccaactgtagtcgtagctacttgggaggattagttgagctcaggaggtcaaggctgcagtgagccatgtttgtgtcactgtactacagcctgggtaacagaataaaagcctgtctcaaaaaaaaaaaaaaaaaaaaagtatggatagaagaaagtagatcagagaaagtctttttcaaaataatgtttatgttttctaattttaagcatattctcagttttttaataatatagaacagtggaaaaaatttaaatgccacgtacgtgcatatctaccacccagaaaccgcttctattaatagtttggtgattttctttaaaaaaaaa

SEQ ID NO: 31476 - DNA, 646 bp, Homo sapiens
  misc_feature (318)..(318): n is a, c, g, or t
tggcctcaagcagtcctcctgccttggtctcccaaagctctgggattacaggcatgagcaagtacactcggcctaatttcacctctcttgatgaacatttagatgatttccaatatttgctgcaatgaaacaatttgtttatgtgtttctctacccataagtgtaagtcatctacacatctcactcctttctaaggttcttatatagtgtatacgttgagtatatttgaggaaatatttattaagtttgtaccatgggacaatattcgatagttcatcatattgatgccagcgttttacttcaacctagtggcttatncctaggattgtttccttgcctagaaacaaggtcaggtaattaaaaattcttttttgtcccttttgttggtggagaatggggtcttgctatgttgcccaggcaggtcttggactcctgggcttaagctatcctcctgcctctaccttgttaagtgctgggattataggactgagccgccatggccagacttgttttttcttgttttgagacacagtcctactctgttgcccaagctggagtgcagtagtgtgacctcagctcactgcagactctgcctcccaggctctgcctcccacctcagcctcccaagtagtgtgcatgccaccac

SEQ ID NO: 31477 - DNA, 117 bp, Homo sapiens
aggaatgagttagaactggatctgaagtcctcaggtaataggcatggctatgactgggtgactttaagcattgttgcttctcaacttgctttgtatcctcagcagtcaaaccaggtg

SEQ ID NO: 31478 - DNA, 1301 bp, Homo sapiens
ggaggaggcaggaagagaaaaactaaaataagatcagtagcgccatctagtgagaaatcctagcactatcaaatccaagtaatcctctaccctgcccagatactttaattaaactatttctaaactttataaagctgaactgtcagcaacagaatgtcgaatttgagtcatcttccattttatacaccaacattttttctcaatgccagtctatctccagtgaagacaaagctaaagtgttgaatgaatacatcaagaaatatcatacattttgtgaggagttaatgggcctgaatctattttctttattctgtacaacctcccatcatcagccaaaatctgcaaatagctcgatttttgaagagaagatgaggataagtaggaggttgtaatatccacttaaagtaactgttcagcatgaatttaacacagcaattgagtagttttgagtcccccaggaagatttcttgtcatgatgaaaacagtctttcacctagctatcagatccttcttccattatgattgttggaaaaccagcttatgtaaggatctaccctttgttcaatgcctactaaatactagtattttattaggtaatgtatacatattttatttgtcaggcctctgagcccaagctaagccatcatatctcctgtgacctgcacgtatacatccagatggcctgaagtaactgaggaatcacaaaagaagtgaaaatgccctgttcctgccttaactgatgacattaccttgtgaaattccttctcctggctcatcctggctcaaaagctcccccactgagcaccttgtgactcccacccctgccagccagagaacaaccccctttgactgtaattttccattacccaaatcctataaaacagctccaccccatctcccttcattgactctctttttgaactcagcctgcctgtacccaggtgataaaaagctttattgctcacacaaagactgtttggtggtctcttcacaaggacgcaagtgaaattattatttaagccttccaacatatctaatatctgaacctcaactcttcatcttactagctaaatgacatcaggggaacaacttattaacctctctaagtctgtttattcacctgtgggtaataccattaacatctccttaatagatttgtggtaataattgaatgaggtcttcagtgtagagagctaaacactatgcccatttaaaaagtgattgctgctgctctatcttcccagcccagggggttcttggacattctccccgtgatgagtgcccctcttctgaagtggggg

SEQ ID NO: 31479 - DNA, 736 bp, Homo sapiens
  misc_feature (28)..(28): n is a, c, g, or t
  misc_feature (32)..(32): n is a, c, g, or t
  misc_feature (34)..(34): n is a, c, g, or t
  misc_feature (37)..(37): n is a, c, g, or t
ccttggccagctcacgcaatgtaacggnctgnanaanacaggggaacaggaagcagcctctgagcccaagctaagccatcatatctcctgtgacctgcacgtatacatccagatggcctgaagtaactgaggaatcacaaaagaagtgaaaatgccctgttcctgccttaactgatgacattaccttgtgaaattccttctcctggctcatcctggctcaaaagctcccccactgagcaccttgtgactcccacccctgccagccagagaacaaccccctttgactgtaattttccattacccaaatcctataaaacagctccaccccatctcccttcattgactctctttttgaactcagcctgcctgtacccaggtgataaaaagctttattgctcacacaaagactgtttggtggtctcttcacaaggacgcaagtgaaattattatttaagccttccaacatatctaatatctgaacctcaactcttcatcttactagctaaatgacatcaggggaacaacttattaacctctctaagtctgtttattcacctgtgggtaataccattaacatctccttaatagatttgtggtaataattgaatgaggtcttcagtgtagagagctaaacactatgcccatttaaaaagtgattgctgctgctctatcttcccagcccagggggttcttggacattctccccgtgatgagtgcccctcttctgaagtggggg

SEQ ID NO: 31480 - DNA, 444 bp, Homo sapiens
gaaaaataattaaatgcttaccctgcttttcctagataaactgaaacttcaggtaaccaaaaagttgataaagggaaaattcttgtttttgaaagcatttcagctactaagtcaagaagaaatgataatatttgcctatccccatattataacccttattgaaatgatagctcatagatgactgtcagtggttgacttcacagtaagagagacagccggactttgtgctttctgatcaaaatacataacaccatctaggaagtaaaatatttcctttttttttttttttttcttttgagacagagtctggctctgtcgcctagactggagtacaatggtgtgatctctgctcactgcaacccctgcctcaagaattcaagcaattcttctgcctcagcctcccgagtagctgagattagaggcatgtaccactacacctggcta

SEQ ID NO: 31481 - DNA, 261 bp, Homo sapiens
tatgagtaaaaagcaactgactaaaaaaagcgatgaagcacatttgcaaacaaacaaattgattctctataagtgaaaaatatatttaaaatgcaatgcatagttatagcaacagaaagagaattagtaaatttttagtgatctatataattagcaagaatacagcaaagtatcaaagacatggaaaatatggtagagagatcaagaggcacgaaggatagaatgagaagaggtgagagcaaataggtacaggagattatc

SEQ ID NO: 31482 - DNA, 345 bp, Homo sapiens
aattaataggagcagatccagaaatgacaaagataatagaattagtggacagagacattaaaacagttattttgaccgttattttatgcaatcaagaaaacatgttagagacatgaaaggtgtaaacagatccaaatcaaactttcagaagtaaaactacaatgtctgacatgaaaaatgcactggatgggattaacagcagaagtcattgctgaaaatttccacatttgatgaaaaatacacacatccaagaagctcaacaaacccggagcacaagaaatatgaagaaaattataagatacattataatgaaatcacttaaaatcagtggtaaagaaaaaaatc

SEQ ID NO: 31483 - DNA, 528 bp, Homo sapiens
cgtgggagaacaactaaactctttatcagctggctgttgcctgttgttgagggcagacgtgaggttgacctccctaaagtgaaccagtgaatttgttaagttcattatgtcatttccccctcagatagtgccaccaaagtgacaagataataaaaaaaaaacctgaacaagtccataaagtcacaaatgggaacaagctgtggaaagcttgttcccaccttccttctgaccagcatctgtggccctcccctgctctctccagtaatccagcagaagcctcttaacgccagctctcaaatatgccaagactgccaactaaccatagggctggaaatgaaggaggtctaaatgatatgacttctattagggtcaatcatcatacccttaattctttgagaaagtttaagggaatagcatggcataaataatattttaaattcctaaagagaaattatattttataaaagaatgaagaaatgggtgcagttcagcatgcacacagcactcacatagcgcacacgcaagccc

SEQ ID NO: 31484 - DNA, 382 bp, Homo sapiens
taagcttcgtcagagtcaagattctgttttgttccttgccctatctctggtgttgagaactatgccaggcacatagtagatgcgtagtaaatatttgttgaataaataaaaagcagtgcatgcttttaaattatataagcttggcctcatccctgtgtggaccctgaataagccacttcattgctctgaagctgtaaaatagaaatcgaaatccctgcctcttcagttaaggcttaaggtatcccaaagccaagggtcagggggagaaggatgaaaagttaatattgtagtgtacaaatcatacagtcagtccttgaatacttagtttagctttagaatctgcagtttgttacaactgtgtctgcaaggagaaacttgcaga

SEQ ID NO: 31485 - DNA, 1243 bp, Homo sapiens
atttcatgttatacttaataaaacaaaacatacctgtatacacacacattcactcacattgaagatgcaagatgaagaaagatacatgacattgaatgtacagtcaaagaaaaggagttctgcccaaacatctcaacttacatttaaagattattcagtgacgttgcactggtataaaatcttactgggaatatctggaaccgtgaatggtattctcactttgactttgatctccttgatcctgttggtttctcagggagtattgctaaaatgccaaaaaggaagttgttcaaatgccactcagtatgaggacactggagatctaaaagtgaataatggcacaagaagaaatataagtaataaggacctttgtgcttcgagatctgcagaccagacagtactatgccaatcagaatggctcaaataccaagggaagtgttattggttctctaatgagatgaaaagctggagtgacagttatgtgtattgtttggaaagaaaatctcatctactaatcatacatgaccaacttgaaatggcttttatacagaaaaacctaagacaattaaactacgtatggattgggcttaactttacctccttgaaaatgacatggacttgggtggatggttctccaatagattcaaagatattcttcataaagggaccagctaaagaaaacagctgtgctgccattaaggaaagcaaaattttctctgaaacctgcagcagtgttttcaaatggatttgtcagtattagagtttgacaaaattcacagtgaaataatcaatgatcactatttttggcctattagtttctaatattaatctccaggtgtaagattttaaagtgcaattaaatgccaaaatctcttctcccttctccctccatcatcgacactggtctagcctcagagtaacccctgttaacaaactaaaatgtacacttcaaaatttttacgtgatagtataaaccaatgtgacttcatgtgatcatatccaggatttttattcgtcgcttattttatgccaaatgtgatcaaattatgcctgtttttctgtatcttgcgttttaaattcttaataaggtcctaaacaaaatttcttatatttctaatggttgaattataatgtgggtttatacattttttacccttttgtcaaagagaattaactttgtttccaggcttttgctactcttcactcagctacaataaacatcctgaatgttttcttaaaaaaa

SEQ ID NO: 31486 - DNA, 1093 bp, Homo sapiens
atttcatgttatacttaataaaacaaaacatacctgtatacacacacattcactcacattgaagatgcaagatgaagaaagatacatgacattgaatgtacagtcaaagaaaaggagttctgcccaaacatctcaacttacatttaaagattattcagtgacgttgcactggtataaaatcttactgggaatatctggaaccgtgaatggtattctcactttgactttgatctccttgatcctgttggtactatgccaatcagaatggctcaaataccaagggaagtgttattggttctctaatgagatgaaaagctggagtgacagttatgtgtattgtttggaaagaaaatctcatctactaatcatacatgaccaacttgaaatggcttttatacagaaaaacctaagacaattaaactacgtatggattgggcttaactttacctccttgaaaatgacatggacttgggtggatggttctccaatagattcaaagatattcttcataaagggaccagctaaagaaaacagctgtgctgccattaaggaaagcaaaattttctctgaaacctgcagcagtgttttcaaatggatttgtcagtattagagtttgacaaaattcacagtgaaataatcaatgatcactatttttggcctattagtttctaatattaatctccaggtgtaagattttaaagtgcaattaaatgccaaaatctcttctcccttctccctccatcatcgacactggtctagcctcagagtaacccctgttaacaaactaaaatgtacacttcaaaatttttacgtgatagtataaaccaatgtgacttcatgtgatcatatccaggatttttattcgtcgcttattttatgccaaatgtgatcaaattatgcctgtttttctgtatcttgcgttttaaattcttaataaggtcctaaacaaaatttcttatatttctaatggttgaattataatgtgggtttatacattttttacccttttgtcaaagagaattaactttgtttccaggcttttgctactcttcactcagctacaataaacatcctgaatgttttcttaaaaaaa

SEQ ID NO: 31487 - DNA, 840 bp, Homo sapiens
atttcatgttatacttaataaaacaaaacatacctgtatacacacacattcactcacattgaagatgcaagatgaagaaagatacatgacattgaatgtacagtcaaagaaaaggagttctgcccaaacatctcaacttacatttaaagattattcagtgacgttgcactggtataaaatcttactgggaatatctggaaccgtgaatggtattctcactttgactttgatctccttgatcctgttggattcttcataaagggaccagctaaagaaaacagctgtgctgccattaaggaaagcaaaattttctctgaaacctgcagcagtgttttcaaatggatttgtcagtattagagtttgacaaaattcacagtgaaataatcaatgatcactatttttggcctattagtttctaatattaatctccaggtgtaagattttaaagtgcaattaaatgccaaaatctcttctcccttctccctccatcatcgacactggtctagcctcagagtaacccctgttaacaaactaaaatgtacacttcaaaatttttacgtgatagtataaaccaatgtgacttcatgtgatcatatccaggatttttattcgtcgcttattttatgccaaatgtgatcaaattatgcctgtttttctgtatcttgcgttttaaattcttaataaggtcctaaacaaaatttcttatatttctaatggttgaattataatgtgggtttatacattttttacccttttgtcaaagagaattaactttgtttccaggcttttgctactcttcactcagctacaataaacatcctgaatgttttcttaaaaaaa

SEQ ID NO: 31488 - DNA, 1262 bp, Homo sapiens
atttcatgttatacttaataaaacaaaacatacctgtatacacacacattcactcacattgaagatgcaagatgaagaaagatacatgacattgaatgtacagtcaaagaaaaggagttctgcccaaacatctcaacttacatttaaagattattcagtgacgttgcactggtataaaatcttactgggaatatctggaaccgtgaatggtattctcactttgactttgatctccttgatcctgttggtttctcagggagtattgctaaaatgccaaaaaggaagttgttcaaatgccactcagtatgaggacactggagatctaaaagtgaataatggcacaagaagaaatataagtaataaggacctttgtgcttcgagatctgcagaccagacagtactatgccaatcagaatggctcaaataccaagggaagtgttattggttctctaatgagatgaaaagctggagtgacagttatgtgtattgtttggaaagaaaatctcatctactaatcatacatgaccaacttgaaatgtccctcgtccacattttaggcttttatacagaaaaacctaagacaattaaactacgtatggattgggcttaactttacctccttgaaaatgacatggacttgggtggatggttctccaatagattcaaagatattcttcataaagggaccagctaaagaaaacagctgtgctgccattaaggaaagcaaaattttctctgaaacctgcagcagtgttttcaaatggatttgtcagtattagagtttgacaaaattcacagtgaaataatcaatgatcactatttttggcctattagtttctaatattaatctccaggtgtaagattttaaagtgcaattaaatgccaaaatctcttctcccttctccctccatcatcgacactggtctagcctcagagtaacccctgttaacaaactaaaatgtacacttcaaaatttttacgtgatagtataaaccaatgtgacttcatgtgatcatatccaggatttttattcgtcgcttattttatgccaaatgtgatcaaattatgcctgtttttctgtatcttgcgttttaaattcttaataaggtcctaaacaaaatttcttatatttctaatggttgaattataatgtgggtttatacattttttacccttttgtcaaagagaattaactttgtttccaggcttttgctactcttcactcagctacaataaacatcctgaatgttttcttaaaaaaa

SEQ ID NO: 31489 - DNA, 366 bp, Homo sapiens
atcccattatgtctaggttttgcttcatctcattaaattaattgtcttaattcccaaggaccattatttgtgttttggccatcttttgtgtctggacaatttgctataagtgattttattgtagctcaactcttatttatacaacatgtaagtattgttcttatggccaattttcagagatgcatatgtaatttaatttcattttgttttctacatttctctgtagtactatgccaatcagaatggctcaaataccaagggaagtgttattggttctctaatgagatgaaaagctggagtgacagttatgtgtattgtttggaaagaaaatctcatctactaatcatacatgaccaacttgaaatg

SEQ ID NO: 31490 - DNA, 452 bp, Homo sapiens
acagtgaaataatcaatgatcactatttttggcctattagtttctaatattaatctccaggtgtaagattttaaagtgcaattaaatgccaaaatctcttctcccttctccctccatcatcgacactggtctagcctcagagtaacccctgttaacaaactaaaatgtacacttcaaaatttttacgtgatagtataaaccaatgtgacttcatgtgatcatatccaggatttttattcgtcgcttattttatgccaaatgtgatcaaattatgcctgtttttctgtatcttgcgttttaaattcttaataaggtcctaaacaaaatttcttatatttctaatggttgaattataatgtgggtttatacattttttacccttttgtcaaagagaattaactttgtttccaggcttttgctactcttcactcagctacaataaacatcctgaa

SEQ ID NO: 31491 - DNA, 953 bp, Homo sapiens
atttcatgttatacttaataaaacaaaacatacctgtatacacacacattcactcacattgaagatgcaagatgaagaaagatacatgacattgaatgtacagtcaaagaaaaggagttctgcccaaacatctcaacttacatttaaagattattcagtgacgttgcactggtataaaatcttactgggaatatctggaaccgtgaatggtattctcactttgactttgatctccttgatcctgttgggcttttatacagaaaaacctaagacaattaaactacgtatggattgggcttaactttacctccttgaaaatgacatggacttgggtggatggttctccaatagattcaaagatattcttcataaagggaccagctaaagaaaacagctgtgctgccattaaggaaagcaaaattttctctgaaacctgcagcagtgttttcaaatggatttgtcagtattagagtttgacaaaattcacagtgaaataatcaatgatcactatttttggcctattagtttctaatattaatctccaggtgtaagattttaaagtgcaattaaatgccaaaatctcttctcccttctccctccatcatcgacactggtctagcctcagagtaacccctgttaacaaactaaaatgtacacttcaaaatttttacgtgatagtataaaccaatgtgacttcatgtgatcatatccaggatttttattcgtcgcttattttatgccaaatgtgatcaaattatgcctgtttttctgtatcttgcgttttaaattcttaataaggtcctaaacaaaatttcttatatttctaatggttgaattataatgtgggtttatacattttttacccttttgtcaaagagaattaactttgtttccaggcttttgctactcttcactcagctacaataaacatcctgaatgttttcttaaaaaaa

SEQ ID NO: 31492 - DNA, 413 bp, Homo sapiens
tagtatcatccattacgcatttcaccaattgtgccaaaaatgcccatttacagttagtttgttcaaatcaaaatccaaacaaggtccacacatcacttttggttactatgtctgtacatattatggtttgattatttggttattatatctataacagtcccctcttcttttttctggacatttatttatcagaaaaacactttattttatgttttataaccaggttgtcacaccattttccaattctaaagcaatatcataactatcataactcattcaacatttatttaactactgtataatgaacaattactatgtacaggacagtgtactactaggtgctgagtgtgattcaaagatgtctgtaaatcatggtccctacccccaagactttaccatctgaggaaaaggaa

SEQ ID NO: 31493 - DNA, 1317 bp, Homo sapiens
ttttttgtgagaatcgattgaaatagtatatgaagtggtttgaaaataggtacaaactattgacatttcaatgtcagagagtgatacctgtagtagtataggcaaaggtccaaccccatcgaaaggcttaaacatttaccttttctgaaaaactattgaaatataaagagagtccccagtcacaggggcaacttctgtaaccaaatccagatctgaggaaactcctgtaaccccatttggggtttctttctaagccaatagggttacaggttggtacagtgacacattgagaatggggctacaaatacttttcccaccatctaggatgaaatacacgaaatcctgttgaaatcttggtttttatgcctttgctcatcagaataaacgtaaatgctgaaaaacaaataacctcctgatccactgtcttgcctcctggtgagaaatgattctatcccctgtttattgggaaatttccaaagttgttcatcacttaaatgccgtattcaaagggaacatggaaggatgaagcggagaaagtgccttcgagacattcacacatttctctggactcagtctgttaacatatcagggagcttgtcagatcacacctttttgccttggaaatcctacagatttcctgtacgccttcatatctgattcttccctaaaacctttgggtatgatttcctccctggtcttgataatgtcctgcagtctgtgttttataattattctttgtatttattgaatctagactttaagttattcagagatcagaccagaaccttagagtttctaaactgtatgtggatattaaataatattaataatgaaagagctaccaaaatagtctatattgtgtgaacaatctcttgggatattagacgtgtttaaagaccagtgttgctgctatttttaatattttggttaatttaagtgaaatgtacatattttaatttgaagatttatcttgcccatcagaatgtgaagatatacttgcatatattttgacatatttcatggaaaataaaaatgataatccactttgtgagtgtaagtgaatgtattcatatgtatgttattataaatgatttttgtttgcactgatgatgaaatgagagttttgggggctttttatacatttatatcgactggtctctaaatctcctattttgttttcttatcatttttgaaatacagttcccattacatgagttttaaatagattggtgtttcattttgtattatgctactactagatgttgattctctggtattgtaaaataaaatgtgctccaaaaacccaaaaacttggac

SEQ ID NO: 31494 - DNA, 290 bp, Homo sapiens
ctactactactaaattaacggccgctcgacgtgaatgtattcatatgtatgttattataaatgatttttgtttgcactgatgatgaaatgagagttttgggggctttttatacatttatatcgactggtctctaaatctcctattttgttttcttatcatttttgaaatacagttcccattacatgagttttaaatagattggtgtttcattttgtattatgctactactagatgttgattctctggtattgtaaaataaaatgtgctccaaaaacccaaaaacttggac

SEQ ID NO: 31495 - DNA, 340 bp, Homo sapiens
tttatgtgtcatatagaattaatcataccttgcctatatattataatcaaattgtctgttaagcagataaatttagagaactgttatgctgcatggcatttaggtttacatgctgaggaagaaaaaaacttgaaatgattgtggctgggcacataacaatgaattttatggattaaaaaaaacagccaggtatggtggcacatctctgtagtcctcagctacttgggagaaggtgggaggattgcttgagccggagagtgaggctgcagttagctgcgatcatgccactgcactccagcctgggcaacaccctgacaccatcacaatgtatatgaaacat

SEQ ID NO: 31496 - DNA, 677 bp, Homo sapiens
aaaaaatgtatactacattataaaatgtgtcattttagaggaaaatgtagaaccttaaattcttattttatgaggacaacaaattaatttttaaaatgttttgaatttattggtagaagttagaaatatcaacagaaataaaaggaaataataaatacatgcatagtgattaagaatacagggaaagaaaagtcaagaaatatggccaaaagtttgttagttgttgtaggagccatacaataacaaaactctggagaaatggcttgataaaattaagagaagaaacaagtatgccatctcaggaatcaaaataggaaataattatacatcaggtgtcaagaattttttttgttttttggaaaggatctgttggtaattattttaggtttttgggctatatggtttgttgcaactaatcaattctattgttgtggcataaattgacagtatgtcaatgaatgagcatgacagtgttccagtaatactttatttataaatactgtctggcttatttgccacagtttattgagttttgttataaataatacaaatatcaagaaggtaaattagtatagtatgaaaacgtttaattcaataaatttggaaatatatgtaaaatgtgtacaattacttgaaacatgcatttttccaaaagtaacctaaagtgaaaagaaaaa

SEQ ID NO: 31497 - DNA, 337 bp, Homo sapiens
agaggaagtgaaggaagaggtgccagcagggagctgggctgctggctgtgcaggaggtgccaggaagcctgggatcacgctgtgggccccgtgggctgagggcctcccactcactgctgttttgttcagctccagggttactgatgggcttggcagagctgagaaggctggacctaactccctagctcaaagctggcagggacagagacccccaacttagcatggcttacccaggaacttattgtgggggacaaaacccacgtgatccaagttatgagtttttttgttgttaagccagggtcttgctctggagtgcagtggcgcaatctccacttac

SEQ ID NO: 31498 - DNA, 325 bp, Homo sapiens
tatgaggcagcaatgggttgattgtttgtgtctggaaggcagtggggatgtaggggaatcataagtattaataaaatgtgctggtcgggagcagtggctcccaaagtgtaattccagcactttgggaggccgagacgggcggatcgcttgagctcttgagttccagaccaccctgggcaacatggcgaaaccccgtctctacgaaaaaattagccgggtgtggtggagcacgcctgttatcccagctactcaggaggctgaggtgggagaatcacctgagcccgggaggtagaggttgcagtgagtggagatcgtgtcaccacac

SEQ ID NO: 31499 - DNA, 410 bp, Homo sapiens
acagttacttgagttatttgttattattatccctattttacaagtgaataactaattgagacacagattttttttaacttccccagtcacattattttaaatgattgatagacccatggctgctctaagtacccctcccttcatgttcacacgcatgcttgttgatctttggaacttctttactaataattacaattgaccactgaacaatgaggggcaagggggctggccccacacacaattaaatattcatatgtaacttttgactctccaaaaatttaacttctaatagcctattgttgactggaagccttactgataacataaacagttgatttacatatattttatatattatatgtattatatactgtattctcacaataaaaaaagctagagaaaagaaaatt

SEQ ID NO: 31500 - DNA, 467 bp, Homo sapiens
tactcaccagttgagcatcccaaatctgaaaatccaaaatgctctgatgagcatttcctttgagtgtcatgtcggtgctcaaaagtttccaattttggagcatttagattttggatttttgggctagggatcctcagcctgtagcagttcctgtgactataacatcaataaaatcacagtaccatgatctgtttctacactgaacacttctgacatcagatgtgtcagagttttccccacaccagcaaccagttctctgattctctggtcaccaactgggtctccagtgatcagttaaattctgacactaacaacctgaagttagcacagaccccacaagttaagggctcagtctcacaagactgccccaagatacccactgacctgctataaatcaagttcccaccacctcctcctcagggtcagtcatttgctagaatggcccacagaacttagaacactcttta

SEQ ID NO: 31501 - DNA, 487 bp, Homo sapiens
ctccaagagcccaactggggctccgcatgtgctgtggggcttggtttgggaaatcccaagctctgcaaaccttctgcccttaaggaaaccaccagaaggttttgatagctggggcatgaaaggaaggaagggtagcccttttttagttcagggcactggggacaaaagatcctgagaagccacggcctggccatgtcctgttctgcgagaaagcaagcctcaccagcacttgcagggagacggcccaggttgggtgaacaccgaaagccatgctgtccaccctgtcttcactgtcaataggagcaatgaatcgatgccagactcagtgacacaggagtctctccagacaagcgtggctatctaagggacaggtctgggggccatcctcgagacccaagggggtggcacttaggagctggccctgctgtcctctccaagacccaccagctccatgaagccacagcctccctccaccacccccattccg

SEQ ID NO: 31502 - DNA, 696 bp, Homo sapiens
gatatacctaatgttaaatgacgagttaacaggtgcagcacaccaacatggcactaacctgcacgtgtgcacatgtaccctaaaacttaaagtataattttaaaaaaaaagaaaaagttgttagattttaaaattattttaggatattttcttataagagaatgcacttatttttctttgagattgcagctattttcgtttgatctagaatcttctcattcttttgatttttaattttattgttagtagattataaagaatgggatattagagatttttctttaaaaatgaacctatatacattttatttatttattttcttaaagatagggtctcactctgttgtccagctggagtgtaatggcagtcatagctcattacagcttcaaattgctgggttccaggggatcctcctacctcagcctcctgagtagctgggattacaggtgcaagccaccacacccagctgattttcaattttttggtagagatggagtctcactatattgcccagactggtctcgaactcctggcctcaagtgatccccattggcttcccaacgtgctaggattacaagcatgagacaggcttcctttttttccttttttttttaaaagcagttatctgatatccatcaccttgtttacttgaccctgcttttaaaaaaataagtatataaaagtaaatacgaatta

SEQ ID NO: 31503 - DNA, 355 bp, Homo sapiens
  misc_feature (319)..(319): n is a, c, g, or t
  misc_feature (336)..(336): n is a, c, g, or t
  misc_feature (348)..(348): n is a, c, g, or t
gacttttcacatgtagaagaattacttctcattcttcctgttgaaattactctcaaatcttttctgacagagttgcaaacacactgacagctcccgaatgatctgatacaggatccttaataggcatggaagtgttcgccagacaaaaatatttgaggaacatgacaataatgacactgctaatggcttgtagtttcccgtgatactaatgaggacaggctagtttattaggtgttttgttctcttttttctatctcctccccatgcccttctggggcagaaggtgttactctttcacagtccttgcttcagggaaacngggttgaggggccaccnttggtcccggcntgtgtgg

SEQ ID NO: 31504 - DNA, 474 bp, Homo sapiens
ggaaccctgcaattaattgtcattgtctttcctggtgttgactggcagcactggggttgatcagatgcctagcacgcttcccctagctctatcaaaacctgcatatgaacagaaaatgcccttagcctgtgaatagtcagctaacagcttgtgaacttggggaccagtaacctccaggcttggtatttctcagcctgcccccaccctttttcctattgttaatttacttcttactctgagtaccacattgttcatataggaattgtctgtgaagtttacagaaactgtctactctaatgatgtcctctaataggtcagactctcttacttgggcccctttgttttatgttcatagttaatgtgccagcagcctggaggggctctggaataacagattccatcttagagatagccttaaagatgtgttttcattgatgagtgtttaatggagggtctgctggcgaatgacttggg

SEQ ID NO: 31505 - DNA, 796 bp, Homo sapiens
cttgttttatgtgaatatttattatcggcttctaaagttctgtaaataaaaagcttcaaaattttgttttgtaaagctttctgaagtagaggtatctagtctgatagatgatcttataaggtccattaaagcaggaaaaggacatttaattgagaacctactttcaccgcaccctattttccacctccaaaagagtttaaatcttttaaaatactcccataaataaaataccatttacattataaagtattgtgggaaaaacagtcttcacatgagtttacatttgttcataataaacccaccccaaattacctcccaattctgtaggttggtgatttaggctcagcttagccaagatgtttgggtgacctggagaaggttcagctgatcttgactagacttggtcatgccagctggtatgtgtcccttggctgtgattccttgtctctactccacatccttcatactccagcgagccagcacaggcttgtccacatggtggtggtaacggggcatcgagggtgcaagtggaagtgtacaaagacttttgaggccctggagtcaacagtgttatttctgctgcattccgttagtcaaagcgagactcaagggctgaagaaatggactctgcatctgactggaggggctacaaaagattgtggccatgtttttcattctaccacagtcattaatttatttgatattaaaggtttctagagatcagtatctttttaaaattgaataattgaccaaaccagtattttgacagttagtgtagataagacatatcttatat

SEQ ID NO: 31506 - DNA, 445 bp, Homo sapiens
gggtaggccactcaggtggcaccaggtgctacttatgacaaacatgaccagtaaacagcgggggtgagtctgtgccatgcacacacctgccacttctgtggaggggcgttactgggcaaaagcccattgtgtgtcatcagaaggggcttaacaacagcggccctggttacggcagccagagagcagggctcatggtcaggcagaccaccgttttctgtctgcaaggaagctctctggtacctcagtttcattgtctggaacatgaggattctgttagtgtccgtctaacagaacggtgtgaagacaaactgatacggcaggaccgtctccagtgctgcatccaacaggcttgttttcccacaaaggactctaagacctcacctaggtgtcgtcagtgacagcaaagacaatggcagctcacaccagtgaggggtccacaggcccc

SEQ ID NO: 31507 - DNA, 433 bp, Homo sapiens
gttgtgctaagattgacactgggacacggtccactgggtcacacacttattttccatcctcaagatttaagtataatggactagaacttgttttgatttctcgatatttaccaccctcagtttatccctattcctaattcctaaaattatattttccttggtattaaaaaaaagacatgccagccaggcatggtggctcacacctgtaatcccagcactttgggaggccgaggcaggcggatcatctgaggtcaggagttcgagaccagcctagccaacatggtgaaaccctgtctctactaaaaatacaaaaaaattagtcaggaatgttggcgcatggctgtaatcccagctactcaggaggctgaggcaggagaactgcttgaacccgggaggcagtggttgcagttagctgggatcatgccattgcact

SEQ ID NO: 31508 - DNA, 484 bp, Homo sapiens
aaaaaaagccccttatataaaaagaagtaatgtcaaagtttgatgagctttacattggaaactcaaaagcttgcactctcattttggctcagatgccaatttgctgggtgcccctgtggtgagtcatgaaacctccttgggccgcaatttcatcatctctaaaaacagaaattatcatacaacctacctcctgggaggtgctgcacaagaagcagctgatggaagtttcaaaatccaatttgtggccgagcgcggtggttcacgcctgtaatcccagcactttgggaggccgaggcaggtggatcacctgaggtcgggagtttgagaccagcctgacatacatggagaaaccccgtctttaccaaaaatacaaaaattagctggggcgtggtggcaggcgcctgtaattccagctacttgggaggctgaggcaggagactcacttgaacccgggaggcggaggtttcagtgagccgagatcgtg

SEQ ID NO: 31509 - DNA, 278 bp, Homo sapiens
ttttctcctggcctctagccaccttcctgatgcaaagccaccatcctctgccctaagtcacagatggcttcctcactgcttctcctgcccactctggccccaccagtccaactatgcataacaaccagtgcccttcaaaaatgcacaccttgaccaggcacggtggctcacgcctgtaatcccagcactttgggaggccaaggtgggcagatcacttgaggtcaggagttggagaccagcctggccaacttggtgaaaccccgtctctactaaaaata

SEQ ID NO: 31510 - DNA, 1905 bp, Homo sapiens
  misc_feature (881)..(881): n is a, c, g, or t
  misc_feature (910)..(911): n is a, c, g, or t
aagatggcggcgctgaaggaggataggagctacgggctgtcgtgcgggcgggttagcgacggcagcaaggtgtcggtgttccacgtgaagctcaccgacagtgccctgagggccttcgagagctaccgcgccagacaggtctgggcagcgtcttcctgaacagcctgaagcagaaggtggtgaccctggcaagcagcgcagacgtgctgagcaccgtgcagtcggcctcccaggccatgctgcagagcggctggtccatgctgttgcccaccgctgagaagcaggcccgggcactctgctctcctgtcctgcagagtttcaggcaatgaagtgagcataagtccaggtcatcgattggtgattgatcttctggtgggcagcctgatggctgatggagggttggagtcagccttacacgcagccattactgcagagatccaggatacaaaaaaagaagcacggaaggaaaaagaaatttatgaacaggaagcaaatgcctcaacatttcatagaaggaggactccattggataaagaccttattaatacggggatctgtgagtcttctggcaaacagtgtttgcctctggttcagctcatacaacagcttcttaggtaaatcatattagctgtattgtattgtgttttatttatttacttttttgttttttgagacagagtttcgctcttgttgcccaggcccgagtgcagtggtgcgatcttgactcactgcaacctccgcctcccaggttcaagtaattcctctgcctcagcctctcgagcagctgggattacaggcatgcgccaccatgccccactaattttgtagttttattagagacagggtttcttcatgttggtcaggccggtcttgaactcccnacctcaggtggtccatccactttggcctnncaaaatgttgggattacaggcattagccaccacgcctggcctatttatttacttattaatggtgttttttttttgtttttttttttgagatggagtcttgctctatcgtccaggctggagtgcagtgtcacgatcttggctcactgcaacccccgcctcctgggttcaagctattctcctgcctcagcctcccgagtagctgggactacaggcgtctgcaaccacacctggctgatttttgtatttttagtagagatggggttttaccatattggtcaggctggtctcaaattcctgacgtcaggtgacccacctgccttggcctctcaaaatgttgggattacaggtgttagccactgtgcctggcctgtattgtattttaataggtgattattggttttcatattaagatagtgaaatctagcgcaaggatctcaaaaatttgtttgatgattgaaggaatattctgaaaattacctagtatagatgttaggataaagagcagacccttttcaatataggtgagaggagaagttggagggtgtgatgatactcaaaagtttttcactgaagagaaattggggcgtgcagtaaacatgtaaaaagattcttactaataagcaggtggatgcaaatgaaaatcatcatggaaggttatttttaaaactggttctatcattgcctcactttatatattacagagttatacatactactttgtaagataacttttcttttcaaaactgaagtcaatgtgatagaatggtgagcattattttggaaggccagactaggaggaggtgggaggaagaagtcagactcagcctgtgaacagacgctaaccttggcagaagccaaaacagtcagacagtgttgtctaaaaatgatcattcaagaagagcgaaacagcaaggtgatttgtgaaagagatttattagaaaatgaaacacatttatacctctgttcaataaaaatctgcttttcgtcaaactga

SEQ ID NO: 31511 - DNA, 224 bp, Homo sapiens
ttttttttttgcatatgcagtttgggttgagttttctgttgcacaaaaccaagaaagtcacacaaatactatatatctttgttttttttttttttgagacggagtctcgctctgttgcccaggctggagtgcagtggcgcgatctcggttcacgccattctcctgcctcagcctccggggtacctgggaccacagacacccaccaccacgcccagctaattttt

SEQ ID NO: 31512 - DNA, 531 bp, Homo sapiens
tccaggaatctcagccctttacttacaccataaacataaataaactctaaataaagtatagacataaatgtaaaagttaaacctatacactttttagaagaaaactgtcataaccttgaggtgggcaaagataagaaacaaaatatacatcataaaaaatcctgacaaatcaggcttcatcaaattaaaactttctgcctttggagagatagcactgcaattacaaaaaggcaagctatgatctagggaaaaaatttttagaaatacatgtctgaaaagacttaactatccaaaatatttaaataatactttgaaaattaacaagaaggcagacaattggattttttaaaattggcaaatatttgaacagacactttacaatagaagatacagaatagtcaatgagtgtaggataagatgttcattcaacagtattgttcaccagggaaatgcaaattaaaccactatgaagtacaactgtaatagctaatatcaaatataactgacaacaccaattgctgatgaggatga

SEQ ID NO: 31513 - DNA, 2527 bp, Homo sapiens
cagcggcggcccaggaggcagccggtgagcgcctgcgagcagagtggcgggggccgctgacaggtcccgcgcagcccagcccagcccagccacgcggctcacaggtggggtccaagagcagtttggagcaacccggcgctacggagaggggtggacggctctgcacgggcctcctgtctcccgctcgggcagagggactcggggggacctcgctccttggccgagagaacctgaactcgggcggagagaacgcgcccaggcgggcaaggggaccagagaaagccggggctggaagtcactgtcgctcgccactgtctggagcgcacggagcgcagaggcccggcagccgcgcgtgccctcccggggaccgagccagtgatgcaggatcgctgagcggagatccgcgccgagaagtctctcggggccggggctgagacgcacgccttcgacaccgctgccaagaccccgattccggcgactcttgcggggaaccgaggggccaaggctgccccaagctcaggacttgggcgagtctaagacgatggtttcttaagcacggacccgcgttccccttcccgccccctcgactggaggcagggatcctgcgcggggcccccgggattccgtttccccgcggagccccggccgctgcctcccgggacagttcgcacggccacaggggcgcacggcgatgtggcctccgtccagcgcgctggcccgccggggggatgctctggcacctgtcggggtccaggcctagcatggccggcgcgttgcccgacgtcgcctccggctaggatggcccctccgggcccggccagtgccctctccacctcggccgagccgctgtcccgcagcatcttccggaagttcttgctgatgctctgctccctgctcacgtccctttacgtcttctactgcctggccgagcgctgccagaccctgtccggccccgtcgtggggctgtccggcggcggcgaggaggcgggggcccctggtggcggcgtcctggccggaggcccgagggagctggcggtgtggccggcggcggcacagagaaagcgcctcctgcaactgccgcagtggcggaggcgccggccgcccgcgccccgcgacgacggcgaggaggcggcctgggaagaagagtcccctggcctgtcagggggtccgggcggctccggggccggaagcaccgtggccgaggccccgccggggaccctggcgctgctcctggacgaaggcagcaagcagctgccgcaggccatcatcatcggagtgaagaagggcggcacgcgggcgctgctggagttcctgcgcgtgcaccccgacgtgcgcgccgtgggcgccgagccccacttcttcgaccgcagctacgacaagggcctcgcctggtaccgggacctgatgcccagaaccctggacgggcagatcaccatggagaagacgcccagttacttcgtcacgcgggaggcccccgcgcgcatctcggccatgtccaaggacaccaagctcatcgtggtggtgcgggacccggtgaccagggccatctcggactacacgcagacgctgtccaagcggcccgacatccccaccttcgagagcttgacgttcaaaaacaggacagcgggcctcatcgacacgtcgtggagcgccatccagatcggcatctacgccaagcacctggagcactggctgcgccacttccccatccgccagatgctcttcgtgagcggcgagcggctcatcagcgacccggccggggagctgggccgcgtgcaagacttcctgggcctcaagaggatcatcacggacaagcacttctacttcaacaagaccaagggcttcccctgcctgaagaaggcggagggcagcagccggccccattgcctgggcaagaccaagggcaggacccatcctgagatcgaccgcgaggtggtgcgcaggctgcgcgagttctaccggcctttcaacctcaagttctaccagatgaccgggcacgactttggctgggatggataaccatataatttaaaaagaaaaaaaaaatcaaaatataatatatttttttaccaatcggtagagaagagacagtttaatatttgtgctgaaaatatgtttcagtatttttttcaatgaatgttaagagattgttctcactcccgccccatcttaatgtataaccaacaccaaacacgtggatcaacagaaaaggaaaatttcactcgtctaaacactttcaattttcagtttttattttatgttctatatacccagtcataaagtataagcatcagttgtcattaaaagttttcagaaaatcttgaggttaaacatctctctctctttttttaaaatacaaggccctgataaaattgatatctatccttatatttttctccctttttcccgtgccactttttcttaaattatttcccagttagtattatcatatgtttgtacccgtcacagttttcatagtgctttcaaatacacctttttgatcattaaaataaaaaaataaatcttg

SEQ ID NO: 31514 - DNA, 2786 bp, Homo sapiens
cagcggcggcccaggaggcagccggtgagcgcctgcgagcagagtggcgggggccgctgacaggtcccgcgcagcccagcccagcccagccacgcggctcacaggtggggtccaagagcagtttggagcaacccggcgctacggagaggggtggacggctctgcacgggcctcctgtctcccgctcgggcagagggactcggggggacctcgctccttggccgagagaacctgaactcgggcggagagaacgcgcccaggcgggcaaggggaccagagaaagccggggctggaagtcactgtcgctcgccactgtctggagcgcacggagcgcagaggcccggcagccgcgcgtgccctcccggggaccgagccagtgatgcaggatcgctgagcggagatccgcgccgagaagtctctcggggccggggctgagacgcacgccttcgacaccgctgccaagaccccgattccggcgactcttgcggggaaccgaggggccaaggctgccccaagctcaggacttgggcgagtctaagacgatggtttcttaagcacggacccgcgttccccttcccgccccctcgactggaggcagggatcctgcgcggggcccccgggattccgtttccccgcggagccccggccgctgcctcccgggacagttcgcacggccacaggggcgcacggcgatgtggcctccgtccagcgcgctggcccgccggggggatgctctggcacctgtcggggtccaggcctagcatggccggcgcgttgcccgacgtcgcctccggctaggatggcccctccgggcccggccagtgccctctccacctcggccgagccgctgtcccgcagcatcttccggaagttcttgctgatgctctgctccctgctcacgtccctttacgtcttctactgcctggccgagcgctgccagaccctgtccggccccgtcgtggggctgtccggcggcggcgaggaggcgggggcccctggtggcggcgtcctggccggaggcccgagggagctggcggtgtggccggcggcggcacagagaaagcgcctcctgcaactgccgcagtggcggaggcgccggccgcccgcgccccgcgacgacggcgaggaggcggcctgggaagaagagtcccctggcctgtcagggggtccgggcggctccggggccggaagcaccgtggccgaggccccgccggggaccctggcgctgctcctggacgaaggcagcaagcagctgccgcaggccatcatcatcggagtgaagaagggcggcacgcgggcgctgctggagttcctgcgcgtgcaccccgacgtgcgcgccgtgggcgccgagccccacttcttcgaccgcagctacgacaagggcctcgcctggtaccgggacctgatgcccagaaccctggacgggcagatcaccatggagaagacgcccagttacttcgtcacgcgggaggcccccgcgcgcatctcggccatgtccaaggacaccaagctcatcgtggtggtgcgggacccggtgaccagggccatctcggactacacgcagacgctgtccaagcggcccgacatccccaccttcgagagcttgacgttcaaaaacaggacagcgggcctcatcgacacgtcgtggagcgccatccagatcggcatctacgccaagcacctggagcactggctgcgccacttccccatccgccagatgctcttcgtgagcggcgagcggctcatcagcgacccggccggggagctgggccgcgtgcaagacttcctgggcctcaagaggatcatcacggacaagcacttctacttcaacaagaccaagggcttcccctgcctgaagaaggcggagggcagcagccggccccattgcctgggcaagaccaagggcaggacccatcctgagatcgaccgcgaggtggtgcgcaggctgcgcgagttctaccggcctttcaacctcaagttctaccagatgaccgggcacgactttggctgggatggataaccatataatttaaaaagaaaaaaaaaatcaaaatataatatatttttttaccaatcggtagagaagagacagtttaatatttgtgctgaaaatatgtttcagtatttttttcaatgaatgttaagagattgttctcactcccgccccatcttaatgtataaccaacaccaaacacgtggatcaacagaaaaggaaaatttcactcgtctaaacactttcaattttcagtttttattttatgttctatatacccagtcataaagtataagcatcagttgtcattaaaagttttcagaaaatcttgaggttaaacatctctctctctttttttaaaatacaaggccctgataaaattgatatctatccttatatttttctccctttttcccgtgccactttttcttaaattatttcccagttagtattatcatatgtttgtacccgtcacagttttcatagtgctttcaaatacacctttttgatcattaaaataaaaaaataaatcttgctctgttgtataagatcacaataggtaaatattattatccccattttacagaaaggaaaactgagtctttgggaggtgaaataatgtatctaaaggtcaaatgttggatggaccctggacaaaattccatcttccacttgttccctatttcatgtcactttttccagggagaatggaaaagaagacatctgcacctttagaaatggttaggtagttttcagatgatatgaaaagggaaagagagccccttgttttctaa

SEQ ID NO: 31515 - DNA, 2088 bp, Homo sapiens
cagcggcggcccaggaggcagccggtgagcgcctgcgagcagagtggcgggggccgctgacaggtcccgcgcagcccagcccagcccagccacgcggctcacaggtggggtccaagagcagtttggagcaacccggcgctacggagaggggtggacggctctgcacgggcctcctgtctcccgctcgggcagagggactcggggggacctcgctccttggccgagagaacctgaactcgggcggagagaacgcgcccaggcgggcaaggggaccagagaaagccggggctggaagtcactgtcgctcgccactgtctggagcgcacggagcgcagaggcccggcagccgcgcgtgccctcccggggaccgagccagtgatgcaggatcgctgagcggagatccgcgccgagaagtctctcggggccggggctgagacgcacgccttcgacaccgctgccaagaccccgattccggcgactcttgcggggaaccgaggggccaaggctgccccaagctcaggacttgggcgagtctaagacgatggtttcttaagcacggacccgcgttccccttcccgccccctcgactggaggcagggatcctgcgcggggcccccgggattccgtttccccgcggagccccggccgctgcctcccgggacagttcgcacggccacaggggcgcacggcgatgtggcctccgtccagcgcgctggcccgccggggggatgctctggcacctgtcggggtccaggcctagcatggccggcgcgttgcccgacgtcgcctccggctaggatggcccctccgggcccggccagtgccctctccacctcggccgagccgctgtcccgcagcatcttccggaagttcttgctgatgctctgctccctgctcacgtccctttacgtcttctactgcctggccgagcgctgccagaccctgtccggccccgtcgtggggctgtccggcggcggcgaggaggcgggggcccctggtggcggcgtcctggccggaggcccgagggagctggcggtgtggccggcggcggcacagagaaagcgcctcctgcaactgccgcagtggcggaggcgccggccgcccgcgccccgcgacgacggcgaggaggcggcctgggaagaagagtcccctggcctgtcagggggtccgggcggctccggggccggaagcaccgtggccgaggccccgccggggaccctggcgctgctcctggacgaaggcagcaagcagctgccgcaggccatcatcatcggagtgaagaagggcggcacgcgggcgctgctggagttcctgcgcgtgcaccccgacgtgcgcgccgtgggcgccgagccccacttcttcgaccgcagctacgacaagggcctcgcctggtaccgggacctgatgcccagaaccctggacgggcagatcaccatggagaagacgcccagttacttcgtcacgcgggaggcccccgcgcgcatctcggccatgtccaaggacaccaagctcatcgtggtggtgcgggacccggtgaccagggccatctcggactacacgcagacgctgtccaagcggcccgacatccccaccttcgagagcttgacgttcaaaaacaggacagcgggcctcatcgacacgtcgtggagcgccatccagatcggcatctacgccaagcacctggagcactggctgcgccacttccccatccgccagatgctcttcgtgagcggcgagcggctcatcagcgacccggccggggagctgggccgcgtgcaagacttcctgggcctcaagaggatcatcacggacaagcacttctacttcaacaagaccaagggcttcccctgcctgaagaaggcggagggcagcagccggccccattgcctgggcaagaccaagggcaggacccatcctgagatcgaccgcgaggtggtgcgcaggctgcgcgagttctaccggcctttcaacctcaagttctaccagatgaccgggcacgactttggctgggattgagcagacccgggctatgtaccttacccacgtggcttatctattgacagagattatatgtatgtaaaatgtaaa

SEQ ID NO: 31516 - DNA, 1820 bp, Homo sapiens
cagcggcggcccaggaggcagccggtgagcgcctgcgagcagagtggcgggggccgctgacaggtcccgcgcagcccagcccagcccagccacgcggctcacaggtggggtccaagagcagtttggagcaacccggcgctacggagaggggtggacggctctgcacgggcctcctgtctcccgctcgggcagagggactcggggggacctcgctccttggccgagagaacctgaactcgggcggagagaacgcgcccaggcgggcaaggggaccagagaaagccggggctggaagtcactgtcgctcgccactgtctggagcgcacggagcgcagaggcccggcagccgcgcgtgccctcccggggaccgagccagtgatgcaggatcgctgagcggagatccgcgccgagaagtctctcggggccggggctgagacgcacgccttcgacaccgctgccaagaccccgattccggcgactcttgcggggaaccgaggggccaaggctgccccaagctcaggacttgggcgagtctaagacgatggtttcttaagcacggacccgcgttccccttcccgccccctcgactggaggcagggatcctgcgcggggcccccgggattccgtttccccgcggagccccggccgctgcctcccgggacagttcgcacggccacaggggcgcacggcgatgtggcctccgtccagcgcgctggcccgccggggggatgctctggcacctgtcggggtccaggcctagcatggccggcgcgttgcccgacgtcgcctccggctaggatggcccctccgggcccggccagtgccctctccacctcggccgagccgctgtcccgcagcatcttccggaagttcttgctgatgctctgctccctgctcacgtccctttacgtcttctactgcctggccgagcgctgccagaccctgtccggccccgtcgtggggctgtccggcggcggcgaggaggcgggggcccctggtggcggcgtcctggccggaggcccgagggagctggcggtgtggccggcggcggcacagagaaagcgcctcctgcaactgccgcagtggcggaggcgccggccgcccgcgccccgcgacgacggcgaggaggcggcctgggaagaagagtcccctggcctgtcagggggtccgggcggctccggggccggaagcaccgtggccgaggccccgccggggaccctggcgctgctcctggacgaaggcagcaagcagctgccgcaggccatcatcatcggagtgaagaagggcggcacgcgggcgctgctggagttcctgcgcgtgcaccccgacgtgcgcgccgtgggcgccgagccccacttcttcgaccgcagctacgacaagggcctcgcctggtaccgggacctgatgcccagaaccctggacgggcagatcaccatggagaagacgcccagttacttcgtcacgcgggaggcccccgcgcgcatctcggccatgtccaaggacaccaagctcatcgtggtggtgcgggacccggtgaccagggccatctcggactacacgcagacgctgtccaagcggcccgacatccccaccttcgagagcttgacgttcaaaaacaggacagcgggcctcatcgacacgtcgtggagcgccatccagatcggcatctacgccaagcacctggagcactggctgcgccacttccccatccgccagatgctcttcgtgagcggcgagcggctcatcagcgacccggccggggagctggcctgaacccacacttcctggactctctctcctaatcatcggctccgatccta

SEQ ID NO: 31517 - DNA, 449 bp, Homo sapiens
tgcctttttgcgtttctcagggacctgatgcccagaaccctggacgggcagatcaccatggagaagacgcccagttacttcgtcacgcgggaggcccccgcgcgcatctcggccatgtccaaggacaccaagctcatcgtggtggtgcgggacccggtgaccagggccatctcggactacacgcagacgctgtccaagcggcccgacatccccaccttcgagagcttgacgttcaaaaacaggacagcgggcctcatcgacacgtcgtggagcgccatccagatcggcatctacgccaagcacctggagcactggctgcgccacttccccatccgccagatgctcttcgtgagcggcgagcggctcatcagcgacccggccggggagctgggccgcgtgcaagacttcctgggcctcaagaggatcatcacggacaagcacttctactt

SEQ ID NO: 31518 - DNA, 432 bp, Homo sapiens
atatttgtgctgaaaatatgtttcagtatttttttcaatgaatgttaagagattgttctcactcccgccccatcttaatgtataaccaacaccaaacacgtggatcaacagaaaaggaaaatttcactcgtctaaacactttcaattttcagtttttattttatgttctatatacccagtcataaagtataagcatcagttgtcattaaaagttttcagaaaatcttgaggttaaacatctctctctctttttttaaaatacaaggccctgataaaattgatatctatccttatatttttctccctttttcccgtgccactttttcttaaattatttcccagttagtattatcatatgtttgtacccgtcacagttttcatagtgctttcaaatacacctttttgatcattaaaataaaaaaataaatcttg

SEQ ID NO: 31519 - DNA, 4087 bp, Homo sapiens
  misc_feature (1846)..(1846): n is a, c, g, or t
  misc_feature (2882)..(2882): n is a, c, g, or t
gactcttgaggatccccctgcatccggggagagaaagaggtagactagttttgtgtttgtggctattttaatagagtagcacaagtaatcaaaaaaacagtaggctgttttgaatttactggctgtcccttatgagttcacagttagattggactgtcctcaatgtactttcttttttttctttctttcccacatctctttatttctctgattttgtttaaacttcataaagagctctctgatctttcctttccaaacaatgaaggtttatcctttgtaaactacctctgtactccacaggctgatgatatgtgatatccctatatcattaaagtaaagcctaagcacattctgtggcttttgtgtctactctgttgttgctgagcttatgaactattagaaataactccctcttgcattttcacacatggggaatgtgatgttctcttgggtattatgctaatcatattttggcaggtttctctggagcagatgcagaaatgatcataccactttccagggtgtattattttagctcctttgacttgggccctaagtctgttttacctgatgttcctgaaagatgttcctgatgtccttcactgttctttcatgctggatgttcttgcctatgctgcctcctcagctatcaccctctcttcccctttttaatgtagaactcattcttaatgatttgtcaaaggcaccctatttcactgaaatgccttctatattccctaccctccaagtggattgtagaccttctaaggtcttttgacatctgcatatctctagcacagcacttaccacggtgattatttatctgttcatctttccaagtagacactctcattttaactccctaccctagtcgccagcatccccagcatagtgcctgtcataaaatggtgccacaatgaaaatttgaaaaatgaatgaacgtgataaacatagatgagaatcctatattctacaattttttaaatgtactgaaattattctttttgaatcctcctatttatttctgtgacttctttggtgacaaagttagaaaaaagtggaggtcagtagggagatatgaagggacgcaagtggaagcagtgagcctgggcgggtgatggagtgggagatacgtggcacaggggtcagtgagttaatctgggctcattcagagaatggaaggtgtgtgccaagaaaactggttggatagggataggtcagggattccctcttgcattctcacacttgggggcatgtgtcattttcttttcttttcttttttttttttttttttttgagacggagcatcgctctttctcccaggctggagtgcaatggtgctatctcggctcactgcaacctccacctcccgggttcaagctattctcatgtctcagccttccaagtagctgggactacaggtgcctgccaccatgctcagctaatttttgtatttttagtaaagatggggtttcaccatgttggtcaggttggcctcgaactcctgatctcaggtgatccacctgcctcggcttctcaaagtgctgggattccaggcatgagccaccatgcctggccgcatgtgtcattttcttgggtgttatactgatcgtatatttgcaggtttgcttttgtgacagacttcttctgggggaaaaaaagtatccttctatctttttacttttgtccagttccaggtatccctgtttttttcttcactcttccttccttgttcatgggagtttttcttgaggacttcaagcccagcttcggagaatcctggttgtgtcatctcatctcctttctgctctcttctctacctagcctttccaccctcacacctccnggggtctgaaaatggaaagataagggtgtttccctgaaagttgctcttctgtgtggggatgacaggttctaaagactcttttctggtccctgccctcattgccatgattaatcagttaagtggcccgaggttttataacagcacagtcttaaaatgcttctcccaagtttaatttctctccatttgaccttttaaggatgtgaattggctttaagcagtagactccctttagtacggcgctgtgagcctctcagtgaatctgctacatccattccacccacgggtctggaaacttgtctgtttacctttccctaaaaacctaagatatatttttaagaagtgccttgtaacttttcatatagcctttcccctactttgggtagactgtttcttacaggaatttggtagatctttccaaagagaattctgtatctctatttttaaagcataaatcctgtcaactttggaggagaactgatttggcttgagttttctcagacatgggaacttttgacctaagtttgtattttacattgttgaaagggaactccgggatcccagaaaacatatggactgcaattgggtaaagtttctgtttcagtaatgcctcttctggacatttcatacaaatggaaacatgcagcatgtagtaatttatgacagcttctttcacttagcatgaggttttcaaagttcattgatgtggtagcatttgtcagtactctgtgcctttttatggctgaataatattttatcatatggatttaccacattttatcattttatttatccatcatcagttgattgacatttgagttgcttctactttttgagtattatcaataattctgttatgaacattcttgtataattttttggtagacatttatcttcatatttcttggatatatacctaggagcagaattgctgcgtcagatggtaatgctgtttaaccttttcaggaactgtcagactgttctgaagtgggtacattattttacattccaaccagcagtgtatgagaattccagtttntccacatcctcatcaacagttgttattgtctgtcttttttattatattcatctgtaatgtgaagtgtttatctcattgtggttttgatttacatttccctgatggttgatgattttcaacatcttttcatatacttattagtcattatgtatcttctttggagaatgtctgttcagatcctttacctactttataattggtttatctttttaatattgaactgtaatagttttaaaaaaatatatcctaaatacaagtctcttatcagataatatgacttgcagatattttctgtcattctatgtactgtcttttcacattcttgatgatatacttttcagcccaaatgtttttaacttgatggaatacaatttattttttcttttgttgcttgtgctttcagtcatatttgtgaaaactttgcttatcccacattacaaagatttactacttctaagtgatttataattttaccacctacctttaggtctctgatccattttgagttaatttttatgtgcaaggagggagtctaacttgattcttttacatgtggatatttagttgtcccaggaccatttgttgaattaagtgcccagaacaagtacatctatatatagagaaagtagattagtggttgtcagagactgcaagaagtggggaattggagagtgactgcccataggtacaggcatgctttttggcattatgaaaatattctggaattaggtagtggtgatggttgcagaacttttggaatatggtaaaagacactgaaatatatgcttaaaaatggtgatttttgtgatatatgaattatactatggaactaataataacagtaataaagcaaggtgtctttccacatctccatgccttgtattttcattaaaaaaaaaaaaaaaaaaaaaaaagcatttcagggccaggctcagtggtttactcctgtaatcccagcacttttggaggcctaggtgggaggatcgcttgaggccagaagttcaaaaccagcctgagcaacatagcaagaccttgtctccatgaaaaataaaaaattagccagaaatggtgatgtgtgcctagagttccaactacttggaaagctgaggcaagaggatcacttgagcctaggagttcaaggttgcagtgatctataatcaccactgcactccagcctgggtgacagaacaagaccctgtctcaaa

SEQ ID NO: 31520 - DNA, 4485 bp, Homo sapiens
  misc_feature (1846)..(1846): n is a, c, g, or t
  misc_feature (3280)..(3280): n is a, c, g, or t
gactcttgaggatccccctgcatccggggagagaaagaggtagactagttttgtgtttgtggctattttaatagagtagcacaagtaatcaaaaaaacagtaggctgttttgaatttactggctgtcccttatgagttcacagttagattggactgtcctcaatgtactttcttttttttctttctttcccacatctctttatttctctgattttgtttaaacttcataaagagctctctgatctttcctttccaaacaatgaaggtttatcctttgtaaactacctctgtactccacaggctgatgatatgtgatatccctatatcattaaagtaaagcctaagcacattctgtggcttttgtgtctactctgttgttgctgagcttatgaactattagaaataactccctcttgcattttcacacatggggaatgtgatgttctcttgggtattatgctaatcatattttggcaggtttctctggagcagatgcagaaatgatcataccactttccagggtgtattattttagctcctttgacttgggccctaagtctgttttacctgatgttcctgaaagatgttcctgatgtccttcactgttctttcatgctggatgttcttgcctatgctgcctcctcagctatcaccctctcttcccctttttaatgtagaactcattcttaatgatttgtcaaaggcaccctatttcactgaaatgccttctatattccctaccctccaagtggattgtagaccttctaaggtcttttgacatctgcatatctctagcacagcacttaccacggtgattatttatctgttcatctttccaagtagacactctcattttaactccctaccctagtcgccagcatccccagcatagtgcctgtcataaaatggtgccacaatgaaaatttgaaaaatgaatgaacgtgataaacatagatgagaatcctatattctacaattttttaaatgtactgaaattattctttttgaatcctcctatttatttctgtgacttctttggtgacaaagttagaaaaaagtggaggtcagtagggagatatgaagggacgcaagtggaagcagtgagcctgggcgggtgatggagtgggagatacgtggcacaggggtcagtgagttaatctgggctcattcagagaatggaaggtgtgtgccaagaaaactggttggatagggataggtcagggattccctcttgcattctcacacttgggggcatgtgtcattttcttttcttttcttttttttttttttttttttgagacggagcatcgctctttctcccaggctggagtgcaatggtgctatctcggctcactgcaacctccacctcccgggttcaagctattctcatgtctcagccttccaagtagctgggactacaggtgcctgccaccatgctcagctaatttttgtatttttagtaaagatggggtttcaccatgttggtcaggttggcctcgaactcctgatctcaggtgatccacctgcctcggcttctcaaagtgctgggattccaggcatgagccaccatgcctggccgcatgtgtcattttcttgggtgttatactgatcgtatatttgcaggtttgcttttgtgacagacttcttctgggggaaaaaaagtatccttctatctttttacttttgtccagttccaggtatccctgtttttttcttcactcttccttccttgttcatgggagtttttcttgaggacttcaagcccagcttcggagaatcctggttgtgtcatctcatctcctttctgctctcttctctacctagcctttccaccctcacacctccnggggtctgaaaatggaaagataagggtgtttccctgaaagttgctcttctgtgtggggatgacaggttctaaagactcttttctggtccctgccctcattgccatgattaatcagttaagtggcccgaggttttataacagcacagtcttaaaatgcttctcccaagtttaatttctctccatttgaccttttaaggatgtgaattggctttaagcagtagactccctttagtacggcgctgtgagcctctcagtgaatctgctacatccattccacccacgggtctggaaacttgtctgtttacctttccctaaaaacctaagatatatttttaagaagtgccttgtaacttttcatatagcctttcccctactttgggtagactgtttcttacaggaatttggtagatctttccaaagagaattctgtatctctatttttaaagcataaatcctgtcaactttggaggagaactgatttggcttgagttttctcagacatgggaacttttgacctaagtttgtattttacattgttgaaagggaactccgggatcccagaaaacatatggactgcaattgggtaaagtttctgtttcagtacttattcctacttactagccgtttaatcttggtcaagtcagccatgtggctctcaacttcctcatctgtaacataaaaggattagagcagacaatctctaacaaatgctataataccactgacaaataataatattagctaatatgtgtaaggcactgtgtttagtgctttttcccttaatacaatagctttgagatataatttatataccatacaatttacttcttaaaaaagtacacaattcagtaattttaatagataggagtaaccatcaccacagtcaattctagaatatttttatacatcagaagaaaccctttacccattatcaattactctccattcctcctaactccctcccagccctaggcaactactagtctactttctgtctttatatgcctcttctggacatttcatacaaatggaaacatgcagcatgtagtaatttatgacagcttctttcacttagcatgaggttttcaaagttcattgatgtggtagcatttgtcagtactctgtgcctttttatggctgaataatattttatcatatggatttaccacattttatcattttatttatccatcatcagttgattgacatttgagttgcttctactttttgagtattatcaataattctgttatgaacattcttgtataattttttggtagacatttatcttcatatttcttggatatatacctaggagcagaattgctgcgtcagatggtaatgctgtttaaccttttcaggaactgtcagactgttctgaagtgggtacattattttacattccaaccagcagtgtatgagaattccagtttntccacatcctcatcaacagttgttattgtctgtcttttttattatattcatctgtaatgtgaagtgtttatctcattgtggttttgatttacatttccctgatggttgatgattttcaacatcttttcatatacttattagtcattatgtatcttctttggagaatgtctgttcagatcctttacctactttataattggtttatctttttaatattgaactgtaatagttttaaaaaaatatatcctaaatacaagtctcttatcagataatatgacttgcagatattttctgtcattctatgtactgtcttttcacattcttgatgatatacttttcagcccaaatgtttttaacttgatggaatacaatttattttttcttttgttgcttgtgctttcagtcatatttgtgaaaactttgcttatcccacattacaaagatttactacttctaagtgatttataattttaccacctacctttaggtctctgatccattttgagttaatttttatgtgcaaggagggagtctaacttgattcttttacatgtggatatttagttgtcccaggaccatttgttgaattaagtgcccagaacaagtacatctatatatagagaaagtagattagtggttgtcagagactgcaagaagtggggaattggagagtgactgcccataggtacaggcatgctttttggcattatgaaaatattctggaattaggtagtggtgatggttgcagaacttttggaatatggtaaaagacactgaaatatatgcttaaaaatggtgatttttgtgatatatgaattatactatggaactaataataacagtaataaagcaaggtgtctttccacatctccatgccttgtattttcattaaaaaaaaaaaaaaaaaaaaaaaagcatttcagggccaggctcagtggtttactcctgtaatcccagcacttttggaggcctaggtgggaggatcgcttgaggccagaagttcaaaaccagcctgagcaacatagcaagaccttgtctccatgaaaaataaaaaattagccagaaatggtgatgtgtgcctagagttccaactacttggaaagctgaggcaagaggatcacttgagcctaggagttcaaggttgcagtgatctataatcaccactgcactccagcctgggtgacagaacaagaccctgtctcaaa

SEQ ID NO: 31521 - DNA, 1041 bp, Homo sapiens
atggatacaggccccgaccagtcctacttctccggcaatcactggttcgtcttctcggtgtaccttctcactttcctggtggggctccccctcaacctgctggccctggtggtcttcgtgggcaagctgcagcgccgcccggtggccgtggacgtgctcctgctcaacctgaccgcctcggacctgctcctgctgctgttcctgcctttccgcatggtggaggcagccaatggcatgcactggcccctgcccttcatcctctgcccactctctggattcatcttcttcaccaccatctatctcaccgccctcttcctggcagctgtgagcattgaacgcttcctgagtgtggcccacccactgtggtacaagacccggccgaggctggggcaggcaggtctggtgagtgtggcctgctggctgttggcctctgctcactgcagcgtggtctacgtcatagaattctcaggggacatctcccacagccagggcaccaatgggacctgctacctggagttccggaaggaccagctagccatcctcctgcccgtgcggctggagatggctgtggtcctctttgtggtcccgctgatcatcaccagctactgctacagccgcctggtgtggatcctcggcagagggggcagccaccgccggcagaggagggtggcggggctgttggcggccacgctgctcaacttccttgtctgctttgggccctacaacgtgtcccatgtcgtgggctatatctgcggtgaaagcccggcatggaggatctacgtgacgcttctcagcaccctgaactcctgtgtcgacccctttgtctactacttctcctcctccgggttccaagccgactttcatgagctgctgaggaggttgtgtgggctctggggccagtggcagcaggagagcagcatggagctgaaggagcagaagggaggggaggagcagagagcggaccgaccagctgaaagaaagaccagtgaacactcacagggctgtggaactggtggccaggtggcctgtgctgaaagctag

SEQ ID NO: 31522 - DNA, 392 bp, Homo sapiens
  misc_feature (45)..(45): n is a, c, g, or t
  misc_feature (143)..(143): n is a, c, g, or t
  misc_feature (191)..(191): n is a, c, g, or t
  misc_feature (290)..(290): n is a, c, g, or t
atgtctggtcgcggcaaacaaggcggtaaagctcgcgccaaggcnaagactcggtcttctcgtgcaggtttgcagtttcctgtgggccgagtgcaccgcctgctccgcaaggcaactactccgagcgcgtcggggctggcgcnccggtgtatctcgcggcggtgcttgagtacctgaccgccgagatcctngagctggcgggcaatgcggcccgcgacaacaagaagacccgcatcatcccgcgccacctgcaattggccatccgcaatgacgaggagcttaataaactnttggggcgtgtgaccatcgcgcagggtggcgttttgcctaatattcaggcggtgctgctgcctaagaaaactgagagccatcataaggccaagggaaagtga

SEQ ID NO: 31523 - DNA, 424 bp, Homo sapiens
aatggattaataaatattttaaaatatctgttttaattcataatatggtgactattgatagataaacctacataaacaaaatattgatagatatacctacatacacaaaagctatttgggattctttctaaaagtgtaaaaagggccgggcgtggtggctcacgcctataatcccaggactttgggaggccaaggcaggtggatcatgaggtcaggagatcgagaccatcctggctaacatggtgaaaccccatctctactaataatacaaaaaattagccaagcgtggtggcgggcacctgtagtcccagctacttgggaggctaaggcaggagaatggcgtgaacccaggagtcggagcttgcagtgagccgagatcgcaccactgcactccagcctgggcaacagagcgagactccatctc

SEQ ID NO: 31524 - DNA, 1540 bp, Homo sapiens
catagagttgggagtttctcctggattgcaccatgctgtattgggaggaggtcaggctgcgctgggcatatctaataagctttttcttctcttctacatgtttttggcattgtgctcaactgaagtagtacaaattcttaactatgttcaggaattctcacaaaggcaatgtgatcagcgtggtgttaagttcatatatctatgaagaaacgaggaccagtggtgtttgtttttacgcttttcattttaaatttatattttatttattattttaatttttgtgagtacgtagtacatatatgtatctatggattatatcactgattttgatgaaggcatgaaatgcacaaaaataacatcagataaatggttattcattgcctcaactatttgttctttattttacgaacaatctaataacattcttttagttacttaaaaatgtacaattaaattgctttgactatagtcactcccgaccagagaaaaaccctgtagacattagtcactcctcattctgtctcaaaccctctccctgaccctcagccctaggtagcaactacctagtgcgatcaatcccatatgcatagattaccatattgtggacatttcctataagcggaattgcacaataggggagctgttatgactgacataacacgtagcacaatattttcaagattcgtccacattgtaggcttacccacagggggaaaccatttttttgggggcttttagtaacaccggtgttttctccttccttacgtccttcttccttccttccttccttccttccttccttccttccttcctgacttccttctttccttccctccttcctcctatttctctcttactccttctgccctctctctttcctatgccttaggtgcatcccacattctgcgtttttttggggaaatcctcgacaggtgcaggaaaattgtgttattgtaactatttaccgttatctctctttcacggctctccatcagttgtgaacatctattggtttatcccaagtcactaagcatattttcattaggtaaacctgtttttccttatacagctgtttctggagtatagggtcgcatactcataaacccagtgtaactcagaaacgcatctaatattccagtaaacccatcataacgttgaaaaatcgtaaatcaaaccatcataagtcacggtttgtccgtggatatgggcgtcatcaattccattgtattcagtaatgctgtacaccattaacaatggcagactgattgggagtggatattgatagcattataaaagtcagttattagagggatacttctttaacctgactgaagaactgatctaatggctttagtacagtgcatgattatgtgcgatgttttgagacagagtagtacatttgtgaatgaaattttatggcttttttttcacttagtaggaaccattgtgtgtggaaaagtgagaaaatggctttctgctgtagggtctggcattcattgtagatgtaagcttatttttctgtgagcaaatcttattcaat

SEQ ID NO: 31525 - DNA, 1517 bp, Homo sapiens
catagagttgggagtttctcctggattgcaccatgctgtattgggaggaggtcaggctgcgctgggcatatctaataagctttttcttctcttctacatgtttttggcattgtgctcaactgaagtagtacaaattcttaactatgttcaggaattctcacaaaggcaatgtgatcagcgtggtgttaagttcatatatctatgaagaaacgaggaccagtggtgtttgtttttacgcttttcattttaaatttatattttatttattattttaatttttgtgagtacgtagtacatatatgtatctatggattatatcactgattttgatgaaggcatgaaatgcacaaaaataacatcagataaatggttattcattgcctcaactatttgttctttattttacgaacaatctaataacattcttttagttacttaaaaatgtacaattaaattgctttgactatagtcactcccgaccagagaaaaaccctgtagacattagtcactcctcattctgtctcaaaccctctccctgaccctcagccctaggtagcaactacctagtgcgatcaatcccatatgcatagattaccatattgtggacatttcctataagcggaattgcacaataggggagctgttatgactgacataacacgtagcacaatattttcaagattcgtccacattgtaggcttacccacagggggaaaccatttttttgggggcttttagtaacaccggtgttttctccttccttacgtccttccttccttccttccttcctgacttccttctttccttccctccttcctcctatttctctcttactccttctgccctctctctttcctatgccttaggtgcatcccacattctgcgtttttttggggaaatcctcgacaggtgcaggaaaattgtgttattgtaactatttaccgttatctctctttcacggctctccatcagttgtgaacatctattggtttatcccaagtcactaagcatattttcattaggtaaacctgtttttccttatacagctgtttctggagtatagggtcgcatactcataaacccagtgtaactcagaaacgcatctaatattccagtaaacccatcataacgttgaaaaatcgtaaatcaaaccatcataagtcacggtttgtccgtggatatgggcgtcatcaattccattgtattcagtaatgctgtacaccattaacaatggcagactgattgggagtggatattgatagcattataaaagtcagttattagagggatacttctttaacctgactgaagaactgatctaatggctttagtacagtgcatgattatgtgcgatgttttgagacagagtagtacatttgtgaatgaaattttatggcttttttttcacttagtaggaaccattgtgtgtggaaaagtgagaaaatggctttctgctgtagggtctggcattcattgtagatgtaagcttatttttctgtgagcaaatcttattcaat

SEQ ID NO: 31526 - DNA, 1057 bp, Homo sapiens
gcatcttttgtactatttataattaaccagtaagttattttccctgagttttatgtgccattctatcaaattagtcaaatccagttgtggggtccacgggatttgtggtttatagctcatcagtcaaaagcagaggctctggggctttgattgtcatcagaaatgggagcctcagtcttggtgactgagtcctcaaactgggggatgtgatgctatctgcaggtagataatgactgagttgaactggaggacccccagcttgtgtccacgggaggattgcttggtgtgtgtggaaaacaccctgcacatctggtcacagaattattccatattgattgttgttgtgttgtgtgacagacaatagaggaaaagtttatttttttctacacatacgctatggcttcccttctattattccatatctttcaactcctgccatactatttctttctctccaagtttttgttcttcctcagagttcccataaatggaaaggatacgcacttcattgaaataagaatttcatgttagccaagttttcaggatagccatgagtttcacttaattatctgagaacttagagcttactgtcctctacttactatccactgagacttaatgtgttcttggccatcacagaaactttactagctacttatgccattgtcaatggataactctctgaatccacattaataactttgtaattagcttagtcctcagctgtttttcagagataatccccagtcttcatgcagacactatcactgcacctacaggtgaaatgataatcacttcctagcaaggaggttggatcatggaatacaagataatttctcaggaatcagatggtcttattccacacctgcaggaatgtcagcattgcaaccaccatggcaaatattgatttaataaacaattactattcccagataagtgtcaaaatcttagaagaaattgtcatatcttagacaatttagaagtgatggagggtggatgatgagaaattatcgcaccactgcactccagcctgggcgacagagcaagactctgtctc

SEQ ID NO: 31527 - DNA, 282 bp, Homo sapiens
tttgcatagaggaagaaaatatcgtaggaaatagaaacttcaagaagaaagttgacagtaaaggtgaaataatgtttaatcatgtgatttatggaatatgagttagatttttataaattgaaatagttttggccaatatatgggtcaagaatagatttatatgacaggtgatattttacatttataggaagtactttgattacattttctcttttgaaagtatgactcatatctgaactacaaagtcagcctaattaaatgatatttggcttgatttttgtt

SEQ ID NO: 31528 - DNA, 449 bp, Homo sapiens
cccacctgcccagctcatggctggcaacattggcatctgagtaagccaccaacacgcccaagatctggcctgcgtagacccactaacacccatgccagcatatgtcaccctgggaccaaaggataggcatgctaagcccaccactacacctactgaggcccaaagactggcctacttggaatccagtctccagcagaacatcaccacagcctcaactaacaaccacaccctaagccacaaaggaaatcatagataccactgatgctcttcacagacaaaaaaaaaagtcagagactacactactgcacgcaccaagaatcaaagccaaagtgctctacccagccaacaccctggattcatcttcaggaaaaagtaatcacctatgaaagcaaattcaaaaaaggagaagacatggtggatacactagatgcacagatatcaacataaga

SEQ ID NO: 31529 - DNA, 443 bp, Homo sapiens
tagatattgtgttatttaaatgacaccttaattaaggtgtttaaaagaaaaattcccctgagtttctcctgcttgcatttgaagtgaaaacccagctcctcatggggtggccacctccccccggcagctctttctgtctctgcttcatccatggggctttctccagtttctcaccccaccctccttcccatgagtgctccagcaggtgctgttccctctgcctggcacgctttcttgcttctccacttccttggagtaactcagagtcttcttcaactctctacctcaagtcacgtctcgcaggaagcctctctggctctgcccactgcagtcctacctccctgcccttctccttggggacactcatcactcctgaaactgttgactcttctcctaagtacagcttctggctcatagtgggtgctcaataaatatttcataaa

SEQ ID NO: 31530 - DNA, 573 bp, Homo sapiens
cttgtgaggattgtgtggattttcatctcatctcaaggtgtcatctcttccagagacctgtcttccctaaccagtaccctgcacctcattcccatcaaagctggaggagagtctctcctctgtgctcccgagcccctgtacatccccagtcacatctccactcatcctggttttcccatttccgtggctgtctccttggcctgactgtgtacctggtgacagcaggggctgtgttggaaccagctcagtgtctcacagtatgcagaccaaataccccatggaatggcttctggatagtctggtgaaggcctggcatccactcccccttcctaacaacatcctgagttccttttaacagcttttcttcctcatctggtggagcattgctgcatgctcattcccagattttaaatctgaagtacagcaacagactgaaaaagactggagtttgttctagtggctgtgttctaaccagaacccagtatgaggtcacacttgtttttcttatttccctcccaaaaatgttgtttactgcttgataatccatctaataaattttcttatttcttaagt

SEQ ID NO: 31531 - DNA, 1167 bp, Homo sapiens
  misc_feature (286)..(286): n is a, c, g, or t
  misc_feature (450)..(450): n is a, c, g, or t
  misc_feature (651)..(651): n is a, c, g, or t
  misc_feature (754)..(754): n is a, c, g, or t
  misc_feature (926)..(926): n is a, c, g, or t
  misc_feature (964)..(964): n is a, c, g, or t
  misc_feature (1091)..(1091): n is a, c, g, or t
cctcggaccccattctctcttcttttctcctttggggctggggcaactcccaggcgggggcgcctgcagctcagctgaacttggcgaccagaagcccgctgagctccccacggccctcgctgctcatcgctctctattcttttgcgccggtagaaaggatgacgcctcaaccctcgggtgcgcccactgtccaagtgacccgtgagacggagcggtccttccccagagcctcggaagacgaagtgacctgccccacgtccgccccgcccagccccactcgcacacnggggaactgcgcagaggcggaagagggaggctgccgaggggccccgaggaagctccgggcacggcgcgggggacgcagccggcctaagagcgagttggcactgagcaagcagcgacggagtcggcgaaagaaggccaacgaccgcgagcgcaatcgaatgcacnacctcaactcggcactggacgccctgcgcggtgtcctgcccaccttcccagacgacgcgaagctcaccaagatcgagacgctgcgcttcgcccacaactacatctgggcgctgactcaaacgctgcgcatagcggaccacagcttgtacgcgctggagccgccggcgccgcactgcggggagctgggcagcccaggcggtncccccggggactgggggtccctctactccccagtctcccaggctggcagcctgagtcccgccgcgtcgctggaggagcgacccgggctgctgggggccacctnttccgcctgcttgagcccaggcagtctggctttctcagattttctgtgaaaggacctgtctgtcgctgggctgtgggtgctaagggtaagggagagggagggagccgggagccgtagagggtggccgacggcggcggccctcaaaagcacttgttccttctgcttctccctngctgacccctggccggcccaggcctccacgggggcggnaggctgggttcattccccggccctccgagccgcgccaacgcacgcaacccttgctgctgcccgcgcgaagtgggcattgcaaagtgcgctcattttaggcctcctctctgccaccaccccataatcncattcaaagaatactagaatggtagcactacccggccggagccgcccaccgtcttgggtcgccctaccctcactca

SEQ ID NO: 31532 - DNA, 379 bp, Homo sapiens
atggggcacagccaggccatcaccccggggccaccgtcgcaggcaggtggaggctggcagcccagaggcagacaggggcttggaggcagggtggggagcaaggccaaggccgctctctggcccccagtgtcacaggatgacctcagccctggcctggccccagagcaggttggttcactgctgggccctgtggacttgttctcatgctttgtcagtgtcgatgtcgaaagcccaaagtgtttcccaagtcctgctaccttggtaagactcaaccctcaatctcagtctcccctgcagatctctgtggggcttggtctgaactttcgttaggtgagtgtggagtaggcattattgtacattgtagtcctttctcctcaaa

SEQ ID NO: 31533 - DNA, 573 bp, Homo sapiens
tgcttcacttcaggcaccagcttaacaaatttcatgcgtagacctaactttaaaacttttcagccaaagtcttgcatagcactattcctgaaatcagaaaggatctcctgttagacataacaggaataatacagggacttctcatatcactcagccactccaaagcttttgtgaaattatactttacataaattcagaataatccccctctaccgaatgcctcagccagttaacttctctgtactccaaatgttttgtctctcatcttaatgcatgctatatgtgtgtgacagtattaataaagcaaaaaggctggatgcagtgactcacgcttgtaatcccagcactttgggagcccaaggcgggcagatcacctgaggtcgagagtttgacaccagcctgaccaccttggagaaaccctgtctctactaaaaacacaaaaaattagctgccgtggtggcgcatgcctgtgatcccagctacttgggaggctgaggtaggagaatcgcttgaacccaggaggtgtaggttgcggttagccgagatggcgccattgtactccagcctgggcaa

SEQ ID NO: 31534 - DNA, 1808 bp, Homo sapiens
gtagacttgtgtcaccatcaccacaaagggtacagaacaattccactgcaccaacaaattccacctgtgctgcttttttttaagagtggctccccaccccgcattgagtataaaggctttgattttcatcagtgttgtgtcatttattcatttttattgctgagtagttttccatgttaggtaccacaatattcttagccattaacccactgaagcacatttaggttgtttataatttttagtgattatgaataaaactattagaaacattaggtttttgtatgaacataaatattcatctctgtagggtaaatattggagtgaaatggttaggtcatatggtgagtgtatgtttacctttgtaacacagggccaaccttttccagaatgattaattttgttttcccaccagcaacgtatgaagatgtggttgctccataatttgccaacaccaggtattctcattgtttttattttatccattctagtagatgtgtagtggtatctcaatgtggcttcaatttgcatttccttagtgactaatgatgttgagcatcttttcgtgtgcttattgtccatctgtgtatctttgatgaagtgttcaaatcttttgccattttaaaagaattctattgtttgttttcctagtttagttttgtagtttgtggcttgtctttttattctcttttattcaatttttatttcagtgtcttttataaagcaaaggttttaaatgttaatgaagtccagtttttccctctatggaccatactttggtgtcatatttaagaaccccatccctaactaatgtttaggaaatttttcttctagtagcttaatgataatgtttttcacttacatccattttaggtaatttttatataaggtgttaaataaaggcccagctcattgtttttacatgtggttatccagatgtttcagcatcatttgtggaaaacatagtgtttctccattgaattgcctttgcccttttgtcaacaattgattgatcatagttaagcgggtctgtttctcagttttctgttctattccattgatctatgtgtccatccctttgccaaagccacacattgtcttgattactgtagctttgtagtaaatctcaaaatcaggtaatgtaagcccttcaaatttattctttttctaatttatatgtttccactgtcatatatttgtctatatattatgtcaagttttactttatatattttgacactcagttgttatccaaatacaggctaagaattgtcaaatctctggtgatttgaatgttttcccattatgtagcaactttctttaaacataagaatactttataacagataatattggggtttttttgggggggaggaggtttgaaacaaggtctcactctctcacccaggctggagtacagtggtggtgcgattttggctctttgcaacctcaacctcctgggctcaagcagtccttccacctcagtctctcgagtagctgggattacaggcatgcaccaccacacccagctaaattttttgcatcttttgtagaaatggggtttcaccatgttggccaggctggtcttgaaatcatgagctcaagcaatctgcccaccttggcctcccaaagtgctggaaatacaagcatgagccactctgctccaccacagacttattgagatataatttatataccataaaattcatccatttaaaatgtacaattcagtgcacagagttgtatgaccatcaccacaataaatcttagaacattatcacctctaaaataaaacttttagctataacttc

SEQ ID NO: 31535 - DNA, 829 bp, Homo sapiens
actactactactactaaattcgcggccgcgtcgacagttaagcgggtctgtttctcagttttctgttctattccattgatctatgtgtccatccctttgccaaagccacacattgtcttgattactgtagctttgtagtaaatctcaaaatcaggtaatgtaagcccttcaaatttattctttttctaatttatatgtttccactgtcatatatttgtctatatattatgtcaagttttactttatatattttgacactcagttgttatccaaatacaggctaagaattgtcaaatctctggtgatttgaatgttttcccattatgtagcaactttctttaaacataagaatactttataacagataatattggggtttttttgggggggaggaggtttgaaacaaggtctcactctctcacccaggctggagtacagtggtggtgcgattttggctctttgcaacctcaacctcctgggctcaagcagtccttccacctcagtctctcgagtagctgggattacaggcatgcaccaccacacccagctaaattttttgcatcttttgtagaaatggggtttcaccatgttggccaggctggtcttgaaatcatgagctcaagcaatctgcccaccttggcctcccaaagtgctggaaatacaagcatgagccactctgctccaccacagacttattgagatataatttatataccataaaattcatccatttaaaatgtacaattcagtgcacagagttgtatgaccatcaccacaataaatcttagaacattatcacctctaaaataaaacttttagctataacttc

SEQ ID NO: 31536 - DNA, 396 bp, Homo sapiens
gtgacagtttcacttttattgcccaggctggagtgcaatggcgtgatcctgactcactgcaacctccgcctcctgggttcaagtgattctcctgcctcagcctctcaagtagtctcagtgggattacaggtgcccactgccacgcccagataatttttgtatttttagtacagacagggtttcaccatgttggccaggctgatctcgaactcctggcctcaggcgatctgcccactttggcctcccttccaaagtgctaagattacaggcgtgagccactgagcccagcctgtactcattttttgaatcctgagtgccaagcccagtgctagacacactgtagattctcaataactgttgaacaaaacgaatcttcttcattgtaccccaagtcaa

SEQ ID NO: 31537 - DNA, 216 bp, Homo sapiens
ctctaccttgtcatgtcatggaagaggtacacattcaatggaagaattaggggacagaagtaaagccttgtatatattctgtcccctaattcttccattgaatgtgtacctctaccttgtcatgtcatggaagatacaacatttggaagatctgacaattggaatgactttggaataataaaattgactaattggaaattttgcatattctgaaaa

SEQ ID NO: 31538 - DNA, 3089 bp, Homo sapiens
  misc_feature (3)..(3): n is a, c, g, or t
  misc_feature (7)..(7): n is a, c, g, or t
ggnaganggcggggctcaggtgcctggcagcgcggccggggcccaggaaggggagggggcgaacgctggagcgaggcgggggcgggtgaggagggggtgacgccggacgcgtcgacagcgcgagggttcgcgcgtgagctgcgcgggtcgggcctggtaccgagctttcctgggggctagcaggtcgtggacgccggctcctggaggagagccggtaggagggaggtgaaggtgtccgcggcgtcgtcgacggcggcgccggccatggaggagacgcagccgccgccgcagcctaagctgcccctgtgcgacagcctcatgatctggctgcagacattcaatactgcctcaccttgtcaagatgtcaaacagctgactagtggagttgccatggcacaagttcttcatcaaattgatgcagcttggtttaacgaatcttggttaagccgaattaaagaggatgttggggacaactggagaataaaggccagtaatgtaaagaaggtccttcaaggaattatgagttattatcatgagtttttggggcagcagatttcagaagcacttatccctgatttaaaccaaataaccgaatgttcagatccagtggagcttgggaggttgctccagcttattttaggttgtgcgatcaactgtgaaaagaagcaagaacatattcaaaatataatgacactggaagagtctgttcaacatgtggtcatgactgctattcaagagttgatgagtaaagaaatattgagctctcctccaaatgatgctgttggagaattggagcaacagcttaaaagagccttggaagaacttcaggaagcactagcagaaaaagaagagctgaggcaaagatgtgaagaattggatatgcaggtgactacacttcaagatgaaaagaattcactggtttctgaaaatgagatgatgaatgaaaaacttgaccagttggatggctcttttgatgatccaaacacagtggttgcaaaaaagtattttcatgcacaattacaactagaacaattacaggaagaaaacttcaggcttgaagctgcaaaagatgattaccgtgttcactgtgaagaacttgaaaagcagctaatcgaattccagcataggaatgatgaattgactagtcttgcagaagaaacaagagccctgaaagatgaaatagatgttcttagggctacctctgataaagcaaataaactggagtcaacagttgagatatatcgtcagaagctacaagatctgaatgaccttcgcaagcaggtgaaaactttacaggaaaccaacatgatgtatatgcataatacagtcagcttagaagaagaattaaaaaaagcaaatgcagcacgtacacaattagaaacatacaaaaggcaggttcaagatcttcatgttaaactttcctccgaatccaagagggcagacacactagcgtttgaaatgaagcggcttgaagaaaaacatgaagctttacttaaggaaaaagagagactaattgagcagcgtgatactttgaaagaaacaaatgaagagcttcgatgttcacaagtacaacaggaccacctaaaccaaacagatgcatctgctacaaaaagttatgagaatcttgctgctgagattatgccagtggaatatagggaggtgtttattcgactgcaacatgaaaataagatgcttcgcttacagcaagaaggctctgagaatgaacgtattgaggaacttcaggagcagctagaacagaaacaccgtaaaatgaatgaactggaaactgagcagaggctgagcaaagagcgtattagagaattgcagcagcagattgaggacctccagaaatctttacaggaacaaggttccaagtctgaaggcgaaagttccagcaaattaaagcagaagttggaagctcatatggaaaaactcacagaggtccatgaagaattacagaagaaacaagaactcattgaagatcttcagccagatataaatcaaaatgtacaaaagatcaatgaacttgaagctgctcttcagaagaaagatgaagatatgaaagcaatggaggaaagatataaaatgtacttggagaaagccagaaatgtaataaaaactttggatcccaagttaaatccagcatcagctgaaataatgctactaagaaagcagttggcagagaaagagagaagaattgagattctggagagtgaatgcaaagtagcaaaattccgtgattatgaagaaaaactcattgtttctgcgtggtataataagagtctagcattccagaaactggggatggaatctagacttgtgagcggcggtggtgcctgcagtgacactggtgcgtgcactcctgcgcggtctttcttagcgcagcaacggcacatcaccaacaccagaagaaatctctctgttaaagtccctgctacaacatctgattaaactgcaaaaaaaacaaaacaaaacaaaaaaacccacataaaatagaagtgtccttaaaatattttgtacctttcaactaactaccagattgaaaaagagtttatgatgcgggatatcaggtattttaaaatcaacatgcatcaaattaattttgccagttgactttaaaaacaaattatagaattagccatctctctgagggagcacatttgaataattggagatgcagttatacacacatttcaaacaaacatttgtcttttgagagtattataatttcaaattggccttgtatattttagttaaatgttttcagttgtattagtaacttaattaattttcaatagctattcagtaatacttaatcttagaacattaattggatttgtttaatctttttttgttttttgttgatttatatgaacacagtcttgaggcagggacatggagaactatgcaagggtgatttctttgacttaatatatacaaggcctttacttctgtcccctaattcttccattgaatgtgtacctctaccttgtcatgtcatggaagatacaacatttggaagatctgacaattggaatgactttggaataataaaattgactaattggaaattttgcatattctgaaaa

SEQ ID NO: 31539 - DNA, 3587 bp, Homo sapiens
  misc_feature (3)..(3): n is a, c, g, or t
  misc_feature (7)..(7): n is a, c, g, or t
ggnaganggcggggctcaggtgcctggcagcgcggccggggcccaggaaggggagggggcgaacgctggagcgaggcgggggcgggtgaggagggggtgacgccggacgcgtcgacagcgcgagggttcgcgcgtgagctgcgcgggtcgggcctggtaccgagctttcctgggggctagcaggtcgtggacgccggctcctggaggagagccggtaggagggaggtgaaggtgtccgcggcgtcgtcgacggcggcgccggccatggaggagacgcagccgccgccgcagcctaagctgcccctgtgcgacagcctcatgatctggctgcagacattcaatactgcctcaccttgtcaagatgtcaaacagctgactagtggagttgccatggcacaagttcttcatcaaattgatgcagcttggtttaacgaatcttggttaagccgaattaaagaggatgttggggacaactggagaataaaggccagtaatgtaaagaaggtccttcaaggaattatgagttattatcatgagtttttggggcagcagatttcagaagcacttatccctgatttaaaccaaataaccgaatgttcagatccagtggagcttgggaggttgctccagcttattttaggttgtgcgatcaactgtgaaaagaagcaagaacatattcaaaatataatgacactggaagagtctgttcaacatgtggtcatgactgctattcaagagttgatgagtaaagaaatattgagctctcctccaaatgatgctgttggagaattggagcaacagcttaaaagagccttggaagaacttcaggaagcactagcagaaaaagaagagctgaggcaaagatgtgaagaattggatatgcaggtgactacacttcaagatgaaaagaattcactggtttctgaaaatgagatgatgaatgaaaaacttgaccagttggatggctcttttgatgatccaaacacagtggttgcaaaaaagtattttcatgcacaattacaactagaacaattacaggaagaaaacttcaggcttgaagctgcaaaagatgattaccgtgttcactgtgaagaacttgaaaagcagctaatcgaattccagcataggaatgatgaattgactagtcttgcagaagaaacaagagccctgaaagatgaaatagatgttcttagggctacctctgataaagcaaataaactggagtcaacagttgagatatatcgtcagaagctacaagatctgaatgaccttcgcaagcaggtgaaaactttacaggaaaccaacatgatgtatatgcataatacagtcagcttagaagaagaattaaaaaaagcaaatgcagcacgtacacaattagaaacatacaaaaggcaggttcaagatcttcatgttaaactttcctccgaatccaagagggcagacacactagcgtttgaaatgaagcggcttgaagaaaaacatgaagctttacttaaggaaaaagagagactaattgagcagcgtgatactttgaaagaaacaaatgaagagcttcgatgttcacaagtacaacaggaccacctaaaccaaacagatgcatctgctacaaaaagttatgagaatcttgctgctgagattatgccagtggaatatagggaggtgtttattcgactgcaacatgaaaataagatgcttcgcttacagcaagaaggctctgagaatgaacgtattgaggaacttcaggagcagctagaacagaaacaccgtaaaatgaatgaactggaaactgagcagaggctgagcaaagagcgtattagagaattgcagcagcagattgaggacctccagaaatctttacaggaacaaggttccaagtctgaaggcgaaagttccagcaaattaaagcagaagttggaagctcatatgtaagtaaaactgatatttcttttcaaatatgagaagggaggggttgtaaaagcctctaaagttaatctccttttcggattttgtctagaaaagcaaatatcctgatgctaattgatacacctgctgcaaaagtgaaaagcatgctaaagattcagcctccctactacccccgttccaaactcctacatctttccattgttaatatcatttgaaaagtttaaaaaaacagattaactatcacaactagattatatgggatgttaaacctataaaatattttactttcttaggaagcaagggtggcaagggaaataatttaacctttttggcacctgccgtgtgcctgactgtttacatcctcatgacaacccctggcagtcatgcagattagtattcccatttcacagatgaggaaccaagggtcagaaagcaacttgcccaaggtccacaaatgttatatggcagagaccagtctccatgctttttctaccacttagggaaaaactcacagaggtccatgaagaattacagaagaaacaagaactcattgaagatcttcagccagatataaatcaaaatgtacaaaagatcaatgaacttgaagctgctcttcagaagaaagatgaagatatgaaagcaatggaggaaagatataaaatgtacttggagaaagccagaaatgtaataaaaactttggatcccaagttaaatccagcatcagctgaaataatgctactaagaaagcagttggcagagaaagagagaagaattgagattctggagagtgaatgcaaagtagcaaaattccgtgattatgaagaaaaactcattgtttctgcgtggtataataagagtctagcattccagaaactggggatggaatctagacttgtgagcggcggtggtgcctgcagtgacactggtgcgtgcactcctgcgcggtctttcttagcgcagcaacggcacatcaccaacaccagaagaaatctctctgttaaagtccctgctacaacatctgattaaactgcaaaaaaaacaaaacaaaacaaaaaaacccacataaaatagaagtgtccttaaaatattttgtacctttcaactaactaccagattgaaaaagagtttatgatgcgggatatcaggtattttaaaatcaacatgcatcaaattaattttgccagttgactttaaaaacaaattatagaattagccatctctctgagggagcacatttgaataattggagatgcagttatacacacatttcaaacaaacatttgtcttttgagagtattataatttcaaattggccttgtatattttagttaaatgttttcagttgtattagtaacttaattaattttcaatagctattcagtaatacttaatcttagaacattaattggatttgtttaatctttttttgttttttgttgatttatatgaacacagtcttgaggcagggacatggagaactatgcaagggtgatttctttgacttaatatatacaaggcctttacttctgtcccctaattcttccattgaatgtgtacctctaccttgtcatgtcatggaagatacaacatttggaagatctgacaattggaatgactttggaataataaaattgactaattggaaattttgcatattctgaaaa

SEQ ID NO: 31540 - DNA, 3610 bp, Homo sapiens
  misc_feature (3)..(3): n is a, c, g, or t
  misc_feature (7)..(7): n is a, c, g, or t
ggnaganggcggggctcaggtgcctggcagcgcggccggggcccaggaaggggagggggcgaacgctggagcgaggcgggggcgggtgaggagggggtgacgccggacgcgtcgacagcgcgagggttcgcgcgtgagctgcgcgggtcgggcctggtaccgagctttcctgggggctagcaggtcgtggacgccggctcctggaggagagccggtaggagggaggtgaaggtgtccgcggcgtcgtcgacggcggcgccggccatggaggagacgcagccgccgccgcagcctaagctgcccctgtgcgacagcctcatgatctggctgcagacattcaatactgcctcaccttgtcaagatgtcaaacagctgactagtggagttgccatggcacaagttcttcatcaaattattttttttgttgttgtttcagtgatgcagcttggtttaacgaatcttggttaagccgaattaaagaggatgttggggacaactggagaataaaggccagtaatgtaaagaaggtccttcaaggaattatgagttattatcatgagtttttggggcagcagatttcagaagcacttatccctgatttaaaccaaataaccgaatgttcagatccagtggagcttgggaggttgctccagcttattttaggttgtgcgatcaactgtgaaaagaagcaagaacatattcaaaatataatgacactggaagagtctgttcaacatgtggtcatgactgctattcaagagttgatgagtaaagaaatattgagctctcctccaaatgatgctgttggagaattggagcaacagcttaaaagagccttggaagaacttcaggaagcactagcagaaaaagaagagctgaggcaaagatgtgaagaattggatatgcaggtgactacacttcaagatgaaaagaattcactggtttctgaaaatgagatgatgaatgaaaaacttgaccagttggatggctcttttgatgatccaaacacagtggttgcaaaaaagtattttcatgcacaattacaactagaacaattacaggaagaaaacttcaggcttgaagctgcaaaagatgattaccgtgttcactgtgaagaacttgaaaagcagctaatcgaattccagcataggaatgatgaattgactagtcttgcagaagaaacaagagccctgaaagatgaaatagatgttcttagggctacctctgataaagcaaataaactggagtcaacagttgagatatatcgtcagaagctacaagatctgaatgaccttcgcaagcaggtgaaaactttacaggaaaccaacatgatgtatatgcataatacagtcagcttagaagaagaattaaaaaaagcaaatgcagcacgtacacaattagaaacatacaaaaggcaggttcaagatcttcatgttaaactttcctccgaatccaagagggcagacacactagcgtttgaaatgaagcggcttgaagaaaaacatgaagctttacttaaggaaaaagagagactaattgagcagcgtgatactttgaaagaaacaaatgaagagcttcgatgttcacaagtacaacaggaccacctaaaccaaacagatgcatctgctacaaaaagttatgagaatcttgctgctgagattatgccagtggaatatagggaggtgtttattcgactgcaacatgaaaataagatgcttcgcttacagcaagaaggctctgagaatgaacgtattgaggaacttcaggagcagctagaacagaaacaccgtaaaatgaatgaactggaaactgagcagaggctgagcaaagagcgtattagagaattgcagcagcagattgaggacctccagaaatctttacaggaacaaggttccaagtctgaaggcgaaagttccagcaaattaaagcagaagttggaagctcatatgtaagtaaaactgatatttcttttcaaatatgagaagggaggggttgtaaaagcctctaaagttaatctccttttcggattttgtctagaaaagcaaatatcctgatgctaattgatacacctgctgcaaaagtgaaaagcatgctaaagattcagcctccctactacccccgttccaaactcctacatctttccattgttaatatcatttgaaaagtttaaaaaaacagattaactatcacaactagattatatgggatgttaaacctataaaatattttactttcttaggaagcaagggtggcaagggaaataatttaacctttttggcacctgccgtgtgcctgactgtttacatcctcatgacaacccctggcagtcatgcagattagtattcccatttcacagatgaggaaccaagggtcagaaagcaacttgcccaaggtccacaaatgttatatggcagagaccagtctccatgctttttctaccacttagggaaaaactcacagaggtccatgaagaattacagaagaaacaagaactcattgaagatcttcagccagatataaatcaaaatgtacaaaagatcaatgaacttgaagctgctcttcagaagaaagatgaagatatgaaagcaatggaggaaagatataaaatgtacttggagaaagccagaaatgtaataaaaactttggatcccaagttaaatccagcatcagctgaaataatgctactaagaaagcagttggcagagaaagagagaagaattgagattctggagagtgaatgcaaagtagcaaaattccgtgattatgaagaaaaactcattgtttctgcgtggtataataagagtctagcattccagaaactggggatggaatctagacttgtgagcggcggtggtgcctgcagtgacactggtgcgtgcactcctgcgcggtctttcttagcgcagcaacggcacatcaccaacaccagaagaaatctctctgttaaagtccctgctacaacatctgattaaactgcaaaaaaaacaaaacaaaacaaaaaaacccacataaaatagaagtgtccttaaaatattttgtacctttcaactaactaccagattgaaaaagagtttatgatgcgggatatcaggtattttaaaatcaacatgcatcaaattaattttgccagttgactttaaaaacaaattatagaattagccatctctctgagggagcacatttgaataattggagatgcagttatacacacatttcaaacaaacatttgtcttttgagagtattataatttcaaattggccttgtatattttagttaaatgttttcagttgtattagtaacttaattaattttcaatagctattcagtaatacttaatcttagaacattaattggatttgtttaatctttttttgttttttgttgatttatatgaacacagtcttgaggcagggacatggagaactatgcaagggtgatttctttgacttaatatatacaaggcctttacttctgtcccctaattcttccattgaatgtgtacctctaccttgtcatgtcatggaagatacaacatttggaagatctgacaattggaatgactttggaataataaaattgactaattggaaattttgcatattctgaaaa

SEQ ID NO: 31541 - DNA, 2165 bp, Homo sapiens
  misc_feature (3)..(3): n is a, c, g, or t
  misc_feature (7)..(7): n is a, c, g, or t
ggnaganggcggggctcaggtgcctggcagcgcggccggggcccaggaaggggagggggcgaacgctggagcgaggcgggggcgggtgaggagggggtgacgccggacgcgtcgacagcgcgagggttcgcgcgtgagctgcgcgggtcgggcctggtaccgagctttcctgggggctagcaggtcgtggacgccggctcctggaggagagccggtaggagggaggtgaaggtgtccgcggcgtcgtcgacggcggcgccggccatggaggagacgcagccgccgccgcagcctaagctgcccctgtgcgacagcctcatgatctggctgcagacattcaatactgcctcaccttgtcaagatgtcaaacagctgactagtggagttgccatggcacaagttcttcatcaaattgatgcagcttggtttaacgaatcttggttaagccgaattaaagaggatgttggggacaactggagaataaaggccagtaatgtaaagaaggtccttcaaggaattatgagttattatcatgagtttttggggcagcagatttcagaagcacttatccctgatttaaaccaaataaccgaatgttcagatccagtggagcttgggaggttgctccagcttattttaggttgtgcgatcaactgtgaaaagaagcaagaacatattcaaaatataatgacactggaagagtctgttcaacatgtggtcatgactgctattcaagagttgatgagtaaagaaatattgagctctcctccaaatgatgctgttggagaattggagcaacagcttaaaagagccttggaagaacttcaggaagcactagcagaaaaagaagagctgaggcaaagatgtgaagaattggatatgcaggtgactacacttcaagatgaaaagaattcactggtttctgaaaatgagatgatgaatgaaaaacttgaccagttggatggctcttttgatgatccaaacacagtggttgcaaaaaagtattttcatgcacaattacaactagaacaattacaggaagaaaacttcaggcttgaagctgcaaaagatgattaccgtgttcactgtgaagaacttgaaaagcagctaatcgaattccagcataggaatgatgaattgactagtcttgcagaagaaacaagagccctgaaagatgaaatagatgttcttagggctacctctgataaagcaaataaactggagtcaacagttgagatatatcgtcagaagctacaagatctgaatgaccttcgcaagcaggtgaaaactttacaggaaaccaacatgatgtatatgcataatacagtcagcttagaagaagaattaaaaaaagcaaatgcagcacgtacacaattagaaacatacaaaaggcaggttcaagatcttcatgttaaactttcctccgaatccaagagggcagacacactagcgtttgaaatgaagcggcttgaagaaaaacatgaagctttacttaaggaaaaagagagactaattgagcagcgtgatactttgaaagaaacaaatgaagagcttcgatgttcacaagtacaacaggaccacctaaaccaaacagatgcatctgctacaaaaagttatgagaatcttgctgctgagattatgccagtggaatatagggaggtgtttattcgactgcaacatgaaaataagatgcttcgcttacagcaagaaggctctgagaatgaacgtattgaggaacttcaggagcagctagaacagaaacaccgtaaaatgaatgaactggaaactgagcagaggtgatatgctccttagtaactgaaaatcttggtgattttattaccgagccataaaatcttgattcacagaaatggaaaatattattgtagctaaagtaattagaattacctagaaatagtttaatatttttgttagtagtctttcatcactataagcttctctctgtgaaagaagtcaggtgattcatttcagttatatttataaaatatatggataatccattaatttcagcattcttggttaaccaggctacttattctttttattctttttgagacagggtctccctctgtcgccactgcactccagcatgggaatcggggggtgaaaccctgtcaaaaaaacaaaacaaaacaaacaaacaaaca

SEQ ID NO: 31542 - DNA, 1943 bp, Homo sapiens
  misc_feature (3)..(3): n is a, c, g, or t
  misc_feature (7)..(7): n is a, c, g, or t
ggnaganggcggggctcaggtgcctggcagcgcggccggggcccaggaaggggagggggcgaacgctggagcgaggcgggggcgggtgaggagggggtgacgccggacgcgtcgacagcgcgagggttcgcgcgtgagctgcgcgggtcgggcctggtaccgagctttcctgggggctagcaggtcgtggacgccggctcctggaggagagccggtaggagggaggtgaaggtgtccgcggcgtcgtcgacggcggcgccggccatggaggagacgcagccgccgccgcagcctaagctgcccctgtgcgacagcctcatgatctggctgcagacattcaatactgcctcaccttgtcaagatgtcaaacagctgactagtggagttgccatggcacaagttcttcatcaaattgatgcagcttggtttaacgaatcttggttaagccgaattaaagaggatgttggggacaactggagaataaaggccagtaatgtaaagaaggtccttcaaggaattatgagttattatcatgagtttttggggcagcagatttcagaagcacttatccctgatttaaaccaaataaccgaatgttcagatccagtggagcttgggaggttgctccagcttattttaggttgtgcgatcaactgtgaaaagaagcaagaacatattcaaaatataatgacactggaagagtctgttcaacatgtggtcatgactgctattcaagagttgatgagtaaagaaatattgagctctcctccaaatgatgctgttggagaattggagcaacagcttaaaagagccttggaagaacttcaggaagcactagcagaaaaagaagagctgaggcaaagatgtgaagaattggatatgcaggtgactacacttcaagatgaaaagaattcactggtttctgaaaatgagatgatgaatgaaaaacttgaccagttggatggctcttttgatgatccaaacacagtggttgcaaaaaagtattttcatgcacaattacaactagaacaattacaggaagaaaacttcaggcttgaagctgcaaaagatgattaccgtgttcactgtgaagaacttgaaaagcagctaatcgaattccagcataggaatgatgaattgactagtcttgcagaagaaacaagagccctgaaagatgaaatagatgttcttagggctacctctgataaagcaaataaactggagtcaacagttgagatatatcgtcagaagctacaagatctgaatgaccttcgcaagcaggtgaaaactttacaggaaaccaacatgatgtatatgcataatacagtcagcttagaagaagaattaaaaaaagcaaatgcagcacgtacacaattagaaacatacaaaaggcaggttcaagatcttcatgttaaactttcctccgaatccaagagggcagacacactagcgtttgaaatgaagcggcttgaagaaaaacatgaagctttacttaaggaaaaagagagactaattgagcagcgtgatactttgaaagaaacaaatgaagagcttcgatgttcacaagtacaacaggaccacctaaaccaaacagatgcatctgctacaaaaagttatgagaatcttgctgctgagattatgccagtggaatatagggaggtgtttattcgactgcaacatgaaaataagatgcttcgcttacagcaagaaggctctgagaatgaacgtattgaggaacttcaggagcagctagaacagaaacaccgtaaaatgaatgaactggaaactgagcagaggctgagcaaagagcgtattagagaattgcagcagcagattgaggacctccagaaatctttacaggaacaaggttccaagtctgaaggcgaaagtaaatcgtctcatgcatggcggcatctcatatgtgcatatatacggtattgtaa

SEQ ID NO: 31543 - DNA, 1043 bp, Homo sapiens
gggcatgcatttgtgcttgattcagttaacatttgactacattgtgtgcctcacaagtgcaatctttagattctctcaataatgaacatagtgaagaaattattctatctttagtaatttggggtaatttctgggattttaattgttctcatatcttttttccagagtgaatgcaaagtagcaaaattccgtgattatgaagaaaaactcattgtttctgcgtggtataataagagtctagcattccagaaactggggatggaatctagacttgtgagcggcggtggtgcctgcagtgacactggtgcgtgcactcctgcgcggtctttcttagcgcagcaacggcacatcaccaacaccagaagaaatctctctgttaaagtccctgctacaacatctgattaaactgcaaaaaaaacaaaacaaaacaaaaaaacccacataaaatagaagtgtccttaaaatattttgtacctttcaactaactaccagattgaaaaagagtttatgatgcgggatatcaggtattttaaaatcaacatgcatcaaattaattttgccagttgactttaaaaacaaattatagaattagccatctctctgagggagcacatttgaataattggagatgcagttatacacacatttcaaacaaacatttgtcttttgagagtattataatttcaaattggccttgtatattttagttaaatgttttcagttgtattagtaacttaattaattttcaatagctattcagtaatacttaatcttagaacattaattggatttgtttaatctttttttgttttttgttgatttatatgaacacagtcttgaggcagggacatggagaactatgcaagggtgatttctttgacttaatatatacaaggcctttacttctgtcccctaattcttccattgaatgtgtacctctaccttgtcatgtcatggaagatacaacatttggaagatctgacaattggaatgactttggaataataaaattgactaattggaaattttgcatattctgaaaa

SEQ ID NO: 31544 - DNA, 138 bp, Homo sapiens
gttaaactttcctccgaatccaagagggcagacacactagcgtttgaaatgaagcggcttgaagaaaaacatgaagctttacttaaggaaaaagaggtaaacatagatataattgataaggaatatttcattgttctt

SEQ ID NO: 31545 - DNA, 323 bp, Homo sapiens
ctgttctctctgttgccttgtctacaccccataaattggcatggctcactcccttgctgtctacaggtacttgcacaaacttcaccttctcaatgaagtcttccctgactataatctatcatcttcatggattaatttttctccataaacacctccctgttgagtttttccacttagttcttattatttttcctaccccactaaaatacaaagttgaccaggtgcaatagctcacacctggaacctcaacactttgggggctcaaagtgggaggagtttgagaccaccctgggcagcatagtgagactctatctctaaaaaaa

SEQ ID NO: 31546 - DNA, 299 bp, Homo sapiens
tttattttgacctgggtatcagatactgtgctaagaactttagagtcagtatgttatttgattcttattaaaactcaataatgtagatatttgctcattttacagaagaggaaactaaatttagttaactgacttgcgcaaaggcacataggaagtggcactttaaaactttccaactcaggctgggcatggtgactcacacctgtaatcccagcactttgggtgggcaaggcaggcagatcacttgaggtcaggagttcgagacgagccttgccaacatagtgaaacacgatgtctgc

SEQ ID NO: 31547 - DNA, 191 bp, Homo sapiens
taaatgaaaacaagaaaaagttaaaaattgggggaacaaagttaaggtatagagtttctattagttgtctttttgcttctttgttcatccaaatagcatcattatcatcttaaaataatagattataaggtcatatatgctaagtctcaggttgatgacaaatgccaaaatttacaagggatacacaaaac

SEQ ID NO: 31548 - DNA, 440 bp, Homo sapiens
cataaaaaaattaaaggccacatgcagtgactcactcctgtaattccattactttgggaggctgaggtgggaggattgcttgagcctaggggtttgagaccagcctgagcaacatggcaagaccctgactctacaaacagtgaaacaattaacctggcctgggtgcagtggctcacgcgttaatcctaacattttgcaagggctacctaggtgggccgatgacttgagcctaggactttgagaccagcctgggcaacatggtgagaccccatctctacaaaaaatacagaagttaactgggtgagttgtgagcagctgtagtcccagctactcaggaggctgaggtgggaagatcacctgaacctgggaaggtttgaggctgcagtgagccatgattgaaccattgcactgcagcttgggtgacagactgagactctgta

SEQ ID NO: 31549 - DNA, 222 bp, Homo sapiens
gagaaaagaaataatacaaattagtcaccctagcctacatagcaagaccccgtctctacaaaaaataaaaaaaacttacccaggtgtggtggtacatgcttgtaaatcctagcttctcagtctccggagtagcttattaaccaatacacttctgaataatacataggccaaagaaaaacactcaaaaccagcctagggaaacatagtgataccccatttcta

SEQ ID NO: 31550 - DNA, 304 bp, Homo sapiens
cacagatgtttaaagcagctttatttataatggcccaaactgggaagaaaccaagatgtcttcagtggattacaggataaactatggtacatccacacaatagactattactcacctctagaaagaaaaaaaaaacaggccaggcatggtggctcacacctgtaatctcagcgttttggaaagcctaggcaagaggatcacttgaggcccggagttctagaccagcctgagcaaaatagcgaaacccaccccactgccccccttcatgtctaccaaaaaaataaaattgtttttagggtttttt

SEQ ID NO: 31551 - DNA, 400 bp, Homo sapiens
tttttgttaagacaagatctcctttgtcacccaagctggagtgtagtggcgcgatcatggctcattgcagcctcggtctcccaggctcaagcaatccttccacctcagcctccagactagctggaactacaggcacatatcaccaagcctggctaattttttaattaagacagggtctactatgtggcccaggctggtcttgaactcctggactcaagcaattctcccactctggcctcccaaagtgataggattacaggcatgagccaccacgcccagcctggctcacctctcttaactataaccataccaaatgaagaatgaataggaaggcgctatctccactttttgttcatttgtttcttttctcatatcctctgcagatgacgaagggagcaca

SEQ ID NO: 31552 - DNA, 478 bp, Homo sapiens
ggggattgtaactttgcatttctcccccaaccatcacctccactctctccccctccacccctcacctcccaaagcccctagccctcctcccctccctggcactggcccctgctccccacctaggccccctcagagaccagcctcagccaaaccagagaacgtgacccaactgtagaaataacagtgatggccgggcgcagtggctcatgcctgtaatcccagcactttgggaggccaaagcaggaggatcgcttgagcccaggagtttgagaccagcctgggcaacatagcaagaacccccttctctataaaaaattagccaggcattgtggcgcatgcctgtagtcccagctacttgggaggctgaggcagaaggattgcttgagcccaggaggtggaggctgcagtgagctatgatcacaccactgcactccaacccaggcgacagagagagaccctgtctctttaaaaaaaaaaa

SEQ ID NO: 31553 - DNA, 528 bp, Homo sapiens
ttcctgagtatcttctaacacctaacatgcataacataacataaagtttcaaaccaactttataatgtgccattcatctgaccctgccactattattaataacaggattgcattatatttcaaaatcttgggatttaagagctaaaaataaaaaagaccttacatatgctgtagggatggaaggaagactggtgttagatgggctatgggactaagactccctcccagagtttagagttagtatattcagctctcaacttcacatgtaagaaacctgagtctaggggggttaagtacctagacaaggtgatatgactttggatctggctcttcagttccacaaatatttcctgaccacctggcatatgtgaggcattcaagttcattttggtgaatgagaaaggatctgtgtgcttgggacatttccagtcaggaagagctagaggcctattcttcccgtgttaatataatcagtaggtgggatgatagaagagaataaaggaaaacaagaaatgctgccttgaggat

SEQ ID NO: 31554 - DNA, 334 bp, Homo sapiens
attttgctttgttgctgataaggagttttgcaggaagtgggaagagggtgaataactcaccaatccaaatatgaaataccattctcctgactcagaatcttccagatctgacactgcatcaaaacaaaatgtggcaaggcatgatggctcatgcctataatacgaacgcttttgagaggaggcggcaagaggcgtggtggggtaggtctgtagtcccagctactcaggaggctgaggcaagaagaccacttgagcccaggagttcaaggctgcaggaactgtgatcatgccaccacactccagcctgggagacagagtaagaccgtttctcaaa

SEQ ID NO: 31555 - DNA, 1005 bp, Homo sapiens
atgaatgaagacctgaaggtcaatttaagcgggctgcctcgggattatttagatgccgctgctgcggagaacatctcggctgctgtctcctcccgggttcctgccgtagagccagagcctgagctcgtagtcaacccctgggacattgtcttgtgtacctcgggaaccctcatctcctgtgaaaatgccattgtggtccttatcatcttccacaaccccagcctgcgagcacccatgttcctgctaataggcagcctggctcttgcagacctgctggccggcattggactcatcaccaattttgtttttgcctacctgcttcagtcagaagccaccaagctggtcacgatcggcctcattgtcgcctctttctctgcctctgtctgcagcttgctggctatcactgttgaccgctacctctcactgtactacgctctgacgtaccattcggagaggacggtcacgtttacctatgtcatgctcgtcatgctctgggggacctccatctgcctggggctgctgcccgtcatgggctggaactgcctccgagacgagtccacctgcagcgtggtcagaccgctcaccaagaacaacgcggccatcctctcggtgtccttcctcttcatgtttgcgctcatgcttcagctctacatccagatctgtaagattgtgatgaggcacgcccatcagatagccctgcagcaccacttcctggccacgtcgcactatgtgaccacccggaaaggggtctccaccctggctatcatcctggggacgtttgctgcttgctggatgcctttcaccctctattccttgatagcggattacacctacccctccatctatacctacgccaccctcctgcccgccacctacaattccatcatcaaccctgtcatatatgctttcagaaaccaagagatccagaaagcgctctgtctcatttgctgcggctgcatcccgtccagtctcgcccagagagcgcgctcgcccagtgatgtgtag

SEQ ID NO: 31556 - DNA, 344 bp, Homo sapiens
ctgaagtctgagctcatgaatttcaagtgcgaactctcagttgggttgtgcaattttcatcagtgatgttagcttagtgtaatgtgcagagaaggcaaatggggacgcttatctaggggtgaggttgtggcaagtgagtatgaaggatagagaataaggaaaaggagtcaagggtgggcaagacccattgagaataggttgaggctgtgggtttcctacattttcaaagtttgaaaagaagctgaaaagtctcagtctggtcctgatgaatgacatactttcacttgaaaactttggtttctcaatcctaaccaaagtgacccccccaaatgcaattgttgaga

SEQ ID NO: 31557 - DNA, 340 bp, Homo sapiens
caaataagaaagtggttgggtgctattgtaggtgctttgcaattatcaccttgctgatctcatccacttttattgtgtctcacttgagtgggagggaaagataggagaaaaaggagactaatgagaattattaatatatttacaagtgtatctactacatattaaagagctaaggtttagatgacatactgtatatttctaaatgactatttctgtttagaaattacattatttcatgactgggcagcattaaataaattatatggttctcaattcaaatcgtgggcaaaagggtttacttgtgcatgctgctgctttgtatctcaagtaacgtgattga

SEQ ID NO: 31558 - DNA, 630 bp, Homo sapiens
cctacacatggatatttattttgtcagagcagaagaaccacacaaaatcctgcacatggatatttgtcagagcataagaacttgagcacatggctatttatagcagctttattcataattgcaccaaacaagaagcaaccaagatgtctttcagtaggtaaatggatttttaaaaaaggtacattcatataatgaaatattatacagtgattaaaaagaaatgagtaatgaatctaggaaaacacacggaggaaccctacatgcatctgctgtgtgaaagaagccagtttgaaaaggctgcatattgtgtgattccaactacatgacattttggaaaaggctgaaactatagtgacagtcaaaagtccaggggtccagaggagagagaagggatgaacagctagaacacatggggttttcagggcagttaaattcttctgtgtgacactatataatggtggttaaattatgcatttgtcaaaactcaacaatgtacagcacaaagagtgaaccctaatgtaaactgtggatgttaataataatgtatccatatgaaacaattgctgatccttaaaaatgtaccacattttagctgttacttttccaagcacagctatatttaaaaaaaaa

SEQ ID NO: 31559 - DNA, 2007 bp, Homo sapiens
aattttcgtttcagtcgaatttgggctgataccttcttgaggcaaatgtctgaaattggttaagttatgttactgatgatttatactgattgtctctgctttattaaaatagctgtacttgggttaatatcttcttgtggcaaatatctataattggttatgaagctaataaccgatgaccttttccactgtttctgcttctgctttattaaaaccctcacatatttgctttatttccatttctttcttggcctgggagaaagggatttcttgctaatgatctgtggtgcagcgttgtgccgccagtacttacttgtattatgacactgctggcaatggctgctcttagactcttgagtgtttggggccaattttcaaaaggtcctaatcaagaacacaaaattcctgcatgtgatttgaattaggttcaaaatggtcaaatacaagttcagtctgaaaatgcacacgcctgtaagagtgtatcttaattgtactcaaagttagctccttactcctcaggaagtggaaacccctgaatgaaactgactttgtgtgtgaatttctcactttctgaatccagttcagtgtgtccagagaggcatgtgcttacaacatagatagtttttttcagatgtagttgtatttgttaagatttttttggttgtaaatgatagaaaccaactctaatttgagcaaaagccagcatttattggctcataactgggaattctaaagggtcaagttggagtcaggtataactatatgtacagggactataatcaatcatgtcatcaatcacttctcaatttttctctgtctcacagttttgaattcattctcaaggcatggccaccggcagttcaaggcgtacctcagccttacagttataatcttccatagctccagcaaaagtcccaggggagacctgattaacccacttgggtcacagagccttgtcagaaccagtcattgtggccaggagcatggagtgctctgattggtcaatctgggtcacatgcccacccttgttgagggtaaggaaggaggtttaggaattatcttaccacatggaattggttacctataagaatgaggagttctgatgtcgagagaaagaacaacagaggatgtgaagccactgaaagcttgactcagggaaaagaaatgtgggaccatcacacacatgaaaatggctataatcctcactgtattttcttgttcttcttgaaaaatataggatttgattccacagttcttcttgactttttgatttcatcagaaacctgttttcttgaatattttgttagatatttaaaattactgcaaaaggactgggataattttttcaccatttgcaataactttgatgcaactgaatctaaatatgacataagtatttgtggctgtgtcccctcacttgtccaaggaccaaagctccaaccaaacaataccccatcgtttgactgctcctcatagtcacagagatgtgtgtgctcggcactcctgggcttccgatgctccctctgaaccactgaaagctgtgatgtccaagggggctcacaccatgtgtgcttctagtctgtcttccccccgggcctctcaaagtctggtagattacgacagctctgacgattctgacgtggaatccacagagcagtgtttagctaacagtaaacagacatctttacaccagcaagcaactaaggagattcaggatgcagctgggacaagcagggataaaaaagaatttagccttgagcctccatcaaggcctctggttctgaaagaatttgatactgccttctcctttgattgtgaagtagccccaaatgatgtcgtctctgaagtgggaatattttacagaatagtaaaatgcttccaggaactacaagatgccatctgccgtttgcaaaagaaaaatcttttcccatataatccaactgcacttttgaagttgttaaaatacatagaggtgataagtaataaaactatgaacactttgtaaaa

SEQ ID NO: 31560 - DNA, 3689 bp, Homo sapiens
cggtggcccagagcgggcatttgtgttccctcaaatggcggtgtgaagagagttcgcctgagccagatcccaggtttcactgaagaaacttcttagagattcattgcacttctgagatttaatgtttacaacttggagttgtcgaccttcttataagatacattttggaagtcaaaatgaaagttttctgtgaagttttagaagagttatacaagaaggtacttcttggagccacacttgaaaatgacagccatgattacatcttttatctcaacccagcagtttcagatcaagattgttctacagccacctccttagaatgggcaaacacctgtggtatccagggcaggcatcagcccatctctgttggtgtggctcccattgctgtagcacctgtgtgtttgaagaccaactctcagatgagcggttccagagaagtaatgctccttcagttaacagtgatcaaagtgatgacaacccggatattgtctgtcaaaaccgagttccatgcaaaggagcagtacagagatgtaattaaaattctcttagaatcagccaaagtcgattctaaattaatctgcatgttccaaaattcagataaattgttatctcacatggctgcacagtgccttgcattgcttctatatttccaattgagagaaaagataaccttaagtaattcctggattgctttttgccagaaaaatctttctgaatactctgagagtaataaagcaatatactgcctctggactcttacagcaataataaaagaaatctttaaagattcatgttcacagaaaacagaaattctaaagcagttcctgactcatttcgacaccatttttgaagtgttttacaattccttattctctcagcattttgaaaactgccgggatacttctaaaatagtaaacatcctgatgtgtttcctggatttgcttgagcttctcatcgcctccagaatccacctgaagttacatttcacttgccagaggattttatttttgaaaccatcttgcatgctagaagttattacctggcctattcaggcttttgttaaaaggaaggtcatcatattcctcaaaaagtgccttctctgtaaagtgggtgaagacctctgtcgtggatctgtgcctgccttaatgccgccagaccatcatgtagcggtggacatgctggctttagctaatgctgttttgcaagctgtgaattcggggttgttgaagacactgtctgtttatgaaaaacattccttttttggaggtgatgaagttcaacctgaatgtgaacttatcactagtccagatcatgtgatccttagagcagcaagcttagttataatgaaatccttagaaatcaagtttcaaaattattcttcagcaagtgaaatgaaaggtgcgtgaccatggcccactgcagccctgaccccccttcggcccatgctattcctcctgtcccaacctgggaggtcctggcctgggagatcaaggctacagtgagccgcgacccatcgcacacctgcactccagtcctggtgcaacagatggagatcctttcagggagagagagagagagagaggagaagacagagagattaaagaaaaatatgttcactcccacttatgtgtttattgttattattgtttgttgttatttctttgttattgttgtgtttactgtttatttattttgaggcagggtcttgctctgtctcccaggctcactgcagcctcaacgttttgagctgaagtgatcctctcgcctctgcttccccaccccatttgtattaatccttcatacaattagtgtttctactaatgtagattattgaaaattagatattgaattaaagctaatatatgagaagttatattgacaaagaaattgttacatatataatttccagaatagtaactcaggagttcaaagtcttccattttacttgagaaaaatgaatagtaaatgtctctaaacaggcagcatacagattcagtgaaaagtttgaattgtgagcaatgacatcactgaattgctttggatataatttagcttttaataactacacattagttataattctgtgcagttttaatttataacactagatggcacctgttatataattcagttttaaattgtagttcaaactacctaaaacgtttttttatttttgtgcttaataatagtacttctatgctttaaacaaacaaaaaatatgtttttctgttattttgaagacaaaattatttttgcttggttgcattcttggacagacagctctggcatccgatgaagtgatcttagttgtctgctcatttatttatctgcttttagcaagaaatcacataacttttatttctaagagacagttgttaggcagttgttgcaaatagatgatgtagctgtacattttaaatgtatgctctggaatgagtcactttttttccctgagcctcagtgtcctcatttgccaaataaagatgcttcctaactgattcctgatgactttttgaaagtgaattaggataattgcatcttaaggtactttagacactatgaatttatatataggcaagatattcattcattcataaactattgcctacactttgaaattttcattttttgaagttgacttacagaggttcatgtctgagttactgaccttcttaaagcctcatcttcagccctctctgcaattacacaatccgtgcaaatggctgtctcgggttttcatagaacaagacgatgacatgctggaggctgccaaggcatcactgggcatctacttaacactgaccagaggatgtgaagccactgaaagcttgactcagggaaaagaaatgtgggaccatcacacacatgaaaatggctataatcctcactgtattttcttgttcttcttgaaaaatataggatttgattccacagttcttcttgactttttgatttcatcagaaacctgttttcttgaatattttgttagatatttaaaattactgcaaaaggactgggataattttttcaccatttgcaataactttgatgcaactgaatctaaatatgacataagtatttgtggctgtgtcccctcacttgtccaaggaccaaagctccaaccaaacaataccccatcgtttgactgctcctcatagtcacagagatgtgtgtgctcggcactcctgggcttccgatgctccctctgaaccactgaaagctgtgatgtccaagggggctcacaccatgtgtgcttctagtctgtcttccccccgggcctctcaaagtctggtagattacgacagctctgacgattctgacgtggaatccacagagcagtgtttagctaacagtaaacagacatctttacaccagcaagcaactaaggagattcaggatgcagctgggacaagcagggataaaaaagaatttagccttgagcctccatcaaggcctctggttctgaaagaatttgatactgccttctcctttgattgtgaagtagccccaaatgatgtcgtctctgaagtgggaatattttacagaatagtaaaatgcttccaggaactacaagatgccatctgccgtttgcaaaagaaaaatcttttcccatataatccaactgcacttttgaagttgttaaaatacatagaggtgataagtaataaaactatgaacactttgtaaaa

SEQ ID NO: 31561 - DNA, 3892 bp, Homo sapiens
cggtggcccagagcgggcatttgtgttccctcaaatggcggtgtgaagagagttcgcctgagccagatcccaggtttcactgaagaaacttcttagagattcattgcacttctgagatttaatgtttacaacttggagttgtcgaccttcttataagatacattttggaagtcaaaatgaaagttttctgtgaagttttagaagagttatacaagaaggtacttcttggagccacacttgaaaatgacagccatgattacatcttttatctcaacccagcagtttcagatcaagattgttctacagccacctccttagaatgggcaaacacctgtggtatccagggcaggcatcagcccatctctgttggtgtggctcccattgctgtagcacctgtgtgtttgaagaccaactctcagatgagcggttccagagaagtaatgctccttcagttaacagtgatcaaagtgatgacaacccggatattgtctgtcaaaaccgagttccatgcaaaggagcagtacagagatgtaattaaaattctcttagaatcagccaaagtcgattctaaattaatctgcatgttccaaaattcagataaattgttatctcacatggctgcacagtgccttgcattgcttctatatttccaattgagagaaaagataaccttaagtaattcctggattgctttttgccagaaaaatctttctgaatactctgagagtaataaagcaatatactgcctctggactcttacagcaataataaaagaaatctttaaagattcatgttcacagaaaacagaaattctaaagcagttcctgactcatttcgacaccatttttgaagtgttttacaattccttattctctcagcattttgaaaactgccgggatacttctaaaatagtaaacatcctgatgtgtttcctggatttgcttgagcttctcatcgcctccagaatccacctgaagttacatttcacttgccagaggattttatttttgaaaccatcttgcatgctagaagttattacctggcctattcaggcttttgttaaaaggaaggtcatcatattcctcaaaaagtgccttctctgtaaagtgggtgaagacctctgtcgtggatctgtgcctgccttaatgccgccagaccatcatgtagcggtggacatgctggctttagctaatgctgttttgcaagctgtgaattcggggttgttgaagacactgtctgtttatgaaaaacattccttttttggaggtgatgaagttcaacctgaatgtgaacttatcactagtccagatcatgtgatccttagagcagcaagcttagttataatgaaatccttagaaatcaagtttcaaaattattcttcagcaagtgaaatgaaaggtgcgtgaccatggcccactgcagccctgaccccccttcggcccatgctattcctcctgtcccaacctgggaggtcctggcctgggagatcaaggctacagtgagccgcgacccatcgcacacctgcactccagtcctggtgcaacagatggagatcctttcagggagagagagagagagagaggagaagacagagagattaaagaaaaatatgttcactcccacttatgtgtttattgttattattgtttgttgttatttctttgttattgttgtgtttactgtttatttattttgaggcagggtcttgctctgtctcccaggctcactgcagcctcaacgttttgagctgaagtgatcctctcgcctctgcttccccaccccatttgtattaatccttcatacaattagtgtttctactaatgtagattattgaaaattagatattgaattaaagctaatatatgagaagttatattgacaaagaaattgttacatatataatttccagaatagtaactcaggagttcaaagtcttccattttacttgagaaaaatgaatagtaaatgtctctaaacaggcagcatacagattcagtgaaaagtttgaattgtgagcaatgacatcactgaattgctttggatataatttagcttttaataactacacattagttataattctgtgcagttttaatttataacactagatggcacctgttatataattcagttttaaattgtagttcaaactacctaaaacgtttttttatttttgtgcttaataatagtacttctatgctttaaacaaacaaaaaatatgtttttctgttattttgaagacaaaattatttttgcttggttgcattcttggacagacagctctggcatccgatgaagtgatcttagttgtctgctcatttatttatctgcttttagcaagaaatcacataacttttatttctaagagacagttgttaggcagttgttgcaaatagatgatgtagctgtacattttaaatgtatgctctggaatgagtcactttttttccctgagcctcagtgtcctcatttgccaaataaagatgcttcctaactgattcctgatgactttttgaaagtgaattaggataattgcatcttaaggtactttagacactatgaatttatatataggcaagatattcattcattcataaactattgcctacactttgaaattttcattttttgaagttgacttacagaggttcatgtctgagttactgaccttcttaaagcctcatcttcagccctctctgcaattacacaatccgtgcaaatggctgtctcgggttttcatagaacaagacgatgacatgctggaggctgccaaggcatcactgggcatctacttaacactgaccagaggatgtgaagccactgaaagcttgactcagggaaaagaaatgtgggaccatcacacacatgaaaatggctataatcctcactgtattttcttgttcttcttgaaaaatataggatttgattccacagttcttcttgactttttgatttcatcagaaacctgttttcttgaatattttgttagatatttaaaattactgcaaaaggactgggataattttttcaccatttgcaataactttgatgcaactgaatctaaatatgacataagtatttgtggctgtgtcccctcacttgtccaaggaccaaagctccaaccaaacaataccccatcgtttgactgctcctcatagtcacagagatgtgtgtgctcggcactcctgggcttccgatgctccctctgaaccactgaaagctgtgatgtccaagggggctcacaccatgtgtgcttctagtctgtcttccccccgggcctctcaaagtctggtagattacgacagctctgacgattctgacgtggaatccacagagcagtgtttagctaacagtaaacagacatctttacaccagcaagcaactaaggagattcaggatgcagctgggacaagcagggataaaaaagaatttagccttgagcctccatcaaggcctctggttctgaaagaatttgatactgccttctcctttgattgtgaagtagccccaaatgatgtcgtctctgaagtgggaatattttacagaatagtaaaatgcttccaggaactacaagatgccatctgccgtttgcaaaagaaaaatcttttcccatataatccaactgcacttttgaagttgttaaaatacatagaggtgataagtaataaaactatgaacactttgtaaaacattgacattttattttccaggtattgtttttccttaatataaattatgtctcaatgaggtaatagtataaaatcatcaccataaaagggttttcttttttttttttttttttgagacagaatctcattctgtcgctcaggccggagtgcagtggcgtgactcgactcactgcaacctccacctcctgggttcaagcaattct

SEQ ID NO: 31562 - DNA, 3721 bp, Homo sapiens
cggtggcccagagcgggcatttgtgttccctcaaatggcggtgtgaagagagttcgcctgagccagatcccaggtttcactgaagaaacttcttagagattcattgcacttctgagatttaatgtttacaacttggagttgtcgaccttcttataagatacattttggaagtcaaaatgaaagttttctgtgaagttttagaagagttatacaagaaggtacttcttggagccacacttgaaaatgacagccatgattacatcttttatctcaacccagcagtttcagatcaagattgttctacagccacctccttagaatgggcaaacacctgtggtatccagggcaggcatcagcccatctctgttggtgtggctcccattgctgtagcacctgtgtgtttgaagaccaactctcagatgagcggttccagagaagtaatgctccttcagttaacagtgatcaaagtgatgacaacccggatattgtctgtcaaaaccgagttccatgcaaaggagcagtacagagatgtaattaaaattctcttagaatcagccaaagtcgattctaaattaatctgcatgttccaaaattcagataaattgttatctcacatggctgcacagtgccttgcattgcttctatatttccaattgagagaaaagataaccttaagtaattcctggattgctttttgccagaaaaatctttctgaatactctgagagtaataaagcaatatactgcctctggactcttacagcaataataaaagaaatctttaaagattcatgttcacagaaaacagaaattctaaagcagttcctgactcatttcgacaccatttttgaagtgttttacaattccttattctctcagcattttgaaaactgccgggatacttctaaaatagtaaacatcctgatgtgtttcctggatttgcttgagcttctcatcgcctccagaatccacctgaagttaacaatttaaattgaccaagaaggataaaattataaaagaaaaacatattgaactgaataggaagtatatatacacatggaatattacaaggctataaagtaaaaaaaggaaagggtaataatatataaataaaaaaagctgaaataatatgattaaaaatgggtgaagacctctgtcgtggatctgtgcctgccttaatgccgccagaccatcatgtagcggtggacatgctggctttagctaatgctgttttgcaagctgtgaattcggggttgttgaagacactgtctgtttatgaaaaacattccttttttggaggtgatgaagttcaacctgaatgtgaacttatcactagtccagatcatgtgatccttagagcagcaagcttagttataatgaaatccttagaaatcaagtttcaaaattattcttcagcaagtgaaatgaaaggtgcgtgaccatggcccactgcagccctgaccccccttcggcccatgctattcctcctgtcccaacctgggaggtcctggcctgggagatcaaggctacagtgagccgcgacccatcgcacacctgcactccagtcctggtgcaacagatggagatcctttcagggagagagagagagagagaggagaagacagagagattaaagaaaaatatgttcactcccacttatgtgtttattgttattattgtttgttgttatttctttgttattgttgtgtttactgtttatttattttgaggcagggtcttgctctgtctcccaggctcactgcagcctcaacgttttgagctgaagtgatcctctcgcctctgcttccccaccccatttgtattaatccttcatacaattagtgtttctactaatgtagattattgaaaattagatattgaattaaagctaatatatgagaagttatattgacaaagaaattgttacatatataatttccagaatagtaactcaggagttcaaagtcttccattttacttgagaaaaatgaatagtaaatgtctctaaacaggcagcatacagattcagtgaaaagtttgaattgtgagcaatgacatcactgaattgctttggatataatttagcttttaataactacacattagttataattctgtgcagttttaatttataacactagatggcacctgttatataattcagttttaaattgtagttcaaactacctaaaacgtttttttatttttgtgcttaataatagtacttctatgctttaaacaaacaaaaaatatgtttttctgttattttgaagacaaaattatttttgcttggttgcattcttggacagacagctctggcatccgatgaagtgatcttagttgtctgctcatttatttatctgcttttagcaagaaatcacataacttttatttctaagagacagttgttaggcagttgttgcaaatagatgatgtagctgtacattttaaatgtatgctctggaatgagtcactttttttccctgagcctcagtgtcctcatttgccaaataaagatgcttcctaactgattcctgatgactttttgaaagtgaattaggataattgcatcttaaggtactttagacactatgaatttatatataggcaagatattcattcattcataaactattgcctacactttgaaattttcattttttgaagttgacttacagaggttcatgtctgagttactgaccttcttaaagcctcatcttcagccctctctgcaattacacaatccgtgcaaatggctgtctcgggttttcatagaacaagacgatgacatgctggaggctgccaaggcatcactgggcatctacttaacactgaccagaggatgtgaagccactgaaagcttgactcagggaaaagaaatgtgggaccatcacacacatgaaaatggctataatcctcactgtattttcttgttcttcttgaaaaatataggatttgattccacagttcttcttgactttttgatttcatcagaaacctgttttcttgaatattttgttagatatttaaaattactgcaaaaggactgggataattttttcaccatttgcaataactttgatgcaactgaatctaaatatgacataagtatttgtggctgtgtcccctcacttgtccaaggaccaaagctccaaccaaacaataccccatcgtttgactgctcctcatagtcacagagatgtgtgtgctcggcactcctgggcttccgatgctccctctgaaccactgaaagctgtgatgtccaagggggctcacaccatgtgtgcttctagtctgtcttccccccgggcctctcaaagtctggtagattacgacagctctgacgattctgacgtggaatccacagagcagtgtttagctaacagtaaacagacatctttacaccagcaagcaactaaggagattcaggatgcagctgggacaagcagggataaaaaagaatttagccttgagcctccatcaaggcctctggttctgaaagaatttgatactgccttctcctttgattgtgaagtagccccaaatgatgtcgtctctgaagtgggaatattttacagaatagtaaaatgcttccaggaactacaagatgccatctgccgtttgcaaaagaaaaatcttttcccatataatccaactgcacttttgaagttgttaaaatacatagaggtgataagtaataaaactatgaacactttgtaaaa

SEQ ID NO: 31563 - DNA, 3798 bp, Homo sapiens
cggtggcccagagcgggcatttgtgttccctcaaatggcggtgtgaagagagttcgcctgagccagatcccagttttaacaagggaggcatgagacatcaatcaagatatgtaaaatgaacattggttcagtccagaaaggtgggacaactcttaagctgggagggggcttccaggtcacaggtttcactgaagaaacttcttagagattcattgcacttctgagatttaatgtttacaacttggagttgtcgaccttcttataagatacattttggaagtcaaaatgaaagttttctgtgaagttttagaagagttatacaagaaggtacttcttggagccacacttgaaaatgacagccatgattacatcttttatctcaacccagcagtttcagatcaagattgttctacagccacctccttagaatgggcaaacacctgtggtatccagggcaggcatcagcccatctctgttggtgtggctcccattgctgtagcacctgtgtgtttgaagaccaactctcagatgagcggttccagagaagtaatgctccttcagttaacagtgatcaaagtgatgacaacccggatattgtctgtcaaaaccgagttccatgcaaaggagcagtacagagatgtaattaaaattctcttagaatcagccaaagtcgattctaaattaatctgcatgttccaaaattcagataaattgttatctcacatggctgcacagtgccttgcattgcttctatatttccaattgagagaaaagataaccttaagtaattcctggattgctttttgccagaaaaatctttctgaatactctgagagtaataaagcaatatactgcctctggactcttacagcaataataaaagaaatctttaaagattcatgttcacagaaaacagaaattctaaagcagttcctgactcatttcgacaccatttttgaagtgttttacaattccttattctctcagcattttgaaaactgccgggatacttctaaaatagtaaacatcctgatgtgtttcctggatttgcttgagcttctcatcgcctccagaatccacctgaagttacatttcacttgccagaggattttatttttgaaaccatcttgcatgctagaagttattacctggcctattcaggcttttgttaaaaggaaggtcatcatattcctcaaaaagtgccttctctgtaaagtgggtgaagacctctgtcgtggatctgtgcctgccttaatgccgccagaccatcatgtagcggtggacatgctggctttagctaatgctgttttgcaagctgtgaattcggggttgttgaagacactgtctgtttatgaaaaacattccttttttggaggtgatgaagttcaacctgaatgtgaacttatcactagtccagatcatgtgatccttagagcagcaagcttagttataatgaaatccttagaaatcaagtttcaaaattattcttcagcaagtgaaatgaaaggtgcgtgaccatggcccactgcagccctgaccccccttcggcccatgctattcctcctgtcccaacctgggaggtcctggcctgggagatcaaggctacagtgagccgcgacccatcgcacacctgcactccagtcctggtgcaacagatggagatcctttcagggagagagagagagagagaggagaagacagagagattaaagaaaaatatgttcactcccacttatgtgtttattgttattattgtttgttgttatttctttgttattgttgtgtttactgtttatttattttgaggcagggtcttgctctgtctcccaggctcactgcagcctcaacgttttgagctgaagtgatcctctcgcctctgcttccccaccccatttgtattaatccttcatacaattagtgtttctactaatgtagattattgaaaattagatattgaattaaagctaatatatgagaagttatattgacaaagaaattgttacatatataatttccagaatagtaactcaggagttcaaagtcttccattttacttgagaaaaatgaatagtaaatgtctctaaacaggcagcatacagattcagtgaaaagtttgaattgtgagcaatgacatcactgaattgctttggatataatttagcttttaataactacacattagttataattctgtgcagttttaatttataacactagatggcacctgttatataattcagttttaaattgtagttcaaactacctaaaacgtttttttatttttgtgcttaataatagtacttctatgctttaaacaaacaaaaaatatgtttttctgttattttgaagacaaaattatttttgcttggttgcattcttggacagacagctctggcatccgatgaagtgatcttagttgtctgctcatttatttatctgcttttagcaagaaatcacataacttttatttctaagagacagttgttaggcagttgttgcaaatagatgatgtagctgtacattttaaatgtatgctctggaatgagtcactttttttccctgagcctcagtgtcctcatttgccaaataaagatgcttcctaactgattcctgatgactttttgaaagtgaattaggataattgcatcttaaggtactttagacactatgaatttatatataggcaagatattcattcattcataaactattgcctacactttgaaattttcattttttgaagttgacttacagaggttcatgtctgagttactgaccttcttaaagcctcatcttcagccctctctgcaattacacaatccgtgcaaatggctgtctcgggttttcatagaacaagacgatgacatgctggaggctgccaaggcatcactgggcatctacttaacactgaccagaggatgtgaagccactgaaagcttgactcagggaaaagaaatgtgggaccatcacacacatgaaaatggctataatcctcactgtattttcttgttcttcttgaaaaatataggatttgattccacagttcttcttgactttttgatttcatcagaaacctgttttcttgaatattttgttagatatttaaaattactgcaaaaggactgggataattttttcaccatttgcaataactttgatgcaactgaatctaaatatgacataagtatttgtggctgtgtcccctcacttgtccaaggaccaaagctccaaccaaacaataccccatcgtttgactgctcctcatagtcacagagatgtgtgtgctcggcactcctgggcttccgatgctccctctgaaccactgaaagctgtgatgtccaagggggctcacaccatgtgtgcttctagtctgtcttccccccgggcctctcaaagtctggtagattacgacagctctgacgattctgacgtggaatccacagagcagtgtttagctaacagtaaacagacatctttacaccagcaagcaactaaggagattcaggatgcagctgggacaagcagggataaaaaagaatttagccttgagcctccatcaaggcctctggttctgaaagaatttgatactgccttctcctttgattgtgaagtagccccaaatgatgtcgtctctgaagtgggaatattttacagaatagtaaaatgcttccaggaactacaagatgccatctgccgtttgcaaaagaaaaatcttttcccatataatccaactgcacttttgaagttgttaaaatacatagaggtgataagtaataaaactatgaacactttgtaaaa

SEQ ID NO: 31564 - DNA, 2250 bp, Homo sapiens
aattttcgtttcagtcgaatttgggctgataccttcttgaggcaaatgtctgaaattggttaagttatgttactgatgatttatactgattgtctctgctttattaaaatagctgtacttgggttaatatcttcttgtggcaaatatctataattggttatgaagctaataaccgatgaccttttccactgtttctgcttctgctttattaaaaccctcacatatttgctttatttccatttctttcttggcctgggagaaagggatttcttgctaatgatctgtggtgcagcgttgtgccgccagtacttacttgtattatgacactgctggcaatggctgctcttagactcttgagtgtttggggccaattttcaaaaggtcctaatcaagaacacaaaattcctgcatgtgatttgaattaggttcaaaatggtcaaatacaagttcagtctgaaaatgcacacgcctgtaagagtgtatcttaattgtactcaaagttagctccttactcctcaggaagtggaaacccctgaatgaaactgactttgtgtgtgaatttctcactttctgaatccagttcagtgtgtccagagaggcatgtgcttacaacatagatagtttttttcagatgtagttgtatttgttaagatttttttggttgtaaatgatagaaaccaactctaatttgagcaaaagccagcatttattggctcataactgggaattctaaagggtcaagttggagtcaggtataactatatgtacagggactataatcaatcatgtcatcaatcacttctcaatttttctctgtctcacagttttgaattcattctcaaggcatggccaccggcagttcaaggcgtacctcagccttacagttataatcttccatagctccagcaaaagtcccaggggagacctgattaacccacttgggtcacagagccttgtcagaaccagtcattgtggccaggagcatggagtgctctgattggtcaatctgggtcacatgcccacccttgttgagggtaaggaaggaggtttaggaattatcttaccacatggaattggttacctataagaatgaggagttctgatgtcgagagaaagaacaacagataacttttattgggcagacaaaaactagaactgccaaagtcagtggattttgctttactgagtcagatttctttagagcttatggggaagggaatgggttttgaaattttttcttttaagaagtgatgcatagatttaaaagtaatctaataggttaatttatggtatgtgaattatatctggtaaaactgtttatttttgtaaggtcattaatctgcattctccattatcttcattttcagaggatgtgaagccactgaaagcttgactcagggaaaagaaatgtgggaccatcacacacatgaaaatggctataatcctcactgtattttcttgttcttcttgaaaaatataggatttgattccacagttcttcttgactttttgatttcatcagaaacctgttttcttgaatattttgttagatatttaaaattactgcaaaaggactgggataattttttcaccatttgcaataactttgatgcaactgaatctaaatatgacataagtatttgtggctgtgtcccctcacttgtccaaggaccaaagctccaaccaaacaataccccatcgtttgactgctcctcatagtcacagagatgtgtgtgctcggcactcctgggcttccgatgctccctctgaaccactgaaagctgtgatgtccaagggggctcacaccatgtgtgcttctagtctgtcttccccccgggcctctcaaagtctggtagattacgacagctctgacgattctgacgtggaatccacagagcagtgtttagctaacagtaaacagacatctttacaccagcaagcaactaaggagattcaggatgcagctgggacaagcagggataaaaaagaatttagccttgagcctccatcaaggcctctggttctgaaagaatttgatactgccttctcctttgattgtgaagtagccccaaatgatgtcgtctctgaagtgggaatattttacagaatagtaaaatgcttccaggaactacaagatgccatctgccgtttgcaaaagaaaaatcttttcccatataatccaactgcacttttgaagttgttaaaatacatagaggtgataagtaataaaactatgaacactttgtaaaa

SEQ ID NO: 31565 - DNA, 1557 bp, Homo sapiens
cggtggcccagagcgggcatttgtgttccctcaaatggcggtgtgaagagagttcgcctgagccagatcccaggtttcactgaagaaacttcttagagattcattgcacttctgagatttaatgtttacaacttggagttgtcgaccttcttataagatacattttggaagtcaaaatgaaagttttctgtgaagttttagaagagttatacaagaaggtacttcttggagccacacttgaaaatgacagccatgattacatcttttatctcaacccagcagtttcagatcaagattgttctacagccacctccttagaatgggcaaacacctgtggtatccagggcaggcatcagcccatctctgttggtgtggctcccattgctgtagcacctgtgtgtttgaagaccaactctcagatgagcggttccagagaagtaatgctccttcagttaacagtgatcaaagtgatgacaacccggatattgtctgtcaaaaccgagttccatgcaaaggagcagtacagagatgtaattaaaattctcttagaatcagccaaagtcgattctaaattaatctgcatgttccaaaattcagataaattgttatctcacatggctgcacagtgccttgcattgcttctatatttccaattgagagaaaagataaccttaagtaattcctggattgctttttgccagaaaaatctttctgaatactctgagagtaataaagcaatatactgcctctggactcttacagcaataataaaagaaatctttaaagattcatgttcacagaaaacagaaattctaaagcagttcctgactcatttcgacaccatttttgaagtgttttacaattccttattctctcagcattttgaaaactgccgggatacttctaaaatagtaaacatcctgatgtgtttcctggatttgcttgagcttctcatcgcctccagaatccacctgaagttacatttcacttgccagaggattttatttttgaaaccatcttgcatgctagaagttattacctggcctattcaggcttttgttaaaaggaaggtcatcatattcctcaaaaagtgccttctctgtaaagtgggtgaagacctctgtcgtggatctgtgcctgccttaatgccgccagaccatcatgtagcggtggacatgctggctttagctaatgctgttttgcaagctgtgaattcggggttgttgaagacactgtctgtttatgaaaaacattccttttttggaggtgatgaagttcaacctgaatgtgaacttatcactagtccagatcatgtgatccttagagcagcaagcttagttataatgaaatccttagaaatcaagtttcaaaattattcttcagcaagtgaaatgaaaggtaattctccaaactccttttgtatgcagtgtgtaattatttacttaagtacagtaattcataattatcaaatctcaggactagtttaaattccagtaatttaagctgtatgttatcctatttgtaacttattacattttcaaaaaaaaaaaaaagaac

SEQ ID NO: 31566 - DNA, 3724 bp, Homo sapiens
cggtggcccagagcgggcatttgtgttccctcaaatggcggtgtgaagagagttcgcctgagccagatcccaggtttcactgaagaaacttcttagagattcattgcacttctgagatttaatgtttacaacttggagttgtcgaccttcttataagatacattttggaagtcaaaatgaaagttttctgtgaagttttagaagagttatacaagaaggtacttcttggagccacacttgaaaatgacagccatgattacatcttttatctcaacccagcagtttcagatcaagattgttctacagccacctccttagaatgggcaaacacctgtggtatccagggcaggcatcagcccatctctgttggtgtggctcccattgctgtagcacctgtgtgtttgaagaccaactctcagatgagcggttccagagaagtaatgctccttcagttaacagtgatcaaagtgatgacaacccggatattgtctgtcaaaaccgagttccatgcaaaggagcagtacagagatgtaattaaaattctcttagaatcagccaaagtcgattctaaattaatctgcatgttccaaaattcagataaattgttatctcacatggctgcacagtgccttgcattgcttctatatttccaattgagagaaaagataaccttaagtaattcctggattgctttttgccagaaaaatctttctgaatactctgagagtaataaagcaatatactgcctctggactcttacagcaataataaaagaaatctttaaagattcatgttcacagaaaacagaaattctaaagcagttcctgactcatttcgacaccatttttgaagtgttttacaattccttattctctcagcattttgaaaactgccgggatacttctaaaatagtaaacatcctgatgtgtttcctggatttgcttgagcttctcatcgcctccagaatccacctgaagttacatttcacttgccagaggattttatttttgaaaccatcttgcatgctagaagttattacctggcctattcaggcttttgttaaaaggaaggtcatcatattcctcaaaaagtgccttctctgtaaagtgggtgaagacctctgtcgtggatctgtgcctgccttaatgccgccagaccatcatgtagcggtggacatgctggctttagctaatgctgttttgcaagctgtgaattcggggttgttgaagacactgtctgtttatgaaaaacattccttttttggaggtgatgaagttcaacctgaatgtgaacttatcactagtccagatcatgtgatccttagagcagcaagcttagttataatgaaatccttagaaatcaagtttcaaaattattcttcagcaagtgaaatgaaaggtgcgtgaccatggcccactgcagccctgaccccccttcggcccatgctattcctcctgtcccaacctgggaggtcctggcctgggagatcaaggctacagtgagccgcgacccatcgcacacctgcactccagtcctggtgcaacagatggagatcctttcagggagagagagagagagagaggagaagacagagagattaaagaaaaatatgttcactcccacttatgtgtttattgttattattgtttgttgttatttctttgttattgttgtgtttactgtttatttattttgaggcagggtcttgctctgtctcccaggctcactgcagcctcaacgttttgagctgaagtgatcctctcgcctctgcttccccaccccatttgtattaatccttcatacaattagtgtttctactaatgtagattattgaaaattagatattgaattaaagctaatatatgagaagttatattgacaaagaaattgttacatatataatttccagaatagtaactcaggagttcaaagtcttccattttacttgagaaaaatgaatagtaaatgtctctaaacaggcagcatacagattcagtgaaaagtttgaattgtgagcaatgacatcactgaattgctttggatataatttagcttttaataactacacattagttataattctgtgcagttttaatttataacactagatggcacctgttatataattcagttttaaattgtagttcaaactacctaaaacgtttttttatttttgtgcttaataatagtacttctatgctttaaacaaacaaaaaatatgtttttctgttattttgaagacaaaattatttttgcttggttgcattcttggacagacagctctggcatccgatgaagtgatcttagttgtctgctcatttatttatctgcttttagcaagaaatcacataacttttatttctaagagacagttgttaggcagttgttgcaaatagatgatgtagctgtacattttaaatgtatgctctggaatgagtcactttttttccctgagcctcagtgtcctcatttgccaaataaagatgcttcctaactgattcctgatgactttttgaaagtgaattaggataattgcatcttaaggtactttagacactatgaatttatatataggcaagatattcattcattcataaactattgcctacactttgaaattttcattttttgaagttgacttacagaggttcatgtctgagttactgaccttcttaaagcctcatcttcagccctctctgcaattacacaatccgtgcaaatggctgtctcgggttttcatagaacaagacgatgacatgctggaggctgccaaggcatcactgggcatctacttaacactgaccagaggatgtgaagccactgaaagcttgactcagggaaaagaaatgtgggaccatcacacacatgaaaatggctataatcctcactgtattttcttgttcttcttgaaaaatataggatttgattccacagttcttcttgactttttgatttcatcagaaacctgttttcttgaatattttgttagatatttaaaattactgcaaaaggactgggataattttttcaccatttgcaataactttgatgcaactgaatctaaatatgacataagtatttgtggctgtgtcccctcacttgtccaaggaccaaagctccaaccaaacaataccccatcgtttgactgctcctcatagtcacagagatgtgtgtgctcggcactcctgggcttccgatgctccctctgaaccactgaaagctgtgatgtccaagggggctcacaccatgtgtgcttctagtctgtcttccccccgggcctctcaaagtctggtagattacgacagctctgacgattctgacgtggaatccacagagcagtgtttagctaacagtaaacagacatctttacaccagcaagcaactaaggagattcaggatgcagctgggacaagcagggataaaaaagaatttagccttgagcctccatcaaggcctctggttctgaaagaatttgatactgccttctcctttgattgtgaagtagccccaaatgatgtcgtctctgaagtgggaatattttacagaatagtaaaatgcttccaggaactacaagatgccatctgccgtttgcaaaagaaaaatcttttcccatataatccaactgcacttttgaagttgttaaaatacatagaggtgataagtaataaaactatgaacactttgtaaaaaaaaatctaataatataaaactcctagggggggct

SEQ ID NO: 31567 - DNA, 2453 bp, Homo sapiens
cggtggcccagagcgggcatttgtgttccctcaaatggcggtgtgaagagagttcgcctgagccagatcccaggtttcactgaagaaacttcttagagattcattgcacttctgagatttaatgtttacaacttggagttgtcgaccttcttataagatacattttggaagtcaaaatgaaagttttctgtgaagttttagaagagttatacaagaaggtacttcttggagccacacttgaaaatgacagccatgattacatcttttatctcaacccagcagtttcagatcaagattgttctacagccacctccttagaatgggcaaacacctgtggtatccagggcaggcatcagcccatctctgttggtgtggctcccattgctgtagcacctgtgtgtttgaagaccaactctcagatgagcggttccagagaagtaatgctccttcagttaacagtgatcaaagtgatgacaacccggatattgtctgtcaaaaccgagttccatgcaaaggagcagtacagagatgtaattaaaattctcttagaatcagccaaagtcgattctaaattaatctgcatgttccaaaattcagataaattgttatctcacatggctgcacagtgccttgcattgcttctatatttccaattgagagaaaagataaccttaagtaattcctggattgctttttgccagaaaaatctttctgaatactctgagagtaataaagcaatatactgcctctggactcttacagcaataataaaagaaatctttaaagattcatgttcacagaaaacagaaattctaaagcagttcctgactcatttcgacaccatttttgaagtgttttacaattccttattctctcagcattttgaaaactgccgggatacttctaaaatagtaaacatcctgatgtgtttcctggatttgcttgagcttctcatcgcctccagaatccacctgaagttacatttcacttgccagaggattttatttttgaaaccatcttgcatgctagaagttattacctggcctattcaggcttttgttaaaaggaaggtcatcatattcctcaaaaagtgccttctctgtaaagtgggtgaagacctctgtcgtggatctgtgcctgccttaatgccgccagaccatcatgtagcggtggacatgctggctttagctaatgctgttttgcaagctgtgaattcggggttgttgaagacactgtctgtttatgaaaaacattccttttttggaggtgatgaagttcaacctgaatgtgaacttatcactagtccagatcatgtgatccttagagcagcaagcttagttataatgaaatccttagaaatcaagtttcaaaattattcttcagcaagtgaaatgaaagttgacttacagaggttcatgtctgagttactgaccttcttaaagcctcatcttcagccctctctgcaattacacaatccgtgcaaatggctgtctcgggttttcatagaacaagacgatgacatgctggaggctgccaaggcatcactgggcatctacttaacactgaccagaggatgtgaagccactgaaagcttgactcagggaaaagaaatgtgggaccatcacacacatgaaaatggctataatcctcactgtattttcttgttcttcttgaaaaatataggatttgattccacagttcttcttgactttttgatttcatcagaaacctgttttcttgaatattttgttagatatttaaaattactgcaaaaggactgggataattttttcaccatttgcaataactttgatgcaactgaatctaaatatgacataagtatttgtggctgtgtcccctcacttgtccaaggaccaaagctccaaccaaacaataccccatcgtttgactgctcctcatagtcacagagatgtgtgtgctcggcactcctgggcttccgatgctccctctgaaccactgaaagctgtgatgtccaagggggctcacaccatgtgtgcttctagtctgtcttccccccgggcctctcaaagtctggtagattacgacagctctgacgattctgacgtggaatccacagagcagtgtttagctaacagtaaacagacatctttacaccagcaagcaactaaggagattcaggatgcagctgggacaagcagggataaaaaagaatttagccttgagcctccatcaaggcctctggttctgaaagaatttgatactgccttctcctttgattgtgaagtagccccaaatgatgtcgtctctgaagtgggaatattttacagaatagtaaaatgcttccaggaactacaagatgccatctgccgtttgcaaaagaaaaatcttttcccatataatccaactgcacttttgaagttgttaaaatacatagaggtgataagtaataaaactatgaacactttgtaaaa

SEQ ID NO: 31568 - DNA, 921 bp, Homo sapiens
gcaccctacagatgcgggtctccgcccagccgcggtcacctggggggctgggggcggggcctgggcggggcggggttcggccgggagcgcagggcggcagtgcgcgcctagcagtgtcccagccgggttcgtgtcgccatggggcagatcgagtgggccatgtgggccaacgagcaggcgctggcgtccggcctgatcctcatcaccgggggcatcgtggccacagctgggcgcttcacccagtggtactttggtgcctactccattgtggcgggcgtgtttgtgtgcctgctggagtacccccgggggaagaggaagaagggctccaccatggagcgctggggacagaagcacatgaccgccgtggtgaagctgttcgggccctttaccaggaattactatgttcgggccgtcctgcatctcctgctctcggtgcccgccggcttcctgctggccaccatccttgggaccgcctgcctggccattgcgagcggcatctacctactggcggctgtgcgtggcgagcagtggacgcccatcgagcccaagccccgggagcggccgcagatcggaggcaccatcaagcagccgcccagcaaccccccgccgcggcccccggccgaggcccgcaagaagcccagcgaggaggaggctgcggcggcggcggggggacccccgggaggtccccaggtcaaccccatcccggtgaccgacgaggtcgtgtgacctcgccccggacctgccctcccaccaggtgcacccacctgcaataaatgcagcgaagccgggaaaaaaacaaaaaaaaaaacaaaaaaaaaaaccgggggtttttggggggggaaaaaaatatagaagggcgggagttcgcacactttttgagagggaacagggcccaaagggagagaaaaaggcagcggagac

SEQ ID NO: 31569 - DNA, 875 bp, Homo sapiens
atcccccctcgactagcccgacaggggggttcggccgggagcgcagggcggcagtgcgcgcctagcagtgtcccagccgggttcgtgtcgccatggggcagatcgagtgggccatgtgggccaacgagcaggcgctggcgtccggcctgatcctcatcaccgggggcatcgtggccacagctgggcgcttcacccagtggtactttggtgcctactccattgtggcgggcgtgtttgtgtgcctgctggagtacccccgggggaagaggaagaagggctccaccatggagcgctggggacagaagcacatgaccgccgtggtgaagctgttcgggccctttaccaggaattactatgttcgggccgtcctgcatctcctgctctcggtgcccgccggcttcctgctggccaccatccttgggaccgcctgcctggccattgcgagcggcatctacctactggcggctgtgcgtggcgagcagtggacgcccatcgagcccaagccccgggagcggccgcagatcggaggcaccatcaagcagccgcccagcaaccccccgccgcggcccccggccgaggcccgcaagaagcccagcgaggaggaggctgcggcggcggcggggggacccccgggaggtccccaggtcaaccccatcccggtgaccgacgaggtcgtgtgacctcgccccggacctgccctcccaccaggtgcacccacctgcaataaatgcagcgaagccgggaaaaaaacaaaaaaaaaaacaaaaaaaaaaaccgggggtttttggggggggaaaaaaatatagaagggcgggagttcgcacactttttgagagggaacagggcccaaagggagagaaaaaggcagcggagac

SEQ ID NO: 31570 - DNA, 789 bp, Homo sapiens
gcaccctacagatgcgggtctccgcccagccgcggtcacctggggggctgggggcggggcctgggcggggcggggttcggccgggagcgcagggcggcagtgcgcgcctagcagtgtcccagccgggttcgtgtcgccatggggcagatcgagtgggccatgtgggccaacgagcaggcgctggcgtccggcctgatcctcatcaccgggggcatcgtggccacagctgggcgcttcacccagtggtactttggtgcctactccattgtggcgggcgtgtttgtgtgcctgctggagtacccccgggggaagaggaagaagggctccaccatggagcgctggggacagaagcacatgaccgccgtggtgaagctgttcgggccctttaccaggaattactatgttcgggccgtcctgcatctcctgctctcggtgcccgccggcttcctgctggccaccatccttgggaccgcctgcctggccattgcgagcggcatctacctactggcggctgtgcgtggcgagcagtggacgcccatcgagcccaagccccgggagcggccgcagatcggaggcaccatcaagcagccgcccagcaaccccccgccgcggcccccggccgaggcccgcaagaagcccagcgaggaggaggctgcggcggcggcggggggacccccgggaggtccccaggtcaaccccatcccggtgaccgacgaggtcgtgtgacctcgccccggacctgccctcccaccaggtgcacccacctgcaataaatgcagcgaagccggg

SEQ ID NO: 31571 - DNA, 1028 bp, Homo sapiens
gcaccctacagatgcgggtctccgcccagccgcggtcacctggggggctgggggcggggcctgggcggggcggggttcggccgggagcgcagggcggcagtgcgcgcctagcagtgtcccagccgggttcgtgtcgccatggggcagatcgagtgggccatgtgggccaacgagcaggcgctggcgtccggcctgatcctcatcaccgggggcatcgtggccacagctgggcgcttcacccagtggtactttggtgcctactccattgtggcgggcgtgtttgtgtgcctgctggagtacccccgggggaagaggaagaagggctccaccatggagcgctggggacagaagcacatgaccgccgtggtgaagctgttcgggccctttaccaggaattactatgttcgggccgtcctgcatctcctgctctcggtgcccgccggcttcctgctggccaccatccttgggaccgcctgcctggccattgcgagcggcatctacctactggcggctgtgcgtggcgagcagtggacgcccatcgagcccaagccccgggagcggccgcagatcggaggcaccatcaagcagccgcccagcaaccccccgccgcggcccccggccgaggcccgcaagaagcccagcgaggaggaggctgcggcggcggcggggggacccccgggaggtccccaggtcaaccccatcccggtgaccgacgaggtcgtgtgacctcgccccggacctgccctcccaccaggtgcacccacctgcaataaatgcagcgaagccgggaaaaaaacaaaaaaaaaaacaaaaaaaaaaaaaaaattggagaggcgcatctatggccggggggcgcggagagaaaggaggcgtactagaatgtggcgcacgtgggccaatacagcgtgttccctgagacccaagttttcttggcacaacggcggtggagaactccggcagggtcccccctatagggaggccgaataaattcgataagccaggtaacctggtatgacaccggcaaaagc

SEQ ID NO: 31572 - DNA, 1055 bp, Homo sapiens
gcaccctacagatgcgggtctccgcccagccgcggtcacctggggggctgggggcggggcctgggcggggcggggttcggccgggagcgcagggcggcagtgcgcgcctagcagtgtcccagccgggttcgtgtcgccatggggcagatcgagtgggccatgtgggccaacgagcaggcgctggcgtccggcctgatcctcatcaccgggggcatcgtggccacagctgggcgcttcacccagtggtactttggtgcctactccattgtggcgggcgtgtttgtgtgcctgctggagtacccccgggggaagaggaagaagggctccaccatggagcgctggggacagaagcacatgaccgccgtggtgaagctgttcgggccctttaccaggaattactatgttcgggccgtcctgcatctcctgctctcggtgcccgccggcttcctgctggccaccatccttgggaccgcctgcctggccattgcgagcggcatctacctactggcggctgtgcgtggcgagcagtggacgcccatcgagcccaagccccgggagcggccgcagatcggaggcaccatcaagcagccgcccagcaaccccccgccgcggcccccggccgaggcccgcaagaagcccagcgaggaggaggctgcggcggcggcggggggacccccgggaggtccccaggtcaaccccatcccggtgaccgacgaggtcgtgtgacctcgccccggacctgccctcccaccaggtgcacccacctgcaataaatgcagcgaagccgggaaaaaaacaaaaaaaaaaacaaaaaaaaaaaaaaaaaaaaaaaaaaaaaaaaaaaaaaacaaaaaaaaacacgccgcgggacacattatatgggcggggggcaaaaaacgcagcggtcagacaagggcaggccgccggcccaaacgtgctggctcagcgcacccacgatctttttgacaaagagagggaacactgcgcggcgccacccccagcgagaggggggccacaacaatgccaacaaccgcgcgagaacccgcgtgtaaggg

SEQ ID NO: 31573 - DNA, 690 bp, Homo sapiens
tctcaaatcaaccgaacatccagccgggttcgtgtcgccatggggcagatcgagtgggccatgtgggccaacgagcaggcgctggcgtccggcctgatcctcatcaccgggggcatcgtggccacagctgggcgcttcacccagtggtactttggtgcctactccattgtggcgggcgtgtttgtgtgcctgctggagtacccccgggggaagaggaagaagggctccaccatggagcgctggggacagaagcacatgaccgccgtggtgaagctgttcgggccctttaccaggaattactatgttcgggccgtcctgcatctcctgctctcggtgcccgccggcttcctgctggccaccatccttgggaccgcctgcctggccattgcgagcggcatctacctactggcggctgtgcgtggcgagcagtggacgcccatcgagcccaagccccgggagcggccgcagatcggaggcaccatcaagcagccgcccagcaaccccccgccgcggcccccggccgaggcccgcaagaagcccagcgaggaggaggctgcggcggcggcggggggacccccgggaggtccccaggtcaaccccatcccggtgaccgacgaggtcgtgtgacctcgccccggacctgccctcccaccaggtgcacccacctgcaataaatgcagcgaagccggg

SEQ ID NO: 31574 - DNA, 3333 bp, Homo sapiens
gcaccctacagatgcgggtctccgcccagccgcggtcacctggggggctgggggcggggcctgggcggggcggggttcggccgggagcgcagggcggcagtgcgcgcctagcagtgtcccagccgggttcgtgtcgccatggggcagatcgagtgggccatgtgggccaacgagcaggcgctggcgtccggcctgatcctcatcaccgggggcatcgtggccacagctgggcgcttcacccagtggtactttggtgcctactccattgtggcgggcgtgtttgtgtgcctgctggagtacccccgggggaagaggaagaagggctccaccatggagcgctggggacagaagcacatgaccgccgtggtgaagctgttcgggccctttaccaggaattactatgttcgggccgtcctgcatctcctgctctcggtgcccgccggcttcctgctggccaccatccttgggaccgcctgcctggccattgcgagcggcatctacctactggtgagtggcgccctctgaggtcggccccggccacccccatccccagcccctgccctgacaccctcggacacgcatggcccttgaagccggctctgtaggctgagccaaggctgggagcaagtgtgagcctgggcgtgtgctcacagcacggcggggacgcagcggttgctgctgccatttttggcgtgtctagtgtgtcgggtcatttccttgcatttcctcattaacccgcaccacagccctgggaggggtactggggtccccactttacagacaaagatgcggaggctcagggaggtgctgtgactggcctggggtcacgcagccggccgaagaccgtgcctgcgcttgggtcccattatcaggcttttctcacctaaaccctattcgcgctgattcatgggcggtgccaggacgcagacattttcttaaactgccgacacctgcgtttggtttatgactgctgcaccctgttagaaggctgcccatcccatgggatacagtgatctctctgagaggccagggatgggtgggaggacagggcgcagcctggccaggccttgggtgaaatgccctctgcctgccctgggctccggaacagacggctgcaggccacctctcactgcgggggtctctgggtggacagagccctcagactttgcttatttaaatccttttgtccatagagccaagtccctcctgcccgcagaggcaactgccctccccttgctgtgcgtcttctagtgtgtgtgcgtgggaaaggtgcagcactttctgtgtacgccttccgcgtatggaagtggagttctgtttcaagcctcactgacctgccaccggcagaactctcctttagaaccccttcctgttgccaagtgctcatctgggctgttgctttgttttccgggggccacccgcatcccccccgtctccctgctgccacgcacagctagtggctcctggagacctcgggaggaattccttgtgctaaacccagagaggaattgctgggtcaggcatcagcctctgcaccgttcaccctgccgggctcagctgctccccagcagacaacccaccaccagccatgtggccccatctctcccaccatgcactaggctttctcccacgcttgccagtttcacagcacgagctggccgtgtggagcttggactcgcccttctctgactgtggatttgagctgttggagtttcttctcccttgagttgcctgttcaaatcctttgcccatttttctattgtggtttttgtatttttctttttcttcttttttttttgagatggagtctcgcgccatcgcccaggctggagtgcagtggcgtgatctcggctcactgcaaccttcgcctcctgggttcaagcaattctcctgcctcagcctcccgagtagctgggactacaggcacgtgccaccatgcctggctaatttttggtatttttagtagagacggggtttcaccgcgttagccaggatggtctggatctccttgaccttgtgatccgcccgcctcggcctcccaaagtgctgggattacaggcgtgagccaccgcgcccggcctgattgtctttttcttaagttgcaggaagtccacatatattttagctatttagcctttgtaacctttaaacactggggatgccttcatgctttctggtgagggtctgttaacttggcgcgtggagtccttcactgcacggaagagcagaggtttccctgttcacctgctctatggtctgtgctttgtgaaaacacctttccctggccctgggtcctgccttcacgttcctgccttttcttctatcagccttctagttttgcttttcagaatggaatgtttccgttttggagtcaggtaggatcacacatgtccagtttctctttctgttcatgacgtatatgatgtgacatatttttccaccagatattatgggatagaagatgaaaagcacacactcccaggtccacttgacctgttgcagtggaacctccgggcatgggcccaggagtctgtatttttagtaaaagccagtggaatcccgtggtcttcaagctctccccccaccacccccatgtgcagaaatgcctgggcacccttggggggctgccggccagcgtgggtgaatggcgcccaccagacggagcagggcctgctactctcctgggccacccctcctgctggacctcgggcctgcctccctgccttccctgcccttggcaccttgagaggagaatttgagtactagaatttgcatctgggagtgtccaccacgggatcttccagaagcccaggggttcgggccccactcctggcatgaagaaatagcttgggctggtgtcaggccgacccaggtcctggctgtgtggcctcgggcgcgtcacttaacctctctgagtggcagtcacaccatcctgcgtgggattcagacttgagcctgtcccagggcccctagcggggtgggcctccggggagggagggagggagggagggcgggcgctggggcgcggctcaacccttcagtgccccgcaggcggctgtgcgtggcgagcagtggacgcccatcgagcccaagccccgggagcggccgcagatcggaggcaccatcaagcagccgcccagcaaccccccgccgcggcccccggccgaggcccgcaagaagcccagcgaggaggaggctgcggcggcggcggggggacccccgggaggtccccaggtcaaccccatcccggtgaccgacgaggtcgtgtgacctcgccccggacctgccctcccaccaggtgcacccacctgcaataaatgcagcgaagccggg

SEQ ID NO: 31575 - DNA, 2647 bp, Homo sapiens
gcaccctacagatgcgggtctccgcccagccgcggtcacctggggggctgggggcggggcctgggcggggcggggttcggccgggagcgcagggcggcagtgcgcgcctagcagtgtcccagccgggttcgtgtcgccatggggcagatcgagtgggccatgtgggccaacgagcaggcgctggcgtccggcctgatcctcatcaccgggggcatcgtggccacagctgggcgcttcacccagtggtactttggtgcctactccattgtggcgggcgtgtttgtgtgcctgctggagtacccccgggggaagaggaagaagggctccaccatggagcgctggggacagaagcacatgaccgccgtggtgaagctgttcgggccctttaccaggaattactatgttcgggccgtcctgcatctcctgctctcggtgcccgccggcttcctgctggccaccatccttgggaccgcctgcctggccattgcgagcggcatctacctactgagccaagtccctcctgcccgcagaggcaactgccctccccttgctgtgcgtcttctagtgtgtgtgcgtgggaaaggtgcagcactttctgtgtacgccttccgcgtatggaagtggagttctgtttcaagcctcactgacctgccaccggcagaactctcctttagaaccccttcctgttgccaagtgctcatctgggctgttgctttgttttccgggggccacccgcatcccccccgtctccctgctgccacgcacagctagtggctcctggagacctcgggaggaattccttgtgctaaacccagagaggaattgctgggtcaggcatcagcctctgcaccgttcaccctgccgggctcagctgctccccagcagacaacccaccaccagccatgtggccccatctctcccaccatgcactaggctttctcccacgcttgccagtttcacagcacgagctggccgtgtggagcttggactcgcccttctctgactgtggatttgagctgttggagtttcttctcccttgagttgcctgttcaaatcctttgcccatttttctattgtggtttttgtatttttctttttcttcttttttttttgagatggagtctcgcgccatcgcccaggctggagtgcagtggcgtgatctcggctcactgcaaccttcgcctcctgggttcaagcaattctcctgcctcagcctcccgagtagctgggactacaggcacgtgccaccatgcctggctaatttttggtatttttagtagagacggggtttcaccgcgttagccaggatggtctggatctccttgaccttgtgatccgcccgcctcggcctcccaaagtgctgggattacaggcgtgagccaccgcgcccggcctgattgtctttttcttaagttgcaggaagtccacatatattttagctatttagcctttgtaacctttaaacactggggatgccttcatgctttctggtgagggtctgttaacttggcgcgtggagtccttcactgcacggaagagcagaggtttccctgttcacctgctctatggtctgtgctttgtgaaaacacctttccctggccctgggtcctgccttcacgttcctgccttttcttctatcagccttctagttttgcttttcagaatggaatgtttccgttttggagtcaggtaggatcacacatgtccagtttctctttctgttcatgacgtatatgatgtgacatatttttccaccagatattatgggatagaagatgaaaagcacacactcccaggtccacttgacctgttgcagtggaacctccgggcatgggcccaggagtctgtatttttagtaaaagccagtggaatcccgtggtcttcaagctctccccccaccacccccatgtgcagaaatgcctgggcacccttggggggctgccggccagcgtgggtgaatggcgcccaccagacggagcagggcctgctactctcctgggccacccctcctgctggacctcgggcctgcctccctgccttccctgcccttggcaccttgagaggagaatttgagtactagaatttgcatctgggagtgtccaccacgggatcttccagaagcccaggggttcgggccccactcctggcatgaagaaatagcttgggctggtgtcaggccgacccaggtcctggctgtgtggcctcgggcgcgtcacttaacctctctgagtggcagtcacaccatcctgcgtgggattcagacttgagcctgtcccagggcccctagcggggtgggcctccggggagggagggagggagggagggcgggcgctggggcgcggctcaacccttcagtgccccgcaggcggctgtgcgtggcgagcagtggacgcccatcgagcccaagccccgggagcggccgcagatcggaggcaccatcaagcagccgcccagcaaccccccgccgcggcccccggccgaggcccgcaagaagcccagcgaggaggaggctgcggcggcggcggggggacccccgggaggtccccaggtcaaccccatcccggtgaccgacgaggtcgtgtgacctcgccccggacctgccctcccaccaggtgcacccacctgcaataaatgcagcgaagccggg

SEQ ID NO: 31576 - DNA, 3990 bp, Homo sapiens
atcccccctcgactagcccgacaggggggttcggccgggagcgcagggcggcagtgcgcgcctagcagtgtcccagccgggttcgtgtcgccatggggcagatcgagtgggccatgtgggccaacgagcaggcgctggcgtccggcctgagtgagtgcacgtcagggacggtggaggctgcagcctggaggggtgtcccaagaccccagccgggacctcgggctacttacagggtggggaagtggggcgccaggcgggccaggccgggccggggtcaggccaggagggtgcggggaacgggggcgggaccctcaggccgcgggctggaaggaggagttctgagacccccagtaattcccttgcagaccctgcggagcgcggcgcccctcccccattcccttctctcggtcccccgactccgcgaaggaggaagttgcagcgcaggggaagaggcggttcagccccggtggtttccggggtcaccgccccgaagcccccgagtgggggctccggcctgggcatcgggagaagctcccctgcccctcggtagccagctggcctggaggtcgctctccctgggcttggggtggggaatgggctcatgccctggggctcagcccttctcatctggagtctgcgctggaggcggtctgagatttcacaaggcgccgaaaccacccagtgacggccctgcccagcccagctgcacaggcactttgctcttggggtgggatggcacagcccccagtcaccctcctgtgcatttgctcagaggttctggtgagggcagcggactccatttggaaatggaccctctcgggaccagggccagggagtgtctggcccagcacggtcctcatcaccgggggcatcgtggccacagctgggcgcttcacccagtggtactttggtgcctactccattgtggcgggcgtgtttgtgtgcctgctggagtacccccgggggaagaggaagaagggctccaccatggagcgctggggacagaagcacatgaccgccgtggtgaagctgttcgggccctttaccaggaattactatgttcgggccgtcctgcatctcctgctctcggtgcccgccggcttcctgctggccaccatccttgggaccgcctgcctggccattgcgagcggcatctacctactggtgagtggcgccctctgaggtcggccccggccacccccatccccagcccctgccctgacaccctcggacacgcatggcccttgaagccggctctgtaggctgagccaaggctgggagcaagtgtgagcctgggcgtgtgctcacagcacggcggggacgcagcggttgctgctgccatttttggcgtgtctagtgtgtcgggtcatttccttgcatttcctcattaacccgcaccacagccctgggaggggtactggggtccccactttacagacaaagatgcggaggctcagggaggtgctgtgactggcctggggtcacgcagccggccgaagaccgtgcctgcgcttgggtcccattatcaggcttttctcacctaaaccctattcgcgctgattcatgggcggtgccaggacgcagacattttcttaaactgccgacacctgcgtttggtttatgactgctgcaccctgttagaaggctgcccatcccatgggatacagtgatctctctgagaggccagggatgggtgggaggacagggcgcagcctggccaggccttgggtgaaatgccctctgcctgccctgggctccggaacagacggctgcaggccacctctcactgcgggggtctctgggtggacagagccctcagactttgcttatttaaatccttttgtccatagagccaagtccctcctgcccgcagaggcaactgccctccccttgctgtgcgtcttctagtgtgtgtgcgtgggaaaggtgcagcactttctgtgtacgccttccgcgtatggaagtggagttctgtttcaagcctcactgacctgccaccggcagaactctcctttagaaccccttcctgttgccaagtgctcatctgggctgttgctttgttttccgggggccacccgcatcccccccgtctccctgctgccacgcacagctagtggctcctggagacctcgggaggaattccttgtgctaaacccagagaggaattgctgggtcaggcatcagcctctgcaccgttcaccctgccgggctcagctgctccccagcagacaacccaccaccagccatgtggccccatctctcccaccatgcactaggctttctcccacgcttgccagtttcacagcacgagctggccgtgtggagcttggactcgcccttctctgactgtggatttgagctgttggagtttcttctcccttgagttgcctgttcaaatcctttgcccatttttctattgtggtttttgtatttttctttttcttcttttttttttgagatggagtctcgcgccatcgcccaggctggagtgcagtggcgtgatctcggctcactgcaaccttcgcctcctgggttcaagcaattctcctgcctcagcctcccgagtagctgggactacaggcacgtgccaccatgcctggctaatttttggtatttttagtagagacggggtttcaccgcgttagccaggatggtctggatctccttgaccttgtgatccgcccgcctcggcctcccaaagtgctgggattacaggcgtgagccaccgcgcccggcctgattgtctttttcttaagttgcaggaagtccacatatattttagctatttagcctttgtaacctttaaacactggggatgccttcatgctttctggtgagggtctgttaacttggcgcgtggagtccttcactgcacggaagagcagaggtttccctgttcacctgctctatggtctgtgctttgtgaaaacacctttccctggccctgggtcctgccttcacgttcctgccttttcttctatcagccttctagttttgcttttcagaatggaatgtttccgttttggagtcaggtaggatcacacatgtccagtttctctttctgttcatgacgtatatgatgtgacatatttttccaccagatattatgggatagaagatgaaaagcacacactcccaggtccacttgacctgttgcagtggaacctccgggcatgggcccaggagtctgtatttttagtaaaagccagtggaatcccgtggtcttcaagctctccccccaccacccccatgtgcagaaatgcctgggcacccttggggggctgccggccagcgtgggtgaatggcgcccaccagacggagcagggcctgctactctcctgggccacccctcctgctggacctcgggcctgcctccctgccttccctgcccttggcaccttgagaggagaatttgagtactagaatttgcatctgggagtgtccaccacgggatcttccagaagcccaggggttcgggccccactcctggcatgaagaaatagcttgggctggtgtcaggccgacccaggtcctggctgtgtggcctcgggcgcgtcacttaacctctctgagtggcagtcacaccatcctgcgtgggattcagacttgagcctgtcccagggcccctagcggggtgggcctccggggagggagggagggagggagggcgggcgctggggcgcggctcaacccttcagtgccccgcaggcggctgtgcgtggcgagcagtggacgcccatcgagcccaagccccgggagcggccgcagatcggaggcaccatcaagcagccgcccagcaaccccccgccgcggcccccggccgaggcccgcaagaagcccagcgaggaggaggctgcggcggcggcggggggacccccgggaggtccccaggtcaaccccatcccggtgaccgacgaggtcgtgtgacctcgccccggacctgccctcccaccaggtgcacccacctgcaataaatgcagcgaagccggg

SEQ ID NO: 31577 - DNA, 3371 bp, Homo sapiens
atcccccctcgactagcccgacaggggggttcggccgggagcgcagggcggcagtgcgcgcctagcagtgtcccagccgggttcgtgtcgccatggggcagatcgagtgggccatgtgggccaacgagcaggcgctggcgtccggcctgatcctcatcaccgggggcatcgtggccacagctgggcgcttcacccagtggtactttggtgcctactccattgtggcgggcgtgtttgtgtgcctgctggagtacccccgggggaagaggaagaagggctccaccatggagcgctggggacagaagcacatgaccgccgtggtgaagctgttcgggccctttaccaggaattactatgttcgggccgtcctgcatctcctggcctgtgtctgctgtctagtgtgcaggatttgtaaggatccactccaaatccgaggagctccgatccgtcgccagggtctggggctctcggtgcccgccggcttcctgctggccaccatccttgggaccgcctgcctggccattgcgagcggcatctacctactggtgagtggcgccctctgaggtcggccccggccacccccatccccagcccctgccctgacaccctcggacacgcatggcccttgaagccggctctgtaggctgagccaaggctgggagcaagtgtgagcctgggcgtgtgctcacagcacggcggggacgcagcggttgctgctgccatttttggcgtgtctagtgtgtcgggtcatttccttgcatttcctcattaacccgcaccacagccctgggaggggtactggggtccccactttacagacaaagatgcggaggctcagggaggtgctgtgactggcctggggtcacgcagccggccgaagaccgtgcctgcgcttgggtcccattatcaggcttttctcacctaaaccctattcgcgctgattcatgggcggtgccaggacgcagacattttcttaaactgccgacacctgcgtttggtttatgactgctgcaccctgttagaaggctgcccatcccatgggatacagtgatctctctgagaggccagggatgggtgggaggacagggcgcagcctggccaggccttgggtgaaatgccctctgcctgccctgggctccggaacagacggctgcaggccacctctcactgcgggggtctctgggtggacagagccctcagactttgcttatttaaatccttttgtccatagagccaagtccctcctgcccgcagaggcaactgccctccccttgctgtgcgtcttctagtgtgtgtgcgtgggaaaggtgcagcactttctgtgtacgccttccgcgtatggaagtggagttctgtttcaagcctcactgacctgccaccggcagaactctcctttagaaccccttcctgttgccaagtgctcatctgggctgttgctttgttttccgggggccacccgcatcccccccgtctccctgctgccacgcacagctagtggctcctggagacctcgggaggaattccttgtgctaaacccagagaggaattgctgggtcaggcatcagcctctgcaccgttcaccctgccgggctcagctgctccccagcagacaacccaccaccagccatgtggccccatctctcccaccatgcactaggctttctcccacgcttgccagtttcacagcacgagctggccgtgtggagcttggactcgcccttctctgactgtggatttgagctgttggagtttcttctcccttgagttgcctgttcaaatcctttgcccatttttctattgtggtttttgtatttttctttttcttcttttttttttgagatggagtctcgcgccatcgcccaggctggagtgcagtggcgtgatctcggctcactgcaaccttcgcctcctgggttcaagcaattctcctgcctcagcctcccgagtagctgggactacaggcacgtgccaccatgcctggctaatttttggtatttttagtagagacggggtttcaccgcgttagccaggatggtctggatctccttgaccttgtgatccgcccgcctcggcctcccaaagtgctgggattacaggcgtgagccaccgcgcccggcctgattgtctttttcttaagttgcaggaagtccacatatattttagctatttagcctttgtaacctttaaacactggggatgccttcatgctttctggtgagggtctgttaacttggcgcgtggagtccttcactgcacggaagagcagaggtttccctgttcacctgctctatggtctgtgctttgtgaaaacacctttccctggccctgggtcctgccttcacgttcctgccttttcttctatcagccttctagttttgcttttcagaatggaatgtttccgttttggagtcaggtaggatcacacatgtccagtttctctttctgttcatgacgtatatgatgtgacatatttttccaccagatattatgggatagaagatgaaaagcacacactcccaggtccacttgacctgttgcagtggaacctccgggcatgggcccaggagtctgtatttttagtaaaagccagtggaatcccgtggtcttcaagctctccccccaccacccccatgtgcagaaatgcctgggcacccttggggggctgccggccagcgtgggtgaatggcgcccaccagacggagcagggcctgctactctcctgggccacccctcctgctggacctcgggcctgcctccctgccttccctgcccttggcaccttgagaggagaatttgagtactagaatttgcatctgggagtgtccaccacgggatcttccagaagcccaggggttcgggccccactcctggcatgaagaaatagcttgggctggtgtcaggccgacccaggtcctggctgtgtggcctcgggcgcgtcacttaacctctctgagtggcagtcacaccatcctgcgtgggattcagacttgagcctgtcccagggcccctagcggggtgggcctccggggagggagggagggagggagggcgggcgctggggcgcggctcaacccttcagtgccccgcaggcggctgtgcgtggcgagcagtggacgcccatcgagcccaagccccgggagcggccgcagatcggaggcaccatcaagcagccgcccagcaaccccccgccgcggcccccggccgaggcccgcaagaagcccagcgaggaggaggctgcggcggcggcggggggacccccgggaggtccccaggtcaaccccatcccggtgaccgacgaggtcgtgtgacctcgccccggacctgccctcccaccaggtgcacccacctgcaataaatgcagcgaagccggg

SEQ ID NO: 31578 - DNA, 4395 bp, Homo sapiens
atcccccctcgactagcccgacaggggggttcggccgggagcgcagggcggcagtgcgcgcctagcagtgtcccagccgggttcgtgtcgccatggggcagatcgagtgggccatgtgggccaacgagcaggcgctggcgtccggcctgagtgagtgcacgtcagggacggtggaggctgcagcctggaggggtgtcccaagaccccagccgggacctcgggctacttacagggtggggaagtggggcgccaggcgggccaggccgggccggggtcaggccaggagggtgcggggaacgggggcgggaccctcaggccgcgggctggaaggaggagttctgagacccccagtaattcccttgcagaccctgcggagcgcggcgcccctcccccattcccttctctcggtcccccgactccgcgaaggaggaagttgcagcgcaggggaagaggcggttcagccccggtggtttccggggtcaccgccccgaagcccccgagtgggggctccggcctgggcatcgggagaagctcccctgcccctcggtagccagctggcctggaggtcgctctccctgggcttggggtggggaatgggctcatgccctggggctcagcccttctcatctggagtctgcgctggaggcggtctgagatttcacaaggcgccgaaaccacccagtgacggccctgcccagcccagctgcacaggcactttgctcttggggtgggatggcacagcccccagtcaccctcctgtgcatttgctcagaggttctggtgagggcagcggactccatttggaaatggaccctctcgggaccagggccagggagtgtctggcccagcacggtcctcatcaccgggggcatcgtggccacagctgggcgcttcacccagtggtactttggtgcctactccattgtggcgggcgtgtttgtgtgcctgctggagtacccccgggggaagaggaagaagggctccaccatggagcgctggggacagaagcacatgaccgccgtggtgaagctgttcgggccctttaccaggaattactatgttcgggccgtcctgcatctcctggcctgtgtctgctgtctagtgtgcaggatttgtaaggatccactccaaatccgaggagctccgatccgtcgccagggtctggggtcagcatgcactgctggggggtcttgcctgggcttcctggtagggtggagggttccgtgctgtgtgtctgctggttactgccggctgaggccaggacacccacacgtggctgcttcctccgagcaagtgcaccagagccgctagtgtccacatcaaggctgagaacacccaggaccgaaacaagccccggtccgcgcacgtcccctgggtctgcagtctgccttgtcctgagactttgtggccttggcccccagacctggggctccgttcccctttctgagtgcccttctgtgtccctgcctctcacccgctgtcccccagctctcggtgcccgccggcttcctgctggccaccatccttgggaccgcctgcctggccattgcgagcggcatctacctactggtgagtggcgccctctgaggtcggccccggccacccccatccccagcccctgccctgacaccctcggacacgcatggcccttgaagccggctctgtaggctgagccaaggctgggagcaagtgtgagcctgggcgtgtgctcacagcacggcggggacgcagcggttgctgctgccatttttggcgtgtctagtgtgtcgggtcatttccttgcatttcctcattaacccgcaccacagccctgggaggggtactggggtccccactttacagacaaagatgcggaggctcagggaggtgctgtgactggcctggggtcacgcagccggccgaagaccgtgcctgcgcttgggtcccattatcaggcttttctcacctaaaccctattcgcgctgattcatgggcggtgccaggacgcagacattttcttaaactgccgacacctgcgtttggtttatgactgctgcaccctgttagaaggctgcccatcccatgggatacagtgatctctctgagaggccagggatgggtgggaggacagggcgcagcctggccaggccttgggtgaaatgccctctgcctgccctgggctccggaacagacggctgcaggccacctctcactgcgggggtctctgggtggacagagccctcagactttgcttatttaaatccttttgtccatagagccaagtccctcctgcccgcagaggcaactgccctccccttgctgtgcgtcttctagtgtgtgtgcgtgggaaaggtgcagcactttctgtgtacgccttccgcgtatggaagtggagttctgtttcaagcctcactgacctgccaccggcagaactctcctttagaaccccttcctgttgccaagtgctcatctgggctgttgctttgttttccgggggccacccgcatcccccccgtctccctgctgccacgcacagctagtggctcctggagacctcgggaggaattccttgtgctaaacccagagaggaattgctgggtcaggcatcagcctctgcaccgttcaccctgccgggctcagctgctccccagcagacaacccaccaccagccatgtggccccatctctcccaccatgcactaggctttctcccacgcttgccagtttcacagcacgagctggccgtgtggagcttggactcgcccttctctgactgtggatttgagctgttggagtttcttctcccttgagttgcctgttcaaatcctttgcccatttttctattgtggtttttgtatttttctttttcttcttttttttttgagatggagtctcgcgccatcgcccaggctggagtgcagtggcgtgatctcggctcactgcaaccttcgcctcctgggttcaagcaattctcctgcctcagcctcccgagtagctgggactacaggcacgtgccaccatgcctggctaatttttggtatttttagtagagacggggtttcaccgcgttagccaggatggtctggatctccttgaccttgtgatccgcccgcctcggcctcccaaagtgctgggattacaggcgtgagccaccgcgcccggcctgattgtctttttcttaagttgcaggaagtccacatatattttagctatttagcctttgtaacctttaaacactggggatgccttcatgctttctggtgagggtctgttaacttggcgcgtggagtccttcactgcacggaagagcagaggtttccctgttcacctgctctatggtctgtgctttgtgaaaacacctttccctggccctgggtcctgccttcacgttcctgccttttcttctatcagccttctagttttgcttttcagaatggaatgtttccgttttggagtcaggtaggatcacacatgtccagtttctctttctgttcatgacgtatatgatgtgacatatttttccaccagatattatgggatagaagatgaaaagcacacactcccaggtccacttgacctgttgcagtggaacctccgggcatgggcccaggagtctgtatttttagtaaaagccagtggaatcccgtggtcttcaagctctccccccaccacccccatgtgcagaaatgcctgggcacccttggggggctgccggccagcgtgggtgaatggcgcccaccagacggagcagggcctgctactctcctgggccacccctcctgctggacctcgggcctgcctccctgccttccctgcccttggcaccttgagaggagaatttgagtactagaatttgcatctgggagtgtccaccacgggatcttccagaagcccaggggttcgggccccactcctggcatgaagaaatagcttgggctggtgtcaggccgacccaggtcctggctgtgtggcctcgggcgcgtcacttaacctctctgagtggcagtcacaccatcctgcgtgggattcagacttgagcctgtcccagggcccctagcggggtgggcctccggggagggagggagggagggagggcgggcgctggggcgcggctcaacccttcagtgccccgcaggcggctgtgcgtggcgagcagtggacgcccatcgagcccaagccccgggagcggccgcagatcggaggcaccatcaagcagccgcccagcaaccccccgccgcggcccccggccgaggcccgcaagaagcccagcgaggaggaggctgcggcggcggcggggggacccccgggaggtccccaggtcaaccccatcccggtgaccgacgaggtcgtgtgacctcgccccggacctgccctcccaccaggtgcacccacctgcaataaatgcagcgaagccggg

SEQ ID NO: 31579 - DNA, 3361 bp, Homo sapiens
atcgactgccactggatgtttatcgatgccactgggtgtttatcgatgccactggtgtttatcgatgccacgtccaggtcactccggtagcagcgtctgccctcagatgcaaggagatcgtccagccacgccctgatttgctgagcctgttaaggctgaacaggagagccctaggtgacgggcctagaaacttccgtaggaagccccatgggcagcttgggtggtcctcatcaccgggggcatcgtggccacagctgggcgcttcacccagtggtactttggtgcctactccattgtggcgggcgtgtttgtgtgcctgctggagtacccccgggggaagaggaagaagggctccaccatggagcgctggggacagaagcacatgaccgccgtggtgaagctgttcgggccctttaccaggaattactatgttcgggccgtcctgcatctcctgctctcggtgcccgccggcttcctgctggccaccatccttgggaccgcctgcctggccattgcgagcggcatctacctactggtgagtggcgccctctgaggtcggccccggccacccccatccccagcccctgccctgacaccctcggacacgcatggcccttgaagccggctctgtaggctgagccaaggctgggagcaagtgtgagcctgggcgtgtgctcacagcacggcggggacgcagcggttgctgctgccatttttggcgtgtctagtgtgtcgggtcatttccttgcatttcctcattaacccgcaccacagccctgggaggggtactggggtccccactttacagacaaagatgcggaggctcagggaggtgctgtgactggcctggggtcacgcagccggccgaagaccgtgcctgcgcttgggtcccattatcaggcttttctcacctaaaccctattcgcgctgattcatgggcggtgccaggacgcagacattttcttaaactgccgacacctgcgtttggtttatgactgctgcaccctgttagaaggctgcccatcccatgggatacagtgatctctctgagaggccagggatgggtgggaggacagggcgcagcctggccaggccttgggtgaaatgccctctgcctgccctgggctccggaacagacggctgcaggccacctctcactgcgggggtctctgggtggacagagccctcagactttgcttatttaaatccttttgtccatagagccaagtccctcctgcccgcagaggcaactgccctccccttgctgtgcgtcttctagtgtgtgtgcgtgggaaaggtgcagcactttctgtgtacgccttccgcgtatggaagtggagttctgtttcaagcctcactgacctgccaccggcagaactctcctttagaaccccttcctgttgccaagtgctcatctgggctgttgctttgttttccgggggccacccgcatcccccccgtctccctgctgccacgcacagctagtggctcctggagacctcgggaggaattccttgtgctaaacccagagaggaattgctgggtcaggcatcagcctctgcaccgttcaccctgccgggctcagctgctccccagcagacaacccaccaccagccatgtggccccatctctcccaccatgcactaggctttctcccacgcttgccagtttcacagcacgagctggccgtgtggagcttggactcgcccttctctgactgtggatttgagctgttggagtttcttctcccttgagttgcctgttcaaatcctttgcccatttttctattgtggtttttgtatttttctttttcttcttttttttttgagatggagtctcgcgccatcgcccaggctggagtgcagtggcgtgatctcggctcactgcaaccttcgcctcctgggttcaagcaattctcctgcctcagcctcccgagtagctgggactacaggcacgtgccaccatgcctggctaatttttggtatttttagtagagacggggtttcaccgcgttagccaggatggtctggatctccttgaccttgtgatccgcccgcctcggcctcccaaagtgctgggattacaggcgtgagccaccgcgcccggcctgattgtctttttcttaagttgcaggaagtccacatatattttagctatttagcctttgtaacctttaaacactggggatgccttcatgctttctggtgagggtctgttaacttggcgcgtggagtccttcactgcacggaagagcagaggtttccctgttcacctgctctatggtctgtgctttgtgaaaacacctttccctggccctgggtcctgccttcacgttcctgccttttcttctatcagccttctagttttgcttttcagaatggaatgtttccgttttggagtcaggtaggatcacacatgtccagtttctctttctgttcatgacgtatatgatgtgacatatttttccaccagatattatgggatagaagatgaaaagcacacactcccaggtccacttgacctgttgcagtggaacctccgggcatgggcccaggagtctgtatttttagtaaaagccagtggaatcccgtggtcttcaagctctccccccaccacccccatgtgcagaaatgcctgggcacccttggggggctgccggccagcgtgggtgaatggcgcccaccagacggagcagggcctgctactctcctgggccacccctcctgctggacctcgggcctgcctccctgccttccctgcccttggcaccttgagaggagaatttgagtactagaatttgcatctgggagtgtccaccacgggatcttccagaagcccaggggttcgggccccactcctggcatgaagaaatagcttgggctggtgtcaggccgacccaggtcctggctgtgtggcctcgggcgcgtcacttaacctctctgagtggcagtcacaccatcctgcgtgggattcagacttgagcctgtcccagggcccctagcggggtgggcctccggggagggagggagggagggagggcgggcgctggggcgcggctcaacccttcagtgccccgcaggcggctgtgcgtggcgagcagtggacgcccatcgagcccaagccccgggagcggccgcagatcggaggcaccatcaagcagccgcccagcaaccccccgccgcggcccccggccgaggcccgcaagaagcccagcgaggaggaggctgcggcggcggcggggggacccccgggaggtccccaggtcaaccccatcccggtgaccgacgaggtcgtgtgacctcgccccggacctgccctcccaccaggtgcacccacctgcaataaatgcagcgaagccggg

SEQ ID NO: 31580 - DNA, 3901 bp, Homo sapiens
tctcaaatcaaccgaacatccagccgggttcgtgtcgccatggggcagatcgagtgggccatgtgggccaacgagcaggcgctggcgtccggcctgatcctcatcaccgggggcatcgtggccacagctgggcgcttcacccagtggtactttggtgcctactccattgtggcgggcgtgtttgtgtgcctgctggagtacccccgggggaagaggaagaagggctccaccatggagcgctggtgagtcccctcctgctctggggtctctccgggggttgcggggcccaggcagggctcacagggttgggtggagcttggtttctcacttggaggctccggaaccaaccctttggtgcttgtgggtaaaccaaggccggtgcctgcccggtgtgttttgtgggaggaaagaggcctgggtgccctggggtggtcagcagggcagcaaaggagtcccgagtgggagaggcccagccgcgccgtctcgccttcctccctcccccaggggacagaagcacatgaccgccgtggtgaagctgttcgggccctttaccaggaattactatgttcgggccgtcctgcatctcctggcctgtgtctgctgtctagtgtgcaggatttgtaaggatccactccaaatccgaggagctccgatccgtcgccagggtctggggtcagcatgcactgctggggggtcttgcctgggcttcctggtagggtggagggttccgtgctgtgtgtctgctggttactgccggctgaggccaggacacccacacgtggctgcttcctccgagcaagtgcaccagagccgctagtgtccacatcaaggctgagaacacccaggaccgaaacaagccccggtccgcgcacgtcccctgggtctgcagtctgccttgtcctgagactttgtggccttggcccccagacctggggctccgttcccctttctgagtgcccttctgtgtccctgcctctcacccgctgtcccccagctctcggtgcccgccggcttcctgctggccaccatccttgggaccgcctgcctggccattgcgagcggcatctacctactggtgagtggcgccctctgaggtcggccccggccacccccatccccagcccctgccctgacaccctcggacacgcatggcccttgaagccggctctgtaggctgagccaaggctgggagcaagtgtgagcctgggcgtgtgctcacagcacggcggggacgcagcggttgctgctgccatttttggcgtgtctagtgtgtcgggtcatttccttgcatttcctcattaacccgcaccacagccctgggaggggtactggggtccccactttacagacaaagatgcggaggctcagggaggtgctgtgactggcctggggtcacgcagccggccgaagaccgtgcctgcgcttgggtcccattatcaggcttttctcacctaaaccctattcgcgctgattcatgggcggtgccaggacgcagacattttcttaaactgccgacacctgcgtttggtttatgactgctgcaccctgttagaaggctgcccatcccatgggatacagtgatctctctgagaggccagggatgggtgggaggacagggcgcagcctggccaggccttgggtgaaatgccctctgcctgccctgggctccggaacagacggctgcaggccacctctcactgcgggggtctctgggtggacagagccctcagactttgcttatttaaatccttttgtccatagagccaagtccctcctgcccgcagaggcaactgccctccccttgctgtgcgtcttctagtgtgtgtgcgtgggaaaggtgcagcactttctgtgtacgccttccgcgtatggaagtggagttctgtttcaagcctcactgacctgccaccggcagaactctcctttagaaccccttcctgttgccaagtgctcatctgggctgttgctttgttttccgggggccacccgcatcccccccgtctccctgctgccacgcacagctagtggctcctggagacctcgggaggaattccttgtgctaaacccagagaggaattgctgggtcaggcatcagcctctgcaccgttcaccctgccgggctcagctgctccccagcagacaacccaccaccagccatgtggccccatctctcccaccatgcactaggctttctcccacgcttgccagtttcacagcacgagctggccgtgtggagcttggactcgcccttctctgactgtggatttgagctgttggagtttcttctcccttgagttgcctgttcaaatcctttgcccatttttctattgtggtttttgtatttttctttttcttcttttttttttgagatggagtctcgcgccatcgcccaggctggagtgcagtggcgtgatctcggctcactgcaaccttcgcctcctgggttcaagcaattctcctgcctcagcctcccgagtagctgggactacaggcacgtgccaccatgcctggctaatttttggtatttttagtagagacggggtttcaccgcgttagccaggatggtctggatctccttgaccttgtgatccgcccgcctcggcctcccaaagtgctgggattacaggcgtgagccaccgcgcccggcctgattgtctttttcttaagttgcaggaagtccacatatattttagctatttagcctttgtaacctttaaacactggggatgccttcatgctttctggtgagggtctgttaacttggcgcgtggagtccttcactgcacggaagagcagaggtttccctgttcacctgctctatggtctgtgctttgtgaaaacacctttccctggccctgggtcctgccttcacgttcctgccttttcttctatcagccttctagttttgcttttcagaatggaatgtttccgttttggagtcaggtaggatcacacatgtccagtttctctttctgttcatgacgtatatgatgtgacatatttttccaccagatattatgggatagaagatgaaaagcacacactcccaggtccacttgacctgttgcagtggaacctccgggcatgggcccaggagtctgtatttttagtaaaagccagtggaatcccgtggtcttcaagctctccccccaccacccccatgtgcagaaatgcctgggcacccttggggggctgccggccagcgtgggtgaatggcgcccaccagacggagcagggcctgctactctcctgggccacccctcctgctggacctcgggcctgcctccctgccttccctgcccttggcaccttgagaggagaatttgagtactagaatttgcatctgggagtgtccaccacgggatcttccagaagcccaggggttcgggccccactcctggcatgaagaaatagcttgggctggtgtcaggccgacccaggtcctggctgtgtggcctcgggcgcgtcacttaacctctctgagtggcagtcacaccatcctgcgtgggattcagacttgagcctgtcccagggcccctagcggggtgggcctccggggagggagggagggagggagggcgggcgctggggcgcggctcaacccttcagtgccccgcaggcggctgtgcgtggcgagcagtggacgcccatcgagcccaagccccgggagcggccgcagatcggaggcaccatcaagcagccgcccagcaaccccccgccgcggcccccggccgaggcccgcaagaagcccagcgaggaggaggctgcggcggcggcggggggacccccgggaggtccccaggtcaaccccatcccggtgaccgacgaggtcgtgtgacctcgccccggacctgccctcccaccaggtgcacccacctgcaataaatgcagcgaagccggg

SEQ ID NO: 31581 - DNA, 3274 bp, Homo sapiens
gcaccctacagatgcgggtctccgcccagccgcggtcacctggggggctgggggcggggcctgggcggggcggggttcggccgggagcgcagggcggcagtgcgcgcctagcagtgtcccagccgggttcgtgtcgccatggggcagatcgagtgggccatgtgggccaacgagcaggcgctggcgtccggcctgatcctcatcaccgggggcatcgtggccacagctgggcgcttcacccagtggtactttggtgcctactccattgtggcgggcgtgtttgtgtgcctgctggagtacccccgggggaagaggaagaagggctccaccatggagcgctggggacagaagcacatgaccgccgtggtgaagctgttcgggccctttaccaggaattactatgttcgggccgtcctgcatctcctgctctcggtgcccgccggcttcctgctggccaccatccttgggaccgcctgcctggccattgcgagcggcatctacctactggtgagtggcgccctctgaggtcggccccggccacccccatccccagcccctgccctgacaccctcggacacgcatggcccttgaagccggctctgtaggctgagccaaggctgggagcaagtgtgagcctgggcgtgtgctcacagcacggcggggacgcagcggttgctgctgccatttttggcgtgtctagtgtgtcgggtcatttccttgcatttcctcattaacccgcaccacagccctgggaggggtactggggtccccactttacagacaaagatgcggaggctcagggaggtgctgtgactggcctggggtcacgcagccggccgaagaccgtgcctgcgcttgggtcccattatcaggcttttctcacctaaaccctattcgcgctgattcatgggcggtgccaggacgcagacattttcttaaactgccgacacctgcgtttggtttatgactgctgcaccctgttagaaggctgcccatcccatgggatacagtgatctctctgagaggccagggatgggtgggaggacagggcgcagcctggccaggccttgggtgaaatgccctctgcctgccctgggctccggaacagacggctgcaggccacctctcactgcgggggtctctgggtggacagagccctcagactttgcttatttaaatccttttgtccatagagccaagtccctcctgcccgcagaggcaactgccctccccttgctgtgcgtcttctagtgtgtgtgcgtgggaaaggtgcagcactttctgtgtacgccttccgcgtatggaagtggagttctgtttcaagcctcactgacctgccaccggcagaactctcctttagaaccccttcctgttgccaagtgctcatctgggctgttgctttgttttccgggggccacccgcatcccccccgtctccctgctgccacgcacagctagtggctcctggagacctcgggaggaattccttgtgctaaacccagagaggaattgctgggtcaggcatcagcctctgcaccgttcaccctgccgggctcagctgctccccagcagacaacccaccaccagccatgtggccccatctctcccaccatgcactaggctttctcccacgcttgccagtttcacagcacgagctggccgtgtggagcttggactcgcccttctctgactgtggatttgagctgttggagtttcttctcccttgagttgcctgttcaaatcctttgcccatttttctattgtggtttttgtatttttctttttcttcttttttttttgagatggagtctcgcgccatcgcccaggctggagtgcagtggcgtgatctcggctcactgcaaccttcgcctcctgggttcaagcaattctcctgcctcagcctcccgagtagctgggactacaggcacgtgccaccatgcctggctaatttttggtatttttagtagagacggggtttcaccgcgttagccaggatggtctggatctccttgaccttgtgatccgcccgcctcggcctcccaaagtgctgggattacaggcgtgagccaccgcgcccggcctgattgtctttttcttaagttgcaggaagtccacatatattttagctatttagcctttgtaacctttaaacactggggatgccttcatgctttctggtgagggtctgttaacttggcgcgtggagtccttcactgcacggaagagcagaggtttccctgttcacctgctctatggtctgtgctttgtgaaaacacctttccctggccctgggtcctgccttcacgttcctgccttttcttctatcagccttctagttttgcttttcagaatggaatgtttccgttttggagtcaggtaggatcacacatgtccagtttctctttctgttcatgacgtatatgatgtgacatatttttccaccagatattatgggatagaagatgaaaagcacacactcccaggtccacttgacctgttgcagtggaacctccgggcatgggcccaggagtctgtatttttagtaaaagccagtggaatcccgtggttgccggccagcgtgggtgaatggcgcccaccagacggagcagggcctgctactctcctgggccacccctcctgctggacctcgggcctgcctccctgccttccctgcccttggcaccttgagaggagaatttgagtactagaatttgcatctgggagtgtccaccacgggatcttccagaagcccaggggttcgggccccactcctggcatgaagaaatagcttgggctggtgtcaggccgacccaggtcctggctgtgtggcctcgggcgcgtcacttaacctctctgagtggcagtcacaccatcctgcgtgggattcagacttgagcctgtcccagggcccctagcggggtgggcctccggggagggagggagggagggagggcgggcgctggggcgcggctcaacccttcagtgccccgcaggcggctgtgcgtggcgagcagtggacgcccatcgagcccaagccccgggagcggccgcagatcggaggcaccatcaagcagccgcccagcaaccccccgccgcggcccccggccgaggcccgcaagaagcccagcgaggaggaggctgcggcggcggcggggggacccccgggaggtccccaggtcaaccccatcccggtgaccgacgaggtcgtgtgacctcgccccggacctgccctcccaccaggtgcacccacctgcaataaatgcagcgaagccggg

SEQ ID NO: 31582 - DNA, 3177 bp, Homo sapiens
atgaggggttccaccatggagcgctggggacagaagcacatgaccgccgtggtgaagctgttcgggccctttaccaggaattactatgttcgggccgtcctgcatctcctgctctcggtgcccgccggcttcctgctggagtacccccgggggaagaggaagaagggctccaccatggagcgctggggacagaagcacatgaccgccgtggtgaagctgttcgggccctttaccaggaattactatgttcgggccgtcctgcatctcctgctctcggtgcccgccggcttcctgctggccaccatccttgggaccgcctgcctggccattgcgagcggcatctacctactggtgagtggcgccctctgaggtcggccccggccacccccatccccagcccctgccctgacaccctcggacacgcatggcccttgaagccggctctgtaggctgagccaaggctgggagcaagtgtgagcctgggcgtgtgctcacagcacggcggggacgcagcggttgctgctgccatttttggcgtgtctagtgtgtcgggtcatttccttgcatttcctcattaacccgcaccacagccctgggaggggtactggggtccccactttacagacaaagatgcggaggctcagggaggtgctgtgactggcctggggtcacgcagccggccgaagaccgtgcctgcgcttgggtcccattatcaggcttttctcacctaaaccctattcgcgctgattcatgggcggtgccaggacgcagacattttcttaaactgccgacacctgcgtttggtttatgactgctgcaccctgttagaaggctgcccatcccatgggatacagtgatctctctgagaggccagggatgggtgggaggacagggcgcagcctggccaggccttgggtgaaatgccctctgcctgccctgggctccggaacagacggctgcaggccacctctcactgcgggggtctctgggtggacagagccctcagactttgcttatttaaatccttttgtccatagagccaagtccctcctgcccgcagaggcaactgccctccccttgctgtgcgtcttctagtgtgtgtgcgtgggaaaggtgcagcactttctgtgtacgccttccgcgtatggaagtggagttctgtttcaagcctcactgacctgccaccggcagaactctcctttagaaccccttcctgttgccaagtgctcatctgggctgttgctttgttttccgggggccacccgcatcccccccgtctccctgctgccacgcacagctagtggctcctggagacctcgggaggaattccttgtgctaaacccagagaggaattgctgggtcaggcatcagcctctgcaccgttcaccctgccgggctcagctgctccccagcagacaacccaccaccagccatgtggccccatctctcccaccatgcactaggctttctcccacgcttgccagtttcacagcacgagctggccgtgtggagcttggactcgcccttctctgactgtggatttgagctgttggagtttcttctcccttgagttgcctgttcaaatcctttgcccatttttctattgtggtttttgtatttttctttttcttcttttttttttgagatggagtctcgcgccatcgcccaggctggagtgcagtggcgtgatctcggctcactgcaaccttcgcctcctgggttcaagcaattctcctgcctcagcctcccgagtagctgggactacaggcacgtgccaccatgcctggctaatttttggtatttttagtagagacggggtttcaccgcgttagccaggatggtctggatctccttgaccttgtgatccgcccgcctcggcctcccaaagtgctgggattacaggcgtgagccaccgcgcccggcctgattgtctttttcttaagttgcaggaagtccacatatattttagctatttagcctttgtaacctttaaacactggggatgccttcatgctttctggtgagggtctgttaacttggcgcgtggagtccttcactgcacggaagagcagaggtttccctgttcacctgctctatggtctgtgctttgtgaaaacacctttccctggccctgggtcctgccttcacgttcctgccttttcttctatcagccttctagttttgcttttcagaatggaatgtttccgttttggagtcaggtaggatcacacatgtccagtttctctttctgttcatgacgtatatgatgtgacatatttttccaccagatattatgggatagaagatgaaaagcacacactcccaggtccacttgacctgttgcagtggaacctccgggcatgggcccaggagtctgtatttttagtaaaagccagtggaatcccgtggtcttcaagctctccccccaccacccccatgtgcagaaatgcctgggcacccttggggggctgccggccagcgtgggtgaatggcgcccaccagacggagcagggcctgctactctcctgggccacccctcctgctggacctcgggcctgcctccctgccttccctgcccttggcaccttgagaggagaatttgagtactagaatttgcatctgggagtgtccaccacgggatcttccagaagcccaggggttcgggccccactcctggcatgaagaaatagcttgggctggtgtcaggccgacccaggtcctggctgtgtggcctcgggcgcgtcacttaacctctctgagtggcagtcacaccatcctgcgtgggattcagacttgagcctgtcccagggcccctagcggggtgggcctccggggagggagggagggagggagggcgggcgctggggcgcggctcaacccttcagtgccccgcaggcggctgtgcgtggcgagcagtggacgcccatcgagcccaagccccgggagcggccgcagatcggaggcaccatcaagcagccgcccagcaaccccccgccgcggcccccggccgaggcccgcaagaagcccagcgaggaggaggctgcggcggcggcggggggacccccgggaggtccccaggtcaaccccatcccggtgaccgacgaggtcgtgtgacctcgccccggacctgccctcccaccaggtgcacccacctgcaataaatgcagcgaagccggg

SEQ ID NO: 31583 - DNA, 1764 bp, Homo sapiens
  misc_feature (29)..(29): n is a, c, g, or t
  misc_feature (43)..(43): n is a, c, g, or t
  misc_feature (45)..(45): n is a, c, g, or t
  misc_feature (48)..(48): n is a, c, g, or t
  misc_feature (58)..(58): n is a, c, g, or t
ccaaacctttaacggtggccttcttcttnccttcccccccaancnggncccttttggnccccccaaaggtttttcacagcacgagctggccgtgtggagcttggactcgcccttctctgactgtggatttgagctgttggagtttcttctcccttgagttgcctgttcaaatcctttgcccatttttctattgtggtttttgtatttttctttttcttcttttttttttgagatggagtctcgcgccatcgcccaggctggagtgcagtggcgtgatctcggctcactgcaaccttcgcctcctgggttcaagcaattctcctgcctcagcctcccgagtagctgggactacaggcacgtgccaccatgcctggctaatttttggtatttttagtagagacggggtttcaccgcgttagccaggatggtctggatctccttgaccttgtgatccgcccgcctcggcctcccaaagtgctgggattacaggcgtgagccaccgcgcccggcctgattgtctttttcttaagttgcaggaagtccacatatattttagctatttagcctttgtaacctttaaacactggggatgccttcatgctttctggtgagggtctgttaacttggcgcgtggagtccttcactgcacggaagagcagaggtttccctgttcacctgctctatggtctgtgctttgtgaaaacacctttccctggccctgggtcctgccttcacgttcctgccttttcttctatcagccttctagttttgcttttcagaatggaatgtttccgttttggagtcaggtaggatcacacatgtccagtttctctttctgttcatgacgtatatgatgtgacatatttttccaccagatattatgggatagaagatgaaaagcacacactcccaggtccacttgacctgttgcagtggaacctccgggcatgggcccaggagtctgtatttttagtaaaagccagtggaatcccgtggtcttcaagctctccccccaccacccccatgtgcagaaatgcctgggcacccttggggggctgccggccagcgtgggtgaatggcgcccaccagacggagcagggcctgctactctcctgggccacccctcctgctggacctcgggcctgcctccctgccttccctgcccttggcaccttgagaggagaatttgagtactagaatttgcatctgggagtgtccaccacgggatcttccagaagcccaggggttcgggccccactcctggcatgaagaaatagcttgggctggtgtcaggccgacccaggtcctggctgtgtggcctcgggcgcgtcacttaacctctctgagtggcagtcacaccatcctgcgtgggattcagacttgagcctgtcccagggcccctagcggggtgggcctccggggagggagggagggagggagggcgggcgctggggcgcggctcaacccttcagtgccccgcaggcggctgtgcgtggcgagcagtggacgcccatcgagcccaagccccgggagcggccgcagatcggaggcaccatcaagcagccgcccagcaaccccccgccgcggcccccggccgaggcccgcaagaagcccagcgaggaggaggctgcggcggcggcggggggacccccgggaggtccccaggtcaaccccatcccggtgaccgacgaggtcgtgtgacctcgccccggacctgccctcccaccaggtgcacccacctgcaataaatgcagcgaagccggg

SEQ ID NO: 31584 - DNA, 1446 bp, Homo sapiens
atcccccctcgactagcccgacaggggggttcggccgggagcgcagggcggcagtgcgcgcctagcagtgtcccagccgggttcgtgtcgccatggggcagatcgagtgggccatgtgggccaacgagcaggcgctggcgtccggcctgagtgagtgcacgtcagggacggtggaggctgcagcctggaggggtgtcccaagaccccagccgggacctcgggctacttacagggtggggaagtggggcgccaggcgggccaggccgggccggggtcaggccaggagggtgcggggaacgggggcgggaccctcaggccgcgggctggaaggaggagttctgagacccccagtaattcccttgcagaccctgcggagcgcggcgcccctcccccattcccttctctcggtcccccgactccgcgaaggaggaagttgcagcgcaggggaagaggcggttcagccccggtggtttccggggtcaccgccccgaagcccccgagtgggggctccggcctgggcatcgggagaagctcccctgcccctcggtagccagctggcctggaggtcgctctccctgggcttggggtggggaatgggctcatgccctggggctcagcccttctcatctggagtctgcgctggaggcggtctgagatttcacaaggcgccgaaaccacccagtgacggccctgcccagcccagctgcacaggcactttgctcttggggtgggatggcacagcccccagtcaccctcctgtgcatttgctcagaggttctggtgagggcagcggactccatttggaaatggaccctctcgggaccagggccagggagtgtctggcccagcacggtcctcatcaccgggggcatcgtggccacagctgggcgcttcacccagtggtactttggtgcctactccattgtggcgggcgtgtttgtgtgcctgctggagtacccccgggggaagaggaagaagggctccaccatggagcgctggggacagaagcacatgaccgccgtggtgaagctgttcgggccctttaccaggaattactatgttcgggccgtcctgcatctcctgctctcggtgcccgccggcttcctgctggccaccatccttgggaccgcctgcctggccattgcgagcggcatctacctactggcggctgtgcgtggcgagcagtggacgcccatcgagcccaagccccgggagcggccgcagatcggaggcaccatcaagcagccgcccagcaaccccccgccgcggcccccggccgaggcccgcaagaagcccagcgaggaggaggctgcggcggcggcggggggacccccgggaggtccccaggtcaaccccatcccggtgaccgacgaggtcgtgtgacctcgccccggacctgccctcccaccaggtgcacccacctgcaataaatgcagcgaagccggg

SEQ ID NO: 31585 - DNA, 2158 bp, Homo sapiens
  misc_feature (980)..(980): n is a, c, g, or t
atcccccctcgactagcccgacaggggggttcggccgggagcgcagggcggcagtgcgcgcctagcagtgtcccagccgggttcgtgtcgccatggggcagatcgagtgggccatgtgggccaacgagcaggcgctggcgtccggcctgagtgagtgcacgtcagggacggtggaggctgcagcctggaggggtgtcccaagaccccagccgggacctcgggctacttacagggtggggaagtggggcgccaggcgggccaggccgggccggggtcaggccaggagggtgcggggaacgggggcgggaccctcaggccgcgggctggaaggaggagttctgagacccccagtaattcccttgcagaccctgcggagcgcggcgcccctcccccattcccttctctcggtcccccgactccgcgaaggaggaagttgcagcgcaggggaagaggcggttcagccccggtggtttccggggtcaccgccccgaagcccccgagtgggggctccggcctgggcatcgggagaagctcccctgcccctcggtagccagctggcctggaggtcgctctccctgggcttggggtggggaatgggctcatgccctggggctcagcccttctcatctggagtctgcgctggaggcggtctgagatttcacaaggcgccgaaaccacccagtgacggccctgcccagcccagctgcacaggcactttgctcttggggtgggatggcacagcccccagtcaccctcctgtgcatttgctcagaggttctggtgagggcagcggactccatttggaaatggaccctctcgggaccagggccagggagtgtctggcccagcacgggtgaggctgggctcaggcgaggtctgagggcagaggcaccactgcagcagctccaggaaggacctgcaccgggggaggagtgcctgggaagggcctgggggctgagggtgaggaggaggggcccgcngccaccactcccctggggctctgagcgccctccctgttgtctggagggtgcgtggcagctggagtgggagcagagacctcagggtgggagggctggaggacggggccctgcagcctgtcctgtgcccaggaaagtgaccgcctgcttcgagtcagcggccaagaagtcggtgggtcagttcagacagctctccccagagctgccccgtgagactcaccctgcctgccccgcactccctacaggaagtagacggactgagggcacccagctgggagccaggagacctgggctctagtctggcctcctgctgaaaccctccaggggctcctggcccgaagagttagagccagactggacgccctgcactgcccgccctggcctcccggctctccggccccctcctccagctgccgtgcttcctttctgttcctagatctcctgagcgtgccccagggcctcggcacaagctgctgcttctgcagagcctcatggctgtctcatttatttctcaattcaaatgccacctgcctggggaggtccttccagaccgtgcagccccaggaggcagctggcccggagacagcagggccttgacaaagagtcccccctgtacacagcaggtgctctgtaaatgtggctgggtgccagaatacgtcctcagacctccctggtggcaccagcggcagctttgcaccctctttcggatggcaggctcgggaccaggacggtccccaaagatgcatggacaattggctgagtagactcaaggacactgccctcccctcctccgacgcagacagacaaacccagagagttaatgtgtagctgggctcaaaccaaggataggaaatcttccaacaagaccatgtggagacaaaaacagaatggctggcagggcaaggtggctacacctgtaatcctagcactttgggaggccaaggcgggcggatcacgaggtcaggagatcgagaccatcctggctaacacagtgaaaccccgtctctactaaaaatacaaaaaattagccgggtatggtggcaggcgcgcatagtcccagctactcgggaggctgaggcaggagaatcgcttcaacctgggaggtggaggttgtagtgagctgagatcacgccacggaactccagcctgggtgacagggcaagactctgtctccaaaaaaa

SEQ ID NO: 31586 - DNA, 1923 bp, Homo sapiens
gcaccctacagatgcgggtctccgcccagccgcggtcacctggggggctgggggcggggcctgggcggggcggggttcggccgggagcgcagggcggcagtgcgcgcctagcagtgtcccagccgggttcgtgtcgccatggggcagatcgagtgggccatgtgggccaacgagcaggcgctggcgtccggcctgatcctcatcaccgggggcatcgtggccacagctgggcgcttcacccagtggtactttggtgcctactccattgtggcgggcgtgtttgtgtgcctgctggagtacccccgggggaagaggaagaagggctccaccatggagcgctggggacagaagcacatgaccgccgtggtgaagctgttcgggccctttaccaggaattactatgttcgggccgtcctgcatctcctgctctcggtgcccgccggcttcctgctggccaccatccttgggaccgcctgcctggccattgcgagcggcatctacctactggtgagtggcgccctctgaggtcggccccggccacccccatccccagcccctgccctgacaccctcggacacgcatggcccttgaagccggctctgtaggctgagccaaggctgggagcaagtgtgagcctgggcgtgtgctcacagcacggcggggacgcagcggttgctgctgccatttttggcgtgtctagtgtgtcgggtcatttccttgcatttcctcattaacccgcaccacagccctgggaggggtactggggtccccactttacagacaaagatgcggaggctcagggaggtgctgtgactggcctggggtcacgcagccggccgaagaccgtgcctgcgcttgggtcccattatcaggcttttctcacctaaaccctattcgcgctgattcatgggcggtgccaggacgcagacattttcttaaactgccgacacctgcgtttggtttatgactgctgcaccctgttagaaggctgcccatcccatgggatacagtgatctctctgagaggccagggatgggtgggaggacagggcgcagcctggccaggccttgggtgaaatgccctctgcctgccctgggctccggaacagacggctgcaggccacctctcactgcgggggtctctgggtggacagagccctcagactttgcttatttaaatccttttgtccatagagccaagtccctcctgcccgcagaggcaactgccctccccttgctgtgcgtcttctagtgtgtgtgcgtgggaaaggtgcagcactttctgtgtacgccttccgcgtatggaagtggagttctgtttcaagcctcactgacctgccaccggcagaactctcctttagaaccccttcctgttgccaagtgctcatctgggctgttgctttgttttccgggggccacccgcatcccccccgtctccctgctgccacgcacagctagtggctcctggagacctcgggaggaattccttgtgctaaacccagagaggaattgctgggtcaggcatcagcctctgcaccgttcaccctgccgggctcagctgctccccagcagacaacccaccaccagccatgtggccccatctctcccaccatgcactaggctttctcccacgcttgccagtttcacagcacgagctggccgtgtggagcttggactcgcccttctctgactgtggatttgagctgttggagtttcttctcccttgagttgcctgttcaaatcctttgcccatttttctattgtggtttttgtatttttctttttcttcttttttttttgagatggagtctcgcgccatcgcccaggctggagaatcgcttcaacctgggaggtggaggttgtagtgagctgagatcacgccacggaactccagcctgggtgacagggcaagaatctgtctcca

SEQ ID NO: 31587 - DNA, 2439 bp, Homo sapiens
  misc_feature (980)..(980): n is a, c, g, or t
atcccccctcgactagcccgacaggggggttcggccgggagcgcagggcggcagtgcgcgcctagcagtgtcccagccgggttcgtgtcgccatggggcagatcgagtgggccatgtgggccaacgagcaggcgctggcgtccggcctgagtgagtgcacgtcagggacggtggaggctgcagcctggaggggtgtcccaagaccccagccgggacctcgggctacttacagggtggggaagtggggcgccaggcgggccaggccgggccggggtcaggccaggagggtgcggggaacgggggcgggaccctcaggccgcgggctggaaggaggagttctgagacccccagtaattcccttgcagaccctgcggagcgcggcgcccctcccccattcccttctctcggtcccccgactccgcgaaggaggaagttgcagcgcaggggaagaggcggttcagccccggtggtttccggggtcaccgccccgaagcccccgagtgggggctccggcctgggcatcgggagaagctcccctgcccctcggtagccagctggcctggaggtcgctctccctgggcttggggtggggaatgggctcatgccctggggctcagcccttctcatctggagtctgcgctggaggcggtctgagatttcacaaggcgccgaaaccacccagtgacggccctgcccagcccagctgcacaggcactttgctcttggggtgggatggcacagcccccagtcaccctcctgtgcatttgctcagaggttctggtgagggcagcggactccatttggaaatggaccctctcgggaccagggccagggagtgtctggcccagcacgggtgaggctgggctcaggcgaggtctgagggcagaggcaccactgcagcagctccaggaaggacctgcaccgggggaggagtgcctgggaagggcctgggggctgagggtgaggaggaggggcccgcngccaccactcccctggggctctgagcgccctccctgttgtctggagggtgcgtggcagctggagtgggagcagagacctcagggtgggagggctggaggacggggccctgcagcctgtcctgtgcccaggaaagtgaccgcctgcttcgagtcagcggccaagaagtcggtgggtcagttcagacagctctccccagagctgccccgtgagactcaccctgcctgccccgcactccctacaggaagtagacggactgagggcacccagctgggagccaggagacctgggctctagtctggcctcctgctgaaaccctccaggggctcctggcccgaagagttagagccagactggacgccctgcactgcccgccctggcctcccggctctccggccccctcctccagctgccgtgcttcctttctgttcctagatctcctgagcgtgccccagggcctcggcacaagctgctgcttctgcagagcctcatggctgtctcatttatttctcaattcaaatgccacctgcctggggaggtccttccagaccgtgcagccccaggaggcagctggcccggagacagcagggccttgacaaagagtcccccctgtacacagcaggtgctctgtaaatgtggctgggtgccagaatacgtcctcagacctccctggtggcaccagcggcagctttgcaccctctttcggatggcaggctcgggaccaggacggtccccaaagatgcatggacaattggctgagtagactcaaggacactgccctcccctcctccgacgcagacagacaaacccagagagttaatgtgtagtggacctcgggcctgcctccctgccttccctgcccttggcaccttgagaggagaatttgagtactagaatttgcatctgggagtgtccaccacgggatcttccagaagcccaggggttcgggccccactcctggcatgaagaaatagcttgggctggtgtcaggccgacccaggtcctggctgtgtggcctcgggcgcgtcacttaacctctctgagtggcagtcacaccatcctgcgtgggattcagacttgagcctgtcccagggcccctagcggggtgggcctccggggagggagggagggagggagggcgggcgctggggcgcggctcaacccttcagtgccccgcaggcggctgtgcgtggcgagcagtggacgcccatcgagcccaagccccgggagcggccgcagatcggaggcaccatcaagcagccgcccagcaaccccccgccgcggcccccggccgaggcccgcaagaagcccagcgaggaggaggctgcggcggcggcggggggacccccgggaggtccccaggtcaaccccatcccggtgaccgacgaggtcgtgtgacctcgccccggacctgccctcccaccaggtgcacccacctgcaataaatgcagcgaagccggg

SEQ ID NO: 31588 - DNA, 550 bp, Homo sapiens
gcaccctacagatgcgggtctccgcccagccgcggtcacctggggggctgggggcggggcctgggcggggcggggttcggccgggagcgcagggcggcagtgcgcgcctagcagtgtcccagccgggttcgtgtcgccatggggcagatcgagtgggccatgtgggccaacgagcaggcgctggcgtccggcctgatcctcatcaccgggggcatcgtggccacagctgggcgcttcacccagtggtactttggtgcctactccattgtggcgggcgtgtttgtgtgcctgctggagtacccccgggggaagaggaagaagggctccaccatggagcgctggggacagaagcacatgaccgccgtggtgaagctgttcgggccctttaccaggaattactatgttcgggccgtcctgcatctcctgctctcggtgcccgccggcttcctgctggccaccatccttgggaccgcctgcctggccattgcgagcggcatctacctactgcggctgctgatggtgccacgatctgcgccgctcccgatcgtgc

SEQ ID NO: 31589 - DNA, 633 bp, Homo sapiens
atgaggggttccaccatggagcgctggggacagaagcacatgaccgccgtggtgaagctgttcgggccctttaccaggaattactatgttcgggccgtcctgcatctcctgctctcggtgcccgccggcttcctgctggagtacccccgggggaagaggaagaagggctccaccatggagcgctggggacagaagcacatgaccgccgtggtgaagctgttcgggccctttaccaggaattactatgttcgggccgtcctgcatctcctgctctcggtgcccgccggcttcctgctggccaccatccttgggaccgcctgcctggccattgcgagcggcatctacctactggcggctgtgcgtggcgagcagtggacgcccatcgagcccaagccccgggagcggccgcagatcggaggcaccatcaagcagccgcccagcaaccccccgccgcggcccccggccgaggcccgcaagaagcccagcgaggaggaggctgcggcggcggcggggggacccccgggaggtccccaggtcaaccccatcccggtgaccgacgaggtcgtgtgacctcgccccggacctgccctcccaccaggtgcacccacctgcaataaatgcagcgaagccggg

SEQ ID NO: 31590 - DNA, 952 bp, Homo sapiens
tctcaaatcaaccgaacatccagccgggttcgtgtcgccatggggcagatcgagtgggccatgtgggccaacgagcaggcgctggcgtccggcctgatcctcatcaccgggggcatcgtggccacagctgggcgcttcacccagtggtactttggtgcctactccattgtggcgggcgtgtttgtgtgcctgctggagtacccccgggggaagaggaagaagggctccaccatggagcgctggtgagtcccctcctgctctggggtctctccgggggttgcggggcccaggcagggctcacagggttgggtggagcttggtttctcacttggaggctccggaaccaaccctttggtgcttgtgggtaaaccaaggccggtgcctgcccggtgtgttttgtgggaggaaagaggcctgggtgccctggggtggtcagcagggcagcaaaggagtcccgagtgggagaggcccagccgcgccgtctcgccttcctccctcccccaggggacagaagcacatgaccgccgtggtgaagctgttcgggccctttaccaggaattactatgttcgggccgtcctgcatctcctgctctcggtgcccgccggcttcctgctggccaccatccttgggaccgcctgcctggccattgcgagcggcatctacctactggcggctgtgcgtggcgagcagtggacgcccatcgagcccaagccccgggagcggccgcagatcggaggcaccatcaagcagccgcccagcaaccccccgccgcggcccccggccgaggcccgcaagaagcccagcgaggaggaggctgcggcggcggcggggggacccccgggaggtccccaggtcaaccccatcccggtgaccgacgaggtcgtgtgacctcgccccggacctgccctcccaccaggtgcacccacctgcaataaatgcagcgaagccggg

SEQ ID NO: 31591 - DNA, 1851 bp, Homo sapiens
atcccccctcgactagcccgacaggggggttcggccgggagcgcagggcggcagtgcgcgcctagcagtgtcccagccgggttcgtgtcgccatggggcagatcgagtgggccatgtgggccaacgagcaggcgctggcgtccggcctgagtgagtgcacgtcagggacggtggaggctgcagcctggaggggtgtcccaagaccccagccgggacctcgggctacttacagggtggggaagtggggcgccaggcgggccaggccgggccggggtcaggccaggagggtgcggggaacgggggcgggaccctcaggccgcgggctggaaggaggagttctgagacccccagtaattcccttgcagaccctgcggagcgcggcgcccctcccccattcccttctctcggtcccccgactccgcgaaggaggaagttgcagcgcaggggaagaggcggttcagccccggtggtttccggggtcaccgccccgaagcccccgagtgggggctccggcctgggcatcgggagaagctcccctgcccctcggtagccagctggcctggaggtcgctctccctgggcttggggtggggaatgggctcatgccctggggctcagcccttctcatctggagtctgcgctggaggcggtctgagatttcacaaggcgccgaaaccacccagtgacggccctgcccagcccagctgcacaggcactttgctcttggggtgggatggcacagcccccagtcaccctcctgtgcatttgctcagaggttctggtgagggcagcggactccatttggaaatggaccctctcgggaccagggccagggagtgtctggcccagcacggtcctcatcaccgggggcatcgtggccacagctgggcgcttcacccagtggtactttggtgcctactccattgtggcgggcgtgtttgtgtgcctgctggagtacccccgggggaagaggaagaagggctccaccatggagcgctggggacagaagcacatgaccgccgtggtgaagctgttcgggccctttaccaggaattactatgttcgggccgtcctgcatctcctggcctgtgtctgctgtctagtgtgcaggatttgtaaggatccactccaaatccgaggagctccgatccgtcgccagggtctggggtcagcatgcactgctggggggtcttgcctgggcttcctggtagggtggagggttccgtgctgtgtgtctgctggttactgccggctgaggccaggacacccacacgtggctgcttcctccgagcaagtgcaccagagccgctagtgtccacatcaaggctgagaacacccaggaccgaaacaagccccggtccgcgcacgtcccctgggtctgcagtctgccttgtcctgagactttgtggccttggcccccagacctggggctccgttcccctttctgagtgcccttctgtgtccctgcctctcacccgctgtcccccagctctcggtgcccgccggcttcctgctggccaccatccttgggaccgcctgcctggccattgcgagcggcatctacctactggcggctgtgcgtggcgagcagtggacgcccatcgagcccaagccccgggagcggccgcagatcggaggcaccatcaagcagccgcccagcaaccccccgccgcggcccccggccgaggcccgcaagaagcccagcgaggaggaggctgcggcggcggcggggggacccccgggaggtccccaggtcaaccccatcccggtgaccgacgaggtcgtgtgacctcgccccggacctgccctcccaccaggtgcacccacctgcaataaatgcagcgaagccggg

SEQ ID NO: 31592 - DNA, 1824 bp, Homo sapiens
atcccccctcgactagcccgacaggggggttcggccgggagcgcagggcggcagtgcgcgcctagcagtgtcccagccgggttcgtgtcgccatggggcagatcgagtgggccatgtgggccaacgagcaggcgctggcgtccggcctgagtgagtgcacgtcagggacggtggaggctgcagcctggaggggtgtcccaagaccccagccgggacctcgggctacttacagggtggggaagtggggcgccaggcgggccaggccgggccggggtcaggccaggagggtgcggggaacgggggcgggaccctcaggccgcgggctggaaggaggagttctgagacccccagtaattcccttgcagaccctgcggagcgcggcgcccctcccccattcccttctctcggtcccccgactccgcgaaggaggaagttgcagcgcaggggaagaggcggttcagccccggtggtttccggggtcaccgccccgaagcccccgagtgggggctccggcctgggcatcgggagaagctcccctgcccctcggtagccagctggcctggaggtcgctctccctgggcttggggtggggaatgggctcatgccctggggctcagcccttctcatctggagtctgcgctggaggcggtctgagatttcacaaggcgccgaaaccacccagtgacggccctgcccagcccagctgcacaggcactttgctcttggggtgggatggcacagcccccagtcaccctcctgtgcatttgctcagaggttctggtgagggcagcggactccatttggaaatggaccctctcgggaccagggccagggagtgtctggcccagcacggtcctcatcaccgggggcatcgtggccacagctgggcgcttcacccagtggtactttggtgcctactccattgtggcgggcgtgtttgtgtgcctgctggagtacccccgggggaagaggaagaagggctccaccatggagcgctggggacagaagcacatgaccgccgtggtgaagctgttcgggccctttaccaggaattactatgttcgggccgtcctgcatctcctggcctgtgtctgctgtctagtgtgcaggatttgtaaggatccactccaaatccgaggagctccgatccgtcgccagggtctggggtcagcatgcactgctggggggtcttgcctgggcttcctggtagggtggagggttccgtgctgtgtgtctgctggttactgccggctgaggccaggacacccacacgtggctgcttcctccgagcaagtgcaccagagccgctagtgtccacatcaaggctgagaacacccaggaccgaaacaagccccgtctgccttgtcctgagactttgtggccttggcccccagacctggggctccgttcccctttctgagtgcccttctgtgtccctgcctctcacccgctgtcccccagctctcggtgcccgccggcttcctgctggccaccatccttgggaccgcctgcctggccattgcgagcggcatctacctactggcggctgtgcgtggcgagcagtggacgcccatcgagcccaagccccgggagcggccgcagatcggaggcaccatcaagcagccgcccagcaaccccccgccgcggcccccggccgaggcccgcaagaagcccagcgaggaggaggctgcggcggcggcggggggacccccgggaggtccccaggtcaaccccatcccggtgaccgacgaggtcgtgtgacctcgccccggacctgccctcccaccaggtgcacccacctgcaataaatgcagcgaagccggg

SEQ ID NO: 31593 - DNA, 606 bp, Homo sapiens
tctcaaatcaaccgaacatccagccgggttcgtgtcgccatggggcagatcgagtgggccatgtgggccaacgagcaggcgctggcgtccggcctgatcctcatcaccgggggcatcgtggccacagctgggcgcttcacccagtggtactttggtgcctactccattgtggcgggcgtgtttgtgtgcctgctggagtacccccgggggaagaggaagaagggctccaccatggagcgctggctctcggtgcccgccggcttcctgctggccaccatccttgggaccgcctgcctggccattgcgagcggcatctacctactggcggctgtgcgtggcgagcagtggacgcccatcgagcccaagccccgggagcggccgcagatcggaggcaccatcaagcagccgcccagcaaccccccgccgcggcccccggccgaggcccgcaagaagcccagcgaggaggaggctgcggcggcggcggggggacccccgggaggtccccaggtcaaccccatcccggtgaccgacgaggtcgtgtgacctcgccccggacctgccctcccaccaggtgcacccacctgcaataaatgcagcgaagccggg

SEQ ID NO: 31594 - DNA, 1120 bp, Homo sapiens
atcccccctcgactagcccgacaggggggttcggccgggagcgcagggcggcagtgcgcgcctagcagtgtcccagccgggttcgtgtcgccatggggcagatcgagtgggccatgtgggccaacgagcaggcgctggcgtccggcctgagtgagtgcacgtcagggacggtggaggctgcagcctggaggggtgtcccaagaccccagccgggacctcgggctacttacagggtggggaagtggggcgccaggcgggccaggccgggccggggtcaggccaggagggtgcggggaacgggggcgggaccctcaggccgcgggctggaaggaggagttctgagacccccagtaattcccttgcagaccctgcggagcgcggcgcccctcccccattcccttctctcggtcccccgactccgcgaaggaggaagttgcagcgcaggggaagaggcggttcagccccggtggtttccggggtcaccgccccgaagcccccgagtgggggctccggcctgggcatcgggagaagctcccctgcccctcggtagccagctggcctggaggtcgctctccctgggcttggggtggggaatgggctcatgccctggggctcagcccttctcatctggagtctgcgctggaggcggtctgagatttcacaaggcgccgaaaccacccagtgacggccctgcccagcccagctgcacaggcactttgctcttggggtgggatggcacagcccccagtcaccctcctgtgcatttgctcagaggttctggtgagggcagcggactccatttggaaatggaccctctcgggaccagggccagggagtgtctggcccagcacggtcctcatcaccgggggcatcgtggccacagctgggcgcttcacccagtggtactttggtgcctactccattgtggcgggcgtgtttgtgtgcctgctggagtacccccgggggaagaggaagaagggctccaccatggagcgctggggacagaagcacatgaccgccgtggtgaagctgttcgggccctttaccaggaattactatgttcgggccgtcctgcatctcctgttgggatcactctagatcaacctcagcatcagtgcac

SEQ ID NO: 31595 - DNA, 360 bp, Homo sapiens
ccgccgtggtgaagctgttcgggccctttaccaggaattactatgttcgggccgtcctgcatctccttgtgagtccccgtcccgcaccccctctagggctcaggagggcttggagccgaccctccccactgtcccaccggccgggctgcctggacaggagccaccccccacttacctcagtgtttttccaaacaaaaattcgggtccctggctctggcagggcctgtgtctgctgtctagtgtgcaggatttgtaaggatccactccaaatccgaggagctccgatccgtcgccagggtctggggtcagcatgcactgctggggggtcttgcctgggcttcctggtagggtggagggttc

SEQ ID NO: 31596 - DNA, 838 bp, Homo sapiens
ggcgcgcggcgcggggcggaaaagcctgtttacacagactgcacaccgcctggggaataatgcagtaaaggaagtgagccggctcggcctgactgctccaacttcctgctctcacacacaccagaggggaaaaaaaaagaggagcgagagaaagaaaaaaagggggaaaaatcaggatctcattacaagagccacagaccgtctgcagacgcctgtcagcatggaaagtcgggggctttcgcccgggtcctcctagaaattccccccgaagaagactcccccacatctggaagaccagtatggtgctgtgaaatgttgcaaaacatgacctgatgacaacccaaaacacttcatagaaaactatccaagaatgtgacttcctggagtagagtcttttttcactgagggtgagttgctgcttactaatcgttagttttgttgccttccaattctaaggaatgactcagtcatctccatgtttcccagacctggacttcctcatgaaactttatttttttaattgtttatgttgccagggctggccttgcactcctgggctcaagtgatgctcccacctcagcctccgcagtagctggggttacaggtgtgaacctctgtaccagctgtctcattaaagtttaaaagaaatgggctgtctgtccattctggctttgttctggctgtagagcccagatgactgtcttctgaccctttcctaaggttctgtacataaatacgcagatgagaggggaaggggactccatttttgttagattttcttgtatgtttcaggcaaaagttttttatgtcctggttatctttaattcctctttgcctg

SEQ ID NO: 31597 - DNA, 4181 bp, Homo sapiens
ggcgcgcggcgcggggcggaaaagcctgtttacacagactgcacaccgcctggggaataatgcagtaaaggaagtgagccggctcggcctgactgctccaacttcctgctctcacacacaccagaggggaaaaaaaaagaggagcgagagaaagaaaaaaagggggaaaaatcaggatctcattacaagagccacagaccgtctgcagacgcctgtcagcatggaaagtcgggggctttcgcccgggtcctcctagaaattccccccgaagaagactcccccacatctgggtatggagagtgcaatcacgctgtggcagttcctgttgcagttgctgctggatcagaaacatgagcatttgatctgctggacctcgaacgatggtgaattcaagctcctcaaagcagaagaagtggccaagctgtggggactccgaaaaaacaaaacaaatatgaactatgataagctgagcagagccctgcgatactattatgacaagaacatcatcaagaaggtgatcgggcagaagtttgtgtacaagtttgtctctttcccggagatcctgaagatggatcctcacgcggtggagatcagccgggagagccttctgctgcaggacagcgactgcaaggcgtctccggagggccgcgaggcccacaaacacggcctggccgccctcagaagcacgagccgcaacgaatacatccactcaggcctgtactcgtccttcaccattaattccctgcagaacccaccagacgccttcaaggccatcaagacggagaagctggaggagccgcccgaagacagcccccccgtggaagaagtcaggactgtgatcaggtttgtgaccaataaaaccgacaagcacgtcaccaggccggtggtgtccctgccttccacgtcagaggctgcggcggcgtccgccttcctggcctcgtccgtctcggccaagatctcctctttaatgttgccaaacgctgccagtatttcatccgcctcacccttctcatctcggtccccgtccctgtcccccaactcacccctcccttctgaacacagaagcctcttcctggaggccgcctgccatgactccgattccctggagcccttgaacctgtcatcgggctccaagaccaagtctccatctcttcccccaaaggccaaaaaacccaaaggcttggaaatctcagcgcccccgctggtgctctccggcaccgacatcggctccatcgccctcaacagcccagccctcccctcgggatccctcaccccagccttcttcaccgcacagacaccaaatggattgcttctgactccgagtccactgctctccagcatacatttctggagcagccttagtccagttgctccgctgagtcctgccaggctgcaagggccaagcacgctgttccagttccccacactgcttaatggccacatgccagtgccaatccccagtctggacagagctgcttctccagtactgctttcttcaaactctcagaaatcctgatgacgtctggccacaattaaggactcattaactgatgaaacaaatttgtccccacgggctagtttacctgtgtcgtgagaaggacattgtgaaactcttgttaatttggtttgcacttttcataacatggatagtctagatttatgttagcattttaaaaactgtttttgatatattcaagtatatatgaaaatctgtttggcattaagtgaattttaatgtttttgtttttatatccttttagctcttaagtgttgaacactgttgacagtgaagaacttttcttaatggttttcagtataactaataaggatgtgaagcttttttctctttagttctgagtatgctaaactgtgtgcttatatagactataaccagttgtgccttccttcgcatttaatgtaaatgaatgatttatatattttttagtattaagaggaaatgtttgaaagatgaaaattagtatcaaacagctctctagtagaatttcattatttttcaccagtgggcaatatgaaagcatatatcacgttttgttttactttcaattgtataagaattgccttagaacctcttttgaactgaaattcagtaaatgtccaagtaatgtttttataataaactaagccatatttagacaataaacattgataaaatgttctaaagtacattttcaaaagaatggaccttgaaaggctagcctccttagctgtttacagtatcttatcttttagatgcctcccagacaaaaatctgagatggaaaagctacatcaagttcatgctattccaggcccaagaatatctcctaggttagcatattcttatttcaaaaaattagccctggttttctcagttttccatagggaatcccgaccatctgatatatttactgtgtcagtataagtaagttggggttcccctggaactataattaacatttaaaaaatctaatgctttagaagaagctcacagagtggtgatgaacccaaacaacaaagaaaccatttttaacactaggtatcttcatcagtataggtaggtgttcacaatttttgatggatcaaaaacttgctgtaatacaaatagagagtggaggtactaaaggccttgcttgtggaaactgagagaggatacactgctttatgtattactaaagttaggggagaatgaaggaaatctgacagatgaaaaattctacaggaacctcatcatcgtggaactgaactgatgataacttggaacactccagtaaattctgttgtgtaatgtaatttggagcagtgataatacagacatattttctgttccatcagaaaatcagcaggcaccagtccaaaggtaccacacctgtacatgaagaaggaaagttctaatacaagaaaactgaaaagcaccaagctttaaattcaagattaattacaatccttaactataagtgatgataaaaactaacttgaaatgtgactaaataactgatccaaactgggcattaagtggcaggattatgagaaaggataaaaaaagagatttgagaaaacacatttcttgaattttcagaaaaaaatctagactattgctttgacacttagaaattctgaggtttttcaattggaattgagcatctctgtatgtggggatgtgggcccttatcaagggataaaaatccaaacactctaacatgcctccttgactgtaaagtaatgacactggttccaaaattcacaaataatagacactactgtccccccacccccaccccataggctaagaataattctgtaccagaataaaaggagctggtccagggaactgatatttactgaacatacaaagttagtgctagaaggggcctttgagaatgcttcccgccacctgtttccagctcaagacaggtgcacagcagaagctgggagttgcctatggctgcacagctcactgaaggtagaacaatgattggtgctcagtccaattctgtctcccccatgcctagctgttaagtaattactggttcaaaactacgtgttattagtaaaacaaacaaaacagataaagacagcatttaaaactgtgttgtcagataagagaacacatccaaaatgcatgattcttacaaactaaaggaagttaatgtgcaaaaatctcaaccaaaactactatttttagtatacttgtttacgtaaatgctgattggaaatatttaaatgactatagatctgattctttcttttcctttggaaactgggattaatgtatgctctagatccatttattagaaatgcaaaaatactacaattttttgatggatgaaaatactcctgtaacacaaacagagaactggaggaactgaagaataactcactcatatagctctgcctcattctgtgtgtgtgtgcatgtgtgtgttagcagaggtattttactcagaaaataggtttcaaagaacattaatgactttcttttcccttttatgtctgcttaatcagtgttaaactgctatgggaaaagttttatagaactatataacctgaatgttggtctctttgtacacatcttttctatgactgcaaatcttcactttatgtatcatttttactgtcatattatttttgttcaataaaaactttgtgataaaaggtgtttagaggtaactggattggcttact

SEQ ID NO: 31598 - DNA, 2967 bp, Homo sapiens
gagggagcgttgaaggactgttgggttagaatgcctgttcctccgtgcatatgaggaaagctcaggacacatcaaagcaaacaccaaatggattgcttctgactccgagtccactgctctccagcatacatttctggagcagccttagtccagttgctccgctgagtcctgccaggctgcaagggccaagcacgctgttccagttccccacactgcttaatggccacatgccagtgccaatccccagtctggacagagctgcttctccagtactgctttcttcaaactctcagaaatcctgatgacgtctggccacaattaaggactcattaactgatgaaacaaatttgtccccacgggctagtttacctgtgtcgtgagaaggacattgtgaaactcttgttaatttggtttgcacttttcataacatggatagtctagatttatgttagcattttaaaaactgtttttgatatattcaagtatatatgaaaatctgtttggcattaagtgaattttaatgtttttgtttttatatccttttagctcttaagtgttgaacactgttgacagtgaagaacttttcttaatggttttcagtataactaataaggatgtgaagcttttttctctttagttctgagtatgctaaactgtgtgcttatatagactataaccagttgtgccttccttcgcatttaatgtaaatgaatgatttatatattttttagtattaagaggaaatgtttgaaagatgaaaattagtatcaaacagctctctagtagaatttcattatttttcaccagtgggcaatatgaaagcatatatcacgttttgttttactttcaattgtataagaattgccttagaacctcttttgaactgaaattcagtaaatgtccaagtaatgtttttataataaactaagccatatttagacaataaacattgataaaatgttctaaagtacattttcaaaagaatggaccttgaaaggctagcctccttagctgtttacagtatcttatcttttagatgcctcccagacaaaaatctgagatggaaaagctacatcaagttcatgctattccaggcccaagaatatctcctaggttagcatattcttatttcaaaaaattagccctggttttctcagttttccatagggaatcccgaccatctgatatatttactgtgtcagtataagtaagttggggttcccctggaactataattaacatttaaaaaatctaatgctttagaagaagctcacagagtggtgatgaacccaaacaacaaagaaaccatttttaacactaggtatcttcatcagtataggtaggtgttcacaatttttgatggatcaaaaacttgctgtaatacaaatagagagtggaggtactaaaggccttgcttgtggaaactgagagaggatacactgctttatgtattactaaagttaggggagaatgaaggaaatctgacagatgaaaaattctacaggaacctcatcatcgtggaactgaactgatgataacttggaacactccagtaaattctgttgtgtaatgtaatttggagcagtgataatacagacatattttctgttccatcagaaaatcagcaggcaccagtccaaaggtaccacacctgtacatgaagaaggaaagttctaatacaagaaaactgaaaagcaccaagctttaaattcaagattaattacaatccttaactataagtgatgataaaaactaacttgaaatgtgactaaataactgatccaaactgggcattaagtggcaggattatgagaaaggataaaaaaagagatttgagaaaacacatttcttgaattttcagaaaaaaatctagactattgctttgacacttagaaattctgaggtttttcaattggaattgagcatctctgtatgtggggatgtgggcccttatcaagggataaaaatccaaacactctaacatgcctccttgactgtaaagtaatgacactggttccaaaattcacaaataatagacactactgtccccccacccccaccccataggctaagaataattctgtaccagaataaaaggagctggtccagggaactgatatttactgaacatacaaagttagtgctagaaggggcctttgagaatgcttcccgccacctgtttccagctcaagacaggtgcacagcagaagctgggagttgcctatggctgcacagctcactgaaggtagaacaatgattggtgctcagtccaattctgtctcccccatgcctagctgttaagtaattactggttcaaaactacgtgttattagtaaaacaaacaaaacagataaagacagcatttaaaactgtgttgtcagataagagaacacatccaaaatgcatgattcttacaaactaaaggaagttaatgtgcaaaaatctcaaccaaaactactatttttagtatacttgtttacgtaaatgctgattggaaatatttaaatgactatagatctgattctttcttttcctttggaaactgggattaatgtatgctctagatccatttattagaaatgcaaaaatactacaattttttgatggatgaaaatactcctgtaacacaaacagagaactggaggaactgaagaataactcactcatatagctctgcctcattctgtgtgtgtgtgcatgtgtgtgttagcagaggtattttactcagaaaataggtttcaaagaacattaatgactttcttttcccttttatgtctgcttaatcagtgttaaactgctatgggaaaagttttatagaactatataacctgaatgttggtctctttgtacacatcttttctatgactgcaaatcttcactttatgtatcatttttactgtcatattatttttgttcaataaaaactttgtgataaaaggtgtttagaggtaactggattggcttact

SEQ ID NO: 31599 - DNA, 3496 bp, Homo sapiens
gttgcaagtagtcacatattaaaaggccttgttcagttgggattgcaactaacatatttgtttcagacctgaaactcattatcagagcatatactgtcatcctactatatttatcatcttagtgaacaacaatacagaaatcttattctttgtcacttatgagtgatctgtgtgatattttaattagaatactttcttagctccaaaataatctattctaaatctttaaatacatttcttactttagaataaatgctgcaagaatcatctttgtagtaccctgaaaaactgatggcaaatttcaaaatatagtattagaaattactgactcacatgtaaagagtctatggttttcaaaacactcttttaatatttaatattaaacattattttaatatttatagcattatcagcatcctgagtagcttagaacttttaaaaaatagtgttagaagatgctttagcaacatataaattatatattttttcctagtagcctatgcatatagaataattagggacattttctgggccttatcctttgtttgctctatgtaaatcttgatctcattgtcatcttccaattattctgtaaaatacattggcaactaatctctatcacaggggtgatgagagaaatggactgctatggactgtatgggaatgtaaagaacctaagttcttcccaatggatttgcaataattattgtaaaaatcttttgtcccctacagttccccacactgcttaatggccacatgccagtgccaatccccagtctggacagagctgcttctccagtactgctttcttcaaactctcagaaatcctgatgacgtctggccacaattaaggactcattaactgatgaaacaaatttgtccccacgggctagtttacctgtgtcgtgagaaggacattgtgaaactcttgttaatttggtttgcacttttcataacatggatagtctagatttatgttagcattttaaaaactgtttttgatatattcaagtatatatgaaaatctgtttggcattaagtgaattttaatgtttttgtttttatatccttttagctcttaagtgttgaacactgttgacagtgaagaacttttcttaatggttttcagtataactaataaggatgtgaagcttttttctctttagttctgagtatgctaaactgtgtgcttatatagactataaccagttgtgccttccttcgcatttaatgtaaatgaatgatttatatattttttagtattaagaggaaatgtttgaaagatgaaaattagtatcaaacagctctctagtagaatttcattatttttcaccagtgggcaatatgaaagcatatatcacgttttgttttactttcaattgtataagaattgccttagaacctcttttgaactgaaattcagtaaatgtccaagtaatgtttttataataaactaagccatatttagacaataaacattgataaaatgttctaaagtacattttcaaaagaatggaccttgaaaggctagcctccttagctgtttacagtatcttatcttttagatgcctcccagacaaaaatctgagatggaaaagctacatcaagttcatgctattccaggcccaagaatatctcctaggttagcatattcttatttcaaaaaattagccctggttttctcagttttccatagggaatcccgaccatctgatatatttactgtgtcagtataagtaagttggggttcccctggaactataattaacatttaaaaaatctaatgctttagaagaagctcacagagtggtgatgaacccaaacaacaaagaaaccatttttaacactaggtatcttcatcagtataggtaggtgttcacaatttttgatggatcaaaaacttgctgtaatacaaatagagagtggaggtactaaaggccttgcttgtggaaactgagagaggatacactgctttatgtattactaaagttaggggagaatgaaggaaatctgacagatgaaaaattctacaggaacctcatcatcgtggaactgaactgatgataacttggaacactccagtaaattctgttgtgtaatgtaatttggagcagtgataatacagacatattttctgttccatcagaaaatcagcaggcaccagtccaaaggtaccacacctgtacatgaagaaggaaagttctaatacaagaaaactgaaaagcaccaagctttaaattcaagattaattacaatccttaactataagtgatgataaaaactaacttgaaatgtgactaaataactgatccaaactgggcattaagtggcaggattatgagaaaggataaaaaaagagatttgagaaaacacatttcttgaattttcagaaaaaaatctagactattgctttgacacttagaaattctgaggtttttcaattggaattgagcatctctgtatgtggggatgtgggcccttatcaagggataaaaatccaaacactctaacatgcctccttgactgtaaagtaatgacactggttccaaaattcacaaataatagacactactgtccccccacccccaccccataggctaagaataattctgtaccagaataaaaggagctggtccagggaactgatatttactgaacatacaaagttagtgctagaaggggcctttgagaatgcttcccgccacctgtttccagctcaagacaggtgcacagcagaagctgggagttgcctatggctgcacagctcactgaaggtagaacaatgattggtgctcagtccaattctgtctcccccatgcctagctgttaagtaattactggttcaaaactacgtgttattagtaaaacaaacaaaacagataaagacagcatttaaaactgtgttgtcagataagagaacacatccaaaatgcatgattcttacaaactaaaggaagttaatgtgcaaaaatctcaaccaaaactactatttttagtatacttgtttacgtaaatgctgattggaaatatttaaatgactatagatctgattctttcttttcctttggaaactgggattaatgtatgctctagatccatttattagaaatgcaaaaatactacaattttttgatggatgaaaatactcctgtaacacaaacagagaactggaggaactgaagaataactcactcatatagctctgcctcattctgtgtgtgtgtgcatgtgtgtgttagcagaggtattttactcagaaaataggtttcaaagaacattaatgactttcttttcccttttatgtctgcttaatcagtgttaaactgctatgggaaaagttttatagaactatataacctgaatgttggtctctttgtacacatcttttctatgactgcaaatcttcactttatgtatcatttttactgtcatattatttttgttcaataaaaactttgtgataaaaggtgtttagaggtaactggattggcttact

SEQ ID NO: 31600 - DNA, 811 bp, Homo sapiens
actatacagtgtcaaagcagggtcgtcgttcggttgtacagcgtcggacagcagctgggagttgcctatggctgcacagctcactgaaggtagaacaatgattggtgctcagtccaattctgtctcccccatgcctagctgttaagtaattactggttcaaaactacgtgttattagtaaaacaaacaaaacagataaagacagcatttaaaactgtgttgtcagataagagaacacatccaaaatgcatgattcttacaaactaaaggaagttaatgtgcaaaaatctcaaccaaaactactatttttagtatacttgtttacgtaaatgctgattggaaatatttaaatgactatagatctgattctttcttttcctttggaaactgggattaatgtatgctctagatccatttattagaaatgcaaaaatactacaattttttgatggatgaaaatactcctgtaacacaaacagagaactggaggaactgaagaataactcactcatatagctctgcctcattctgtgtgtgtgtgcatgtgtgtgttagcagaggtattttactcagaaaataggtttcaaagaacattaatgactttcttttcccttttatgtctgcttaatcagtgttaaactgctatgggaaaagttttatagaactatataacctgaatgttggtctctttgtacacatcttttctatgactgcaaatcttcactttatgtatcatttttactgtcatattatttttgttcaataaaaactttgtgataaaaggtgtttagaggtaactggattggcttact

SEQ ID NO: 31601 - DNA, 781 bp, Homo sapiens
tattcgtgctcggtaccctcgtagctgggagttgcctatggctgcacagctcactgaaggtagaacaatgattggtgctcagtccaattctgtctcccccatgcctagctgttaagtaattactggttcaaaactacgtgttattagtaaaacaaacaaaacagataaagacagcatttaaaactgtgttgtcagataagagaacacatccaaaatgcatgattcttacaaactaaaggaagttaatgtgcaaaaatctcaaccaaaactactatttttagtatacttgtttacgtaaatgctgattggaaatatttaaatgactatagatctgattctttcttttcctttggaaactgggattaatgtatgctctagatccatttattagaaatgcaaaaatactacaattttttgatggatgaaaatactcctgtaacacaaacagagaactggaggaactgaagaataactcactcatatagctctgcctcattctgtgtgtgtgtgcatgtgtgtgttagcagaggtattttactcagaaaataggtttcaaagaacattaatgactttcttttcccttttatgtctgcttaatcagtgttaaactgctatgggaaaagttttatagaactatataacctgaatgttggtctctttgtacacatcttttctatgactgcaaatcttcactttatgtatcatttttactgtcatattatttttgttcaataaaaactttgtgataaaaggtgtttagaggtaactggattggcttact

SEQ ID NO: 31602 - DNA, 2169 bp, Homo sapiens
ggcgcgcggcgcggggcggaaaagcctgtttacacagactgcacaccgcctggggaataatgcagtaaaggaagtgagccggctcggcctgactgctccaacttcctgctctcacacacaccagaggggaaaaaaaaagaggagcgagagaaagaaaaaaagggggaaaaatcaggatctcattacaagagccacagaccgtctgcagacgcctgtcagcatggaaagtcgggggctttcgcccgggtcctcctagaaattccccccgaagaagactcccccacatctgggtatggagagtgcaatcacgctgtggcagttcctgttgcagttgctgctggatcagaaacatgagcatttgatctgctggacctcgaacgatggtgaattcaagctcctcaaagcagaagaagtggccaagctgtggggactccgaaaaaacaaaacaaatatgaactatgataagctgagcagagccctgcgatactattatgacaagaacatcatcaagaaggtgatcgggcagaagtttgtgtacaagtttgtctctttcccggagatcctgaagatggatcctcacgcggtggagatcagccgggagagccttctgctgcaggacagcgactgcaaggcgtctccggagggccgcgaggcccacaaacacggcctggccgccctcagaagcacgagccgcaacgaatacatccactcaggcctgtactcgtccttcaccattaattccctgcagaacccaccagacgccttcaaggccatcaagacggagaagctggaggagccgcccgaagacagcccccccgtggaagaagtcaggactgtgatcaggtttgtgaccaataaaaccgacaagcacgtcaccaggccggtggtgtccctgccttccacgtcagaggctgcggcggcgtccgccttcctggcctcgtccgtctcggccaagatctcctctttaatgttgccaaacgctgccagtatttcatccgcctcacccttctcatctcggtccccgtccctgtcccccaactcacccctcccttctgaacacagaagcctcttcctggaggccgcctgccatgactccgattccctggagcccttgaacctgtcatcgggctccaagaccaagtctccatctcttcccccaaaggccaaaaaacccaaaggcttggaaatctcagcgcccccgctggtgctctccggcaccgacatcggctccatcgccctcaacagcccagccctcccctcgggatccctcaccccagccttcttcaccgcacagacaccaaatggattgcttctgactccgagtccactgctctccagcatacatttctggagcagccttagtccagttgctccgctgagtcctgccaggctgcaagggccaagcacgctgttccagttccccacactgcttaatggccacatgccagtgccaatccccagtctggacagagctgcttctccagtactgctttcttcaaactctcagaaatcctgatgacgtctggccacaattaaggactcattaactgatgaaacaaatttgtccccacgggctagtttacctgtgtcgtgagaaggacattgtgaaactcttgttaatttggtttgcacttttcataacatggatagtctagatttatgttagcattttaaaaactgtttttgatatattcaagtatatatgaaaatctgtttggcattaagtgaattttaatgtttttgtttttatatccttttagctcttaagtgttgaacactgttgacagtgaagaacttttcttaatggttttcagtataactaataaggatgtgaagcttttttctctttagttctgagtatgctaaactgtgtgcttatatagactataaccagttgtgccttccttcgcatttaatgtaaatgaatgatttatatattttttagtattaagaggaaatgtttgaaagatgaaaattagtatcaaacagctctctagtagaatttcattatttttcaccagtgggcaatatgaaagcatatatcacgttttgttttactttcaattgtataagaattgccttagaacctcttttgaactgaaattcagtaaatgtccaagtaatgtttttataataaactaagccatatttagacaataaacattgata

SEQ ID NO: 31603 - DNA, 1848 bp, Homo sapiens
ggcgcgcggcgcggggcggaaaagcctgtttacacagactgcacaccgcctggggaataatgcagtaaaggaagtgagccggctcggcctgactgctccaacttcctgctctcacacacaccagaggggaaaaaaaaagaggagcgagagaaagaaaaaaagggggaaaaatcaggatctcattacaagagccacagaccgtctgcagacgcctgtcagcatggaaagtcgggggctttcgcccgggtcctcctagaaattccccccgaagaagactcccccacatctgggtatggagagtgcaatcacgctgtggcagttcctgttgcagttgctgctggatcagaaacatgagcatttgatctgctggacctcgaacgatggtgaattcaagctcctcaaagcagaagaagtggccaagctgtggggactccgaaaaaacaaaacaaatatgaactatgataagctgagcagagccctgcgatactattatgacaagaacatcatcaagaaggtgatcgggcagaagtttgtgtacaagtttgtctctttcccggagatcctgaagatggatcctcacgcggtggagatcagccgggagagccttctgctgcaggacagcgactgcaaggcgtctccggagggccgcgaggcccacaaacacggcctggccgccctcagaagcacgagccgcaacgaatacatccactcaggcctgtactcgtccttcaccattaattccctgcagaacccaccagacgccttcaaggccatcaagacggagaagctggaggagccgcccgaagacagcccccccgtggaagaagtcaggactgtgatcaggtttgtgaccaataaaaccgacaagcacgtcaccaggccggtggtgtccctgccttccacgtcagaggctgcggcggcgtccgccttcctggcctcgtccgtctcggccaagatctcctctttaatgttgccaaacgctgccagtatttcatccgcctcacccttctcatctcggtccccgtccctgtcccccaactcacccctcccttctgaacacagaagcctcttcctggaggccgcctgccatgactccgattccctggagcccttgaacctgtcatcgggctccaagaccaagtctccatctcttcccccaaaggccaaaaaacccaaaggcttggaaatctcagcgcccccgctggtgctctccggcaccgacatcggctccatcgccctcaacagcccagccctcccctcgggatccctcaccccagccttcttcaccgcacagacaccaaatggattgcttctgactccgagtccactgctctccagcatacatttctggagcagccttagtccagttgctccgctgagtcctgccaggctgcaagggccaagcacgctgttccaggtgagcgtttggaaatgaacttttgaacattaagcttctgagggatggttttttctctaaatcctgcagaggtaacggtgagttttgccatatgttgagttgaaatattaaatgtccagagggggttcatgttagtggggttgcacgcccttcagaggcagacattttcattgaggcagaaattgcagactcatgccagacacccatacgtggaacaattagttcttaaagtgttttgcatattttcatttgtctatgaaaacaggaaatttattaaggaaaaggcaaaactttaagaattattctttaggccagtgtgatggctcacacctgtaatcccagcactttgggaggttgagggtgggaggattgtttgagcccaggagtttgagaccagcctgggcaacacagcaagaccccatctatattta

SEQ ID NO: 31604 - DNA, 453 bp, Homo sapiens
gagtaagttacatgagatcatttaagtttcatttctattgttggccatttgttatatgaataaagatttgctaagtgaccctcaagcttgggtctttatttcatttttagattatataaggcttgacccacttaagaaatgtaaccgtctttttatttctcctattaattttttttttgtctttgtgactatcttgtttatacaaactgaacctgagacaaagccgctagtgactgctttttgtggttaaactggtttcgaacccaccaaagtctagaagagggaaagaaagaattgtaccagatttgatgtgttttgtgtaacgtaagccagattgtacctccttctctctctcccaggtctgtatacaacttaggaccaagaggtggactttggtgtcttagttcaagctctaaaaataccagggaagcagggaccacgacacatcccagg

SEQ ID NO: 31605 - DNA, 257 bp, Homo sapiens
  misc_feature (169)..(169): n is a, c, g, or t
gaatatagaatttaaggacaaaaggtatgcttgctttgcctgtttttacagtaaaaaactgtgttgattgtgttgactgtgtgtcaggtagtaataagtgctttgtgttcaatttttcttctgttttaatgacagcattaggaggaggtcccattactatcttgttttntacacttggaagataaagcttaaaagttagggtttgttgccaggtgtggtagctcatgcctgtaatcctagcactttgggaggatcgc

SEQ ID NO: 31606 - DNA, 369 bp, Homo sapiens
ttatgaagaaaagaggtttaattggctcacagttccacaggctgtgaggcctcaagaaacttaaaatcatggcggaagggctaaggggaagcaggcaacttcttcacgtggttgcaggagagaaagatcaaagggggaaatgatacacacttaaacacatcttgtaagaactcactcactatcacaagagcagcaagagggaaatctgcccccatgatccaattacctcctgccaggtccctcccccaacactgaggattacaattcaacatgagttttgagtggggacacagaaccaaaccatatcattctgcccctgtcccctcccaaatctcatgtccttctcacattttgaaaccgatcatgctc

SEQ ID NO: 31607 - DNA, 1044 bp, Homo sapiens
gttactgtttggatttacatagaaagacttttgccaaagcctgtgctgaacacataccaaaacaattatgcctagcatgtacacagtgataagaatgttttcttttggcatccactagaggagaaacttagagcagcaccactttctactgctacccttgggtccatgctgcggtagttatttacctgaattgtccttggaataactgcatttccttgtatatgaaatggacctaaagtaatggatttgcccattagtgaataatatcggaagcaatctcaattctaatgcaattcctgttcagttccatgcaatttctgcatagaaacacaactgaaagaaaaatgacaaccaatcgaccagtaaaactgcaataaatactttttaggtgagaaaacgtcaaaagagtgtggatttggaggtccttccattgtgctaattatagatctttattatctctctgaatacttgtcaatagtcattaagtttatacaattttctctttttaatgcatcaaaaaatcaccaaataggaagaagtaaatctgtataacgggacatctaaccattggttttaaaatacataacctacagtctaaaataaagaagaaatatatacatgtgaagcttttttttttgactgactatattataaaatatgctaaaattgtactgcaaatgaactctcctcacctcccaaataataacaaaacatacagtgacaacaaaattgtacaagtttatattaaggctctcaaatttaaactaagcataaaaactgagcaatttatcttgggattctaaaaaaaaaatgaatctaacaaaatccaaattgatgatacccgacatgttgtcatcatataacagtcaaagtttattctctgaagaaatatcaagttttaaaaataaatgggaacaataccaagcatcatctaaaggccagtttctagttttctcagcaccatgggtaacttttgtaagaaatgagataatcctgtaatcccagctactcggggggctgaggcaggagaatggcgtgaacccg

SEQ ID NO: 31608 - DNA, 750 bp, Homo sapiens
aaatttctattttacaaatttttcagggaatcatattcttaacttcactgagaaaaatgtgttactcttttggacaatttatcttatttctatcatataagatgtatttttttattgtccttaaaagaagctctagcatgaaattaaaggaaagggaaagaaatagatctggtgcacccgaacattaggagaaaatgaaaaatatacaaccaaccgttcgtgagtcatcaaaaagtcaaagtcagcctggccaacatggcaaaactccgtctctgcaaaaaatacaaaaatgagcccggtatgttggcatatgcctgtaatcccagctactcgagaggctgagacacgaaaattgcttgaacctgggaggcggaggttgcaatgagccgagatcgcgctactgcactccagcctgggcaacagagagagaccttgtctcaaaaaacaacaacaacaaaaagtcaaagtcataataagcaaattattggcttctttcttctagaccaaaagaaattaaagagatgaaacaatcaattgcaagggtcaaaactagattggatcttggtttgaatgaaaaaaagcataaaatattcttgcaataattgtaaaaatttgaatgtggactaagtcctagattatattaaaatatttttaattttttaagcttgacaaatgcactgattgttatactttaaataactaaaaatctgagaatccacagtgctacagacaataagtgataaaatggga

SEQ ID NO: 31609 - DNA, 493 bp, Homo sapiens
tccccacaagcattcaaaactcatacagcatgtgtgcttttctcctgctcatctgcctggtgttgatttagtttctaaagctggctgaagagcccactaacagctaaagacgggcaggaggtgacctctggctcccctgcagtgctttctaaactatgccaaaaggtagtagcctaaaacagccctaaatgtgtattattttctgctgtttctgagggtcaggaagtggggagaagcttacctgggtggtttcggcttagggtctcatgagatttcagctgagatgaaaaacagaaagtcatgattcatgagagtgaggctggctgactttctcatgagagaggacgtggaggggatggaggagattgctggggatggaggatttgtttccaaagcggcttgctcaccaggatactggcagggggcctcagttcctcaccacactgacctctccatacagctgcttgagtgtcctcatgacagggcgctggct

SEQ ID NO: 31610 - DNA, 407 bp, Homo sapiens
tactggtattactatatgcaatttgaaaatactggtataggagatacagtgcaattttttttttagtctgtgcttgcagtctactggagactgaaatgtaaaaagctatgcacaaggtaatatacatataacaactggcattcctttgggctagaactcccaaagaagaccagcttctaatattcttgaacactaaggactcatcaagagcagtgaattaaaaaagtaattttaccattttttttccaaccatggtgcaaaagagtatctaagacatacagcaggggttttaagagtggactataagaagatatatctccctctattggtaggtggattctagactcatactcaattataaaaaattataattatgtcttatgaaataaaatatgggaaatcttttt

SEQ ID NO: 31611 - DNA, 411 bp, Homo sapiens
tgtgcttaagatctgtttctctggtgatgagaagcctgaggctggcctttgtctactctcaggaagagtgctgtctttgctacctcacagcacttctctcctgtctttcagtgtttcatgccaagcacctgttgccccagcccttcatttcaaatctccatcatcatgtttcatcctttattggccctgacatttgtcttgacctacacaagagacatattcattctgagttctttttcttacacaagagttgctaagcattcttcaactaccctgtgaaaggtcttggtaatatttgagtgggttcaaccaggctagttcagggattgttgttaaacagaatgtttaacaaaagtactacaaacatttacattagaagatctattcagcatattgtgatatttgccgcca

SEQ ID NO: 31612 - DNA, 268 bp, Homo sapiens
ctggaaaatgctaccatacacccatgagagcatgacagtgaaaaagacaaacagggttttactactactctgaaaatggttttgaccatgtagtttccatgaaagtcttggggattcccaggggttccaggccacactttgagagctgctcttctgtctagtcccccaggtgtcttcttagatgtcttctctcccagtcattacacacatctcatatgttactaagtctttttttttttttgaagacggggtcctgctgtgttgccca

SEQ ID NO: 31613 - DNA, 921 bp, Homo sapiens
atggtgactgagtttcttcttctcggcttctcccacctggccgacctccagggcttgctcttctctgtctttctcactatctacctgctgaccgtggcaggcaatttcctcattgtggtgctggtctccactgatgctgccctccagtcccctatgtacttcttcctgcgcaccctctcggccttggagattggctatacgtctgtcacggtccccctgctacttcaccacctccttactggccggcgccacatctctcgctctggatgtgctctccagatgttcttcttcctcttctttggcgccacggagtgctgcctcctggcagccatggcctatgaccgctatgcagccatctgtgaacccctccgctacccactgctgctgagccaccgggtgtgtctacagctagctgggtcggcgtgggcctgtggggtgctggtggggctgggccacacccctttcatcttctctttgcccttctgcggccccaataccatcccgcagttcttctgtgagatccagcctgtcctgcagctggtatgtggagacacctcgcttaatgaactgcagattatcctggcaacagccctcctcatcctctgcccctttggcctcatcctgggctcctacgggcgtatcctcgttaccatcttccggatcccatctgttgcgggccgccgcaaggccttctccacctgctcctcccacctgatcgtggtctccctcttctatggcaccgcactctttatctatattcgccctaaggccagctacgatccggccactgaccctctggtgtccctcttctatgctgtggtcacccccatcctcaaccccatcatctacagcctgcggaacacagaggtcaaagctgccctaaagagaaccatccagaaaacggtgcctatggagatttga

SEQ ID NO: 31614 - DNA, 395 bp, Homo sapiens
gtagagacgaggtttcaccgtgttagctaggatggtctagatctcctgacctcgtgatccgcctgcctcggcctcccaaagtgctgggattacaggcgtaagccgccgcgcccggccttcttcactattttaaattgttagcattactttttacattcactttttacatatttcttacattacatttcattttacattcgctatgtatttcacttccgcattgtttccaacactggaggtataaacggtgtaaagacatttggagagttctaattcgttttatgcatttttggcaaatttgactccacgaaaatacattatcataatgttaactctgtgtgcaaacattatgcatacacataagaatgttgaaatttcctgtataaatgaagaga

SEQ ID NO: 31615 - DNA, 494 bp, Homo sapiens
agttttcatgttttcagaatgaagatgcattttttaaaaacgtactaggtacttacccgaggccatggtttgacctgcagatgacttcaacgtttggaactatggaatgcagaatgaaaactaaaagtatggctgaagacaaaaggcacgaggagatggttatctttctctctagcactactgaactattaccttaggaagaatatatttagagcatggaagtctattaacttttcctcattttaaatgttctttttaattacagagccacttagaaaatattctagcttttcatatcagtgttttcttctctgtcttatcccggtgtagataagccaatttcttttacatatctgagctgctcattaattaagaaaaactcagcattagttaccgttcatgagtcctcaaaaacacaaaattccacattccagcatgtgttacattaagtggaaaagatttgtctaatgctgtcctcatttttagtgcaggtg

SEQ ID NO: 31616 - DNA, 286 bp, Homo sapiens
ggcaatctgaattcctacttaaaaaatgccattgcactctagcctgggcaacagagtgagaccctgtctcaaaaaaaaaaaaaagcccttttctatcttaaacagccaattaaatgccttaccctccaaccagttctgcaactgccctgagtctgtgtcttagcaaagaggccattagccacccgactccctggcttatcactgggcccttcctcatcagacacagagatcaaattctgagggtgtacagcagctcttagcaggcttcaaagagctctgggactgc

SEQ ID NO: 31617 - DNA, 550 bp, Homo sapiens
gtacccacaattaaacctacctgctctggaccagtggtcaacccttcaccaactggctgtagtaagataacaacactcttagcacagccctttcctaggagactataaacgatgaggaataactgtcagtattcaatgagtgctccataaatagtttcattataatgagaacagtgtatatgtaatgggatagaagttgtttcacatttcttttgcaaaatggcatgctgggataaatgataatatgtgaggctttgggttttattttgatcttattggactcatgttggaaaaaaataaactcacttgttacatgagattccaacacagatattttaacctgctgtctttgtaacgtgtgacagtataatatgtggaaatgggagactcattaaatcaaggtaagccatggcctttcagcaagttatctaagcctcttaaggcttggtttcttcattcagagtgaggacattagtgccatagctagaagcataatacaaagtaagtgagcaaaaatatgtaaaaagtgaagataaaaggtaaaagttaa

SEQ ID NO: 31618 - DNA, 1191 bp, Homo sapiens
gaagttccttattgagggtaatgatgtttttaaagaacatagaacattctttatgttttaaaagaatcatgccttcattaagtaggctttattctaagtttggaactgagactgttatgcttttaaagtctccaacagagaggttaaggagttaacctggggcatgccagaactgggatggaatggccttgaaagattttagtgcattgcacttgacttagataggatctttactgacccttgcttacttaggagtggcagagttaattggtggttcagatattaaggggctactgtcactctgatatgtagcttttctatcatctctgtaacttagcttcaagtaactagaagagtaatctaaaaaaaataattagcctttaatcagattgcctgcagtgtttcttggtcactttaaagccgtgactttgcatgattgctaggtaagttcacttaagaaataggaaattcaaattatttatgtttcaagtatttttgaacaggtggtaaaatgaaattgatttttatcatctttgaatgaaagtaacagcagatattcaatgagtgacttattttgtggacatttttgtcctttggatatgatgtatagagtcacaatatattttcagccttttttgagaaataagtgatttagacatcttacacagttactgagcacctggtacagtgaagatctctcaagaatgatttgtgtgatgtagttcggtggatcatccagcagagggcagtagagccagagccatagtaaaagttatagtaaagttgctcttagcaacttgagtcttacttagatttaattttgcatagaaccaaaagttcagtttagtagccattttctttaaagtcaggctgtagtggttccgaaatgaaaattaggccctgattttatgtaagatgatgtccaatctttaattgacaccttaaaaatattaaaagattatgataggatcaggaaggagtttttgaaaatgcaatttgtagtttttaacaagtgatgtagaataaataaaaagaagtactttttaaaaagtaagtataaaattattttccagttaactatgggatataaatgattgctttaatacaggtcttcctaacctgtacagcatttcctaacctgctctgtgaaaaacaaagaaataaaacttagtgctctctttaaaaaaaatt

SEQ ID NO: 31619 - DNA, 686 bp, Homo sapiens
ctcacagttctggaggcttgaagtccaagatcaaggtgttagcaagtttcatttcttctgaggcctctcgccttctcttgcagatggttgccttcttgctgtgtcctcgtgtggtcttttcttctgtgtgcgcattccttgtgtctctttgtgtgtccagatttcctctcctttataaggacacatcagatttgaagtacttaatttccatatatattgagtgtattagtttcctattgttcctataacaaattaccacaaatttagtgacttaaaacaatgcaaacgtattatcttacagttctggaggccagaatttctaaaatcgaaatgttggcagggctgtattccttctggaggctctaaagaagaatctatttcctttccttttccaatgtctaatgcctgcccagattccttggcttatggtcccttcctcaatctttaaagccagcagcatagcatcttcaaatctctttctctgacctctgcttctgtcatcacatgtcctctctgactctggtcctcgtatctccttcttataagaatccttgtagctaagtgtggtggcatgtgcctgtagtcctgacagctcaggaggctgaggcgggaggattgcttgagcccaggaatttaaggctacagtgagctctgattgcaccactgttctccagcctgggtgaccg

SEQ ID NO: 31620 - DNA, 380 bp, Homo sapiens
tgtggtgtttgtgttctgtgccgatgtccctcccccagccctgttattgtgagtggaagaaggggaaagggttcgcccgctactgtgagcccctcctctcacgctgggtgtccttggagaagcctgcacttcttcattgtacgccagggctgggtccctccctggagtggttctgtgctgctgggatggggccaacccctcagatgttttctgagtgtcacacacaggtgtgtgcattcatggcctttgcgtgtcttcctgttgtggaggcaaaaatgtgaagaaccctagatgattttgggaccagggctccatcacctgctgttcattgcacaccggagcatccaggcatgggtggagagctcagacttccaggcacg

SEQ ID NO: 31621 - DNA, 2291 bp, Homo sapiens
gtgaccccaacagagtgtcccgggactcaggcctctgatcaagttacccccagaggatcagagaggggttgacgaaggagaagcattcagagggcactggcttctggacagcaatgagtgcccgggccacgcggccccgaagccggcgagggaggcatgctccacccggtgaactggatcccgtggctgagagttcagaggaggtcgaggcagccagtgggagctccaagcccagctttgccccacctccggtgagctccgggctggagcagctgggccccatggaggaggtcagtggccaaggcctaggaagcaggactgacaagaagatggatgggggctctggcagggaactggcctcagcccccgaagtgccccacaaacctgcagtggaagcccaccaagccccagaagcagccctacagtacaaggagactgtgccccctgggaatggggcccccgatgtgtttcagaccctccagcacactctgagctccctggaggcagcggctgcagcctggcgccaccagccccccagccattctgggccgatggagttcgaaggcacaagcgaagggggagcaggttcccttgggaagcaggaaggggcagggagctgccagcgagaggcagctcgcctggccgagaggaatgcctggctccggctggccctgagtagccgagaggatgagctggtccgcacgcaggcctccctggaggccatccgagctgagaaggagacgctgcagaaagaggttcaagagctgcaggattccctcttgaggctggagccctgcccacatctttcccacaaccaagcaggtggctcaggcagtggttctagcagctctgaggcagacagggaaccctgggagactcaggactccttctccctggctcaccccctgcttcggcgcctccgcagccattccagcacccagatccttgggtctcttcccaaccagcccctcagtcctgagatgcacatcatggaagcccagatggagcaactccgggggagcattgagaagctcaaatgctttaatcgtctgctatcagctgtgctacagggatacaagggccgctgtgaaggcctcagcatgcagctaggccagcgggaggctgaggccacagcattgcatctggccttgcagtacagtgaacactgtgaagaggcatacagggttctgcttgctctgcgggaggccgactcaggagcaggagacgaagcccccatgagtgacctgcaagcagctgaaaaggaagcatggaggctgctggcacaagaagaagctgccatggatgcaggaacacagcagaatccacagccaagccctgaaggcagcagtgtggataagcccaccccacaggaagtggctttccagctccgaagctatgtccagcgtctccaggagcgccgttctctagtgaagattctctcagagcctggccccaccttggcacccatgcccattgtgccccgtgcagaagccatggtgcaggccattctggggacccaggctggcccagctcttccccgactggagaagacacaaattcagcaggacctggtggccgcaagggaggccctggcggacctgatgcttcggctgcagctggtgcggcgtgagaagcggggcctagagctgcgggaggctgccctccgagccctgggtccagctcacgtgctcctgctggagcagctgcggtgggaacgggcagagctccaggctggtggggcaaacagcagtggcggacatagcagcggaggtggcagcagcggggacgaggaagagtggtatcagggccttcctgctgtccctggtggcaccagtggcattgatggtggccaggtgggcagagcctgggacccagagaagttagcccaggaactggcagcatcgctcaccaggacactggacctgcaggagcagctgcagtctctgcgcagggagctggaacaggtggctcagaaggggcgagccagacggtctcagagtgccgagctgaacagggatttatgcaaagcccacagcgccctggtcctggccttccgaggagcccaccggaagcaggaagagcaacgccggaagttggagcagcagatggcactcatggaggctcagcaggccgaggaggtggcggtgctcgaagccactgcaagggccctggggaagcccaggcctcccctcccgcctccccagcttggggacacctttctgtaggccccttacccagccatgtctggacatgccagacagctgtggcatgtcataaactgtcctggagtg

SEQ ID NO: 31622 - DNA, 2731 bp, Homo sapiens
gtgaccccaacagagtgtcccgggactcaggcctctgatcaagttacccccagaggatcagagaggggttgacgaaggagaagcattcagagggcactggcttctggacagcaatgagtgcccgggccacgcggccccgaagccggcgagggaggcatgctccacccggtgaactggatcccgtggctgagagttcagaggaggtcgaggcagccagtgggagctccaagcccagctttgccccacctccggtgagctccgggctggagcagctgggccccatggaggaggtcagtggccaaggcctaggaagcaggactgacaagaagatggatgggggctctggcagggaactggcctcagcccccgaagtgccccacaaacctgcagtggaagcccaccaagccccagaagcagccctacagtacaaggagactgtgccccctgggaatggggcccccgatgtgtttcagaccctccagcacactctgagctccctggaggcagcggctgcagcctggcgccaccagccccccagccattctgggccgatggagttcgaaggcacaagcgaagggggagcaggttcccttgggaagcaggaaggggcagggagctgccagcgagaggcagctcgcctggccgagaggaatgcctggctccggctggccctgagtagccgagaggatgagctggtccgcacgcaggcctccctggaggccatccgagctgagaaggagacgctgcagaaagaggttcaagagctgcaggattccctcttgaggctggagccctgcccacatctttcccacaaccaagcaggtggctcaggcagtggttctagcagctctgaggcagacagggaaccctgggagactcaggactccttctccctggctcaccccctgcttcggcgcctccgcagccattccagcacccagatccttgggtctcttcccaaccagcccctcagtcctgagatgcacatcatggaagcccagatggagcaactccgggggagcattgagaagctcaaatgctttaatcgtctgctatcagctgtgctacagggatacaagggccgctgtgaaggcctcagcatgcagctaggccagcgggaggctgaggccacagcattgcatctggccttgcagtacagagtcttgctctgtcacccaggctggagtgcagtggtgccatcttggctcactgcaacctccgcctccccagttcaagtgattctcctgcctcagcctcctgagtagctggaactacaggtgcgtaccaccacaccttgctaatctttgtctttttagtagagacggggtttcaccatgttggtcaggctggtctcgaactcctgacctcaggtaatcctcccaaagtgctgggactacaggtgagggccattgcacccagccgagctgagtgtcctgaagcactcagaaccagtgtcccacagtgaacactgtgaagaggcatacagggttctgcttgctctgcgggaggccgactcaggagcaggagacgaagcccccatgagtgacctgcaagcagctgaaaaggaagcatggaggctgctggcacaagaagaagctgccatggatgcaggaacacagcagaatccacagccaagccctgaaggcagcagtgtggataagcccaccccacaggaagtggctttccagctccgaagctatgtccagcgtctccaggagcgccgttctctagtgaagattctctcagagcctggccccaccttggcacccatgcccattgtgccccgtgcagaagccatggtgcaggccattctggggacccaggctggcccagctcttccccgactggagaagacacaaattcagcaggacctggtggccgcaagggaggccctggcggacctgatgcttcggctgcagctggtgcggcgtgagaagcggggcctagagctgcgggaggctgccctccgagccctgggtccagctcacgtgctcctgctggagcagctgcggtgggaacgggcagagctccaggctggtggggcaaacagcagtggcggacatagcagcggaggtggcagcagcggggacgaggaagagtggtatcagggccttcctgctgtccctggtggcaccagtggcattgatggtggccaggtgggcagagcctgggacccagagaagttagcccaggaactggcagcatcgctcaccaggacactggacctgcaggagcagctgcagtctctgcgcagggagctggaacaggtggctcagaaggggcgagccagacggtctcagagtgccgagctgaacagggatttatgcaaagcccacagcgccctggtcctggccttccgaggagcccaccggaagcaggaagagcaacgccggaagttggagcagcagatggcactcatggaggctcagcaggccgaggaggtggcggtgctcgaagccactgcaagggccctggggaagcccaggcctcccctcccgcctccccagcttggggacacctttctgtaggccccttacccagccatgtctggacatgccagacagctgtggcatgtcataaactgtcctggagtgacatcatgtcatgttgcatgatttggcatgttggggcacatttggcgtgagggaagctggtgcacatgggtgtccagggcctgatggggtgtggccaggcaatgaagaaagactcaggtgtctttggcctggcacca

SEQ ID NO: 31623 - DNA, 3604 bp, Homo sapiens
  misc_feature (510)..(510): n is a, c, g, or t
  misc_feature (546)..(546): n is a, c, g, or t
  misc_feature (568)..(568): n is a, c, g, or t
  misc_feature (586)..(586): n is a, c, g, or t
  misc_feature (594)..(595): n is a, c, g, or t
  misc_feature (609)..(609): n is a, c, g, or t
  misc_feature (613)..(613): n is a, c, g, or t
  misc_feature (627)..(627): n is a, c, g, or t
  misc_feature (631)..(631): n is a, c, g, or t
  misc_feature (657)..(657): n is a, c, g, or t
  misc_feature (1004)..(1004): n is a, c, g, or t
  misc_feature (1071)..(1071): n is a, c, g, or t
  misc_feature (1102)..(1102): n is a, c, g, or t
  misc_feature (1106)..(1106): n is a, c, g, or t
  misc_feature (1119)..(1119): n is a, c, g, or t
  misc_feature (1147)..(1147): n is a, c, g, or t
  misc_feature (1187)..(1187): n is a, c, g, or t
gtgaccccaacagagtgtcccgggactcaggcctctgatcaagttacccccagaggatcagagaggggttgacgaaggagaagcattcagagggcactggcttctggacagcaatgagtgcccgggccacgcggccccgaagccggcgagggaggcatgctccacccggtgaactggatcccgtggctgagagttcagaggaggtcgaggcagccagtgggagctccaagcccagctttgccccacctccggtgagctccgggctggagcagctgggccccatggaggaggtcagtggccaaggcctaggaagcaggtaagacccgcttggtctgtgcccttcactccagtccagacgcatctttgccatccacagatctgctgatgtgcctgctctgctcacacacctaccatagctccctattgccttcagcctgactttcttttttttttgagtcttgctgtgtcacccaggctgtagtgcagtgcagtggcacaatctcggctcanagcaacccctgcctcccggttcaagcgggagcctcngcttcctgagtagttgggattncaggtgtgcgccaccacntccggctnngttttgcatttttngtgngacaggccacattngccnggctggtcttgaactcctgcccttangtgatcccccaactttggcctccaaaagtgctgggattacaagtgtaagccgccgccccagaagaccctatttccagaaacttctgtctctcaccttcaggcctttcccagtgcccgtcacagtccaacttcactctgtttctcagctccaggtctcccctccaacttcttcaccacctctatctagcctcttccttgaattcacagcctcccagtctcaccctgggatgccagtcccagaacacgcagctcttgccaactccctgtccgctcacacctccccaagaccatgaagtttaagccctcagaattccctgcccagggccgagcatggtggctcatgcctntaatcccagcactttgggaggccgagttgggcggatcacctgaggtcaggagtttgacaccagcctngccaacatggtgaaaccctgtctctactaanaatncaaaaattagccnggcgtggtggtgggagcctgtaatcccngctacttgggggaccgaggcaggagaatcacttgaacccnggaggtggaggttgcagtgagccgagatcgcgccactgcactccaggctgggcaacagagtgagactccgtctcaaaaaataaaaaagaattccttgcccagcatggagtgactcaagtgcctgagttggtgtccacaggactgacaagaagatggatgggggctctggcagggaactggcctcagcccccgaagtgccccacaaacctgcagtggaagcccaccaagccccagaagcagccctacagtacaaggagactgtgccccctgggaatggggcccccgatgtgtttcagaccctccagcacactctgagctccctggaggcagcggctgcagcctggcgccaccagccccccagccattctgggccgatggagttcgaaggcacaagcgaagggggagcaggttcccttgggaagcaggaaggggcagggagctgccagcgagaggcagctcgcctggccgagaggaatgcctggctccggctggccctgagtagccgagaggatgagctggtccgcacgcaggcctccctggaggccatccgagctgagaaggagacgctgcagaaagaggttcaagagctgcaggattccctcttgaggctggagccctgcccacatctttcccacaaccaagcaggtggctcaggcagtggttctagcagctctgaggcagacagggaaccctgggagactcaggactccttctccctggctcaccccctgcttcggcgcctccgcagccattccagcacccagatccttgggtctcttcccaaccagcccctcagtcctgagatgcacatcatggaagcccagatggagcaactccgggggagcattgagaagctcaaatgctttaatcgtctgctatcagctgtgctacagggatacaagggccgctgtgaaggcctcagcatgcagctaggccagcgggaggctgaggccacagcattgcatctggccttgcagtacagagtcttgctctgtcacccaggctggagtgcagtggtgccatcttggctcactgcaacctccgcctccccagttcaagtgattctcctgcctcagcctcctgagtagctggaactacaggtgcgtaccaccacaccttgctaatctttgtctttttagtagagacggggtttcaccatgttggtcaggctggtctcgaactcctgacctcaggtaatcctcccaaagtgctgggactacaggtgagggccattgcacccagccgagctgagtgtcctgaagcactcagaaccagtgtcccacagtgaacactgtgaagaggcatacagggttctgcttgctctgcgggaggccgactcaggagcaggagacgaagcccccatgagtgacctgcaagcagctgaaaaggaagcatggaggctgctggcacaagaagaagctgccatggatgcaggaacacagcagaatccacagccaagccctgaaggcagcagtgtggataagcccaccccacaggaagtggctttccagctccgaagctatgtccagcgtctccaggagcgccgttctctagtgaagattctctcagagcctggccccaccttggcacccatgcccattgtgccccgtgcagaagccatggtgcaggccattctggggacccaggctggcccagctcttccccgactggagaagacacaaattcagcaggacctggtggccgcaagggaggccctggcggacctgatgcttcggctgcagctggtgcggcgtgagaagcggggcctagagctgcgggaggctgccctccgagccctgggtccagctcacgtgctcctgctggagcagctgcggtgggaacgggcagagctccaggctggtggggcaaacagcagtggcggacatagcagcggaggtggcagcagcggggacgaggaagagtggtatcagggccttcctgctgtccctggtggcaccagtggcattgatggtggccaggtgggcagagcctgggacccagagaagttagcccaggaactggcagcatcgctcaccaggacactggacctgcaggagcagctgcagtctctgcgcagggagctggaacaggtggctcagaaggggcgagccagacggtctcagagtgccgagctgaacagggatttatgcaaagcccacagcgccctggtcctggccttccgaggagcccaccggaagcaggaagagcaacgccggaagttggagcagcagatggcactcatggaggctcagcaggccgaggaggtggcggtgctcgaagccactgcaagggccctggggaagcccaggcctcccctcccgcctccccagcttggggacacctttctgtaggccccttacccagccatgtctggacatgccagacagctgtggcatgtcataaactgtcctggagtg

SEQ ID NO: 31624 - DNA, 350 bp, Homo sapiens
  misc_feature (87)..(88): n is a, c, g, or t
  misc_feature (92)..(92): n is a, c, g, or t
  misc_feature (102)..(102): n is a, c, g, or t
gttgaggggttacaggcaccattgacatcatgggcagggaaagaagggaagccgtcagccaggggaaagagtgaggcaaaagagagnncagnccagtgaatngaaagacgatatggttccagggaggcagcgacaggtccacagatgaggatgggccctggctgtctcaaagaacgttatctgttttcttatttccatcctttttaagactagactgctcatgcttctgcgatagatttctccttccttctaaggtgctttcttgacttaatacagtttgagccggttttccttatttgaaaccaaaagtacttacctaggcaaggattctgtagtacactgatatcagg

SEQ ID NO: 31625 - DNA, 327 bp, Homo sapiens
gaacaagccaggtattcaagtcacatcctaggagggtcgaaaagtgcaattcctcctcagtggacaaatctcatccacctgcgacgtgtgtgacagtattcagggtgaggaaaacatttgacaaaggaagaaaaaaaatctaatcccattacctttgatgagtgctcagaggaaactcctataaaaactgaagattaaaatgttgcatagtgatggcatatacccatgccctcacacagacctcatttcctctttcatattacccgataaatgcactacttttctcctaaagtgtatttttttaataaataaaatcagtaagatcct

SEQ ID NO: 31626 - DNA, 516 bp, Homo sapiens
tgaaaagtcagagttagattcttagtgcaattctattcatgtacatttaaaacccagcgctgtattttacatgcatagccaggcccgaatgccactggtgagtctggggggtgagtgtgtgtcgggggcatgacctgattgttctaaaatagacacccgcccgcctcactcaccggagggcacctgagtctggctgctaccaacacagaaaggaaaggtttcctggaggttaaagaaatgatttatcaggtcatttcagcaccttggagcctttgaaagacccagtatgtcaggagatgatacaggcagataagttatgatctaatgagggaagaaaagacaggcaccacctagaaaccccggggcaattcaggagggaagtccgaagaccgcaagggtgtacgaacaggaagaggaaaaaccccgaaggtaaccttttctagcatcacagttcagctcaaaactaaccagggaacggttaacccaacgcactttactgaagaatctaagctggaa

SEQ ID NO: 31627 - DNA, 375 bp, Homo sapiens
ttttttttgagacagtctcactctgttgcccaggctggagcgcagtggcacaatctcggctcactgcaagctccacttcccgggttcacaccattctcctgcctcagcctcccgagtagctgggactacaggcacccgccaccacacctagctaattttttgcatttttagtagagacggggtttcactgtgttagccaggatggtctcgatctcctgacctcgtgatccacccgcctcggcctcccaaagtgcgtgagccactgcgcccggccgagaatgtcattaatcttgagagatgcatgctaaagtatttaggggtgaaatgtcatgacatctacaacttattttcaggtttgggaaaaagtgtgtgtgt

SEQ ID NO: 31628 - DNA, 1162 bp, Homo sapiens
atggtcacatgacacgttttctgagggggggtggaatttacctttaaaaagcagtgacccactacacatgctagaacaaagtgtccaccatagggcattaccgtgatgatgcagttccgtggttttaggacagtgtctgcttaacagggctctccccttctcaggggcttgttggcttgctctgatttgatagcagaactggaattgagaatctttaccccttaaaccattaaccgtaacatcaatttttgttttgccttggttttgttttaaaataaatttatcctgcaaaggaaaaaaatttcattcagtggggattatgaaacaaaactgtgatctcttaaaaagcaggaataatttgcatcaaggggaagacacttagctatagaataacaaataattggagagacccaaatacagctgcatatgtattctgattctttatagacaggactaagacccacacaggattgaaagtcatgtaaactttacactgtgctctattgtaaaatattaccttctgcatgtattacatcctaaaaattaatagagaaattaaagaaagcaatagaaaaaatgtttagagagcaagggtttttgtaatctgaagggaggatgagaaaaaacacttatcccattcatggatgatgatgagggggaattatgttttaccacagctttatcttgagaaatgatgataagcataggttggaattgtagacaatttagatggctaaatgttagacgattttactatcttattgagcaaatatttgctgaggatttactaagttgctaggtacagagttaaatgagaaacattcctgaagacttaaggaaccaacagcccattagtaaaacaagataagcagataatgacagttgaaagtaggctctactctgattagtgtgtggaggaatgaggttattattaatgtccagaggaaaaatccctttctaagttagcacgaatttgattgttcaaccaaatgtgaaataagcatgctcacagtggaagagtgagcagcacactttgtctgcataaatgactgggattaaactgctggggcgaggagtatagaaaactgttattgtgtggacatgttagggtcttaaaaggtaagtagaagtttttcagctagagaagggtatttcatgcaaa

SEQ ID NO: 31629 - DNA, 2299 bp, Homo sapiens
  misc_feature (405)..(405): n is a, c, g, or t
  misc_feature (430)..(430): n is a, c, g, or t
cagattattagaagataagaaaatcactgtgttactggatgaagttgcagaagatatgggtaagtgtcaccttaccaaaggcaaacaggctctagagattcgaagtagtttatctgagaagagagcacttactgatccaatacagggaacagaatattctgctgaatctcttgtgcggaatctacagtgggccaaggctcatgaacttccagaaagtatgtgtcttaagtttgactgtggtgttcagattcaattaggatttgcagctgagttttccaatgtcatgatcatctatacaagtatagtttacaaaccaccggagataataatgtgtgatgcctacgttactgattttccacttgatctagatattgatccaaaagatgcaaataaaggcacacctgnagaaactggcagctacttggtatcnaaggatcttcccaagcattgcctctataccagactcagttcactgcaaaaattaaaggaacatctagtcttcacagtatgtttatcatatcagtactcaggattggaagatactgtagaggacaagcaggaagtgaatgttgggaaacctctcattgctaaattagacatgcatcgaggtttgggaaggaagacttgctttcaaacttgtcttatgtctaatggtccttaccagagttctgcagccacctcaggaggagcagggcattatcactcattgcaagacccattccatggtgtttaccattcacatcctggtaatccaagtaatgttacaccagcagatagctgtcattgcagccggactccagatgcatttatttcaagtttcgctcaccatgcttcatgtcattttagtagaagtaatgtgccagtagagacaactgatgaaataccatttagtttctctgacaggctcagaatttctgaaaaatgacctccttgtttttgaaagttagcataattttagatgcctgtgaaatagtactgcacttacataaagtgagacattgtgaaaaggcaaatttgtatatgtagagaaagaatagtagtaactgtttcatagcaaacttcaggactttgagatgttgaaattacattatttaattacagacttcctctttctaagattttgtgaattggttgaatagttctatacaaatgaagtatggaggtgtgtatgtttatatgtatataacaaaatattttcattgtgaccactctgaagtaagagcaatgggaatggcattattgtagaataagtcattgtatttttaacaccagaaagaaccttgccgatcaccaggcataacctaattttatccatggaagaaacacagaaaggcatctaagttagagctggcaccagaactgagacctccagaaatctattccagtattttttccactacacaactgccttcctgacaggttctgagataagtgttatgtttgtagatagagtgaaatatatttatatatatataaatatatacagatacatatctgtgtattatctcaaggaatgtacaaactttagtttttgattataaggacttcactgcaagttttagttaagaggtttgtatataaatctgttatagaacaggctgaaatttcttgttcataagattatgaaaccacatgagaagtgataaaatgtttgttaaagctagatagaggttaagaatcaagatataatggataattttcatagctgcctatcagaatttcccaaatatttagcatcttccttgataatatgtattttcttcttgaatttcactggcctaatgagataatactcttatctttggctctacctaaaagttggttaaaaatgcaattggcattaacaaggaaaaatactgaattagtaattttaaaagtctcacaaagaaaatcccaggcctagatggctgcattgttgaattctgccaaacattaaaattagcactaattttttgcacactgtttctaaaagtaggagaggaaagaacacttcccaacttactctaggtcagtattaccctgatactagactagacatcacaagaaaactataagccaatattccttattaatacaaacacaaaaatcattaacaaaaatattagcaaactgaatccagcaacctataaaaaggattctatatcatgaccaagtggaatttatcccaggaattcaaggttggttcaacatctaaaaatcaaataagctaatatacagtcagttctcattattcacagtaattatgttctacagaatattctcccataaacactgaattaaatatggaacaactgctttt

SEQ ID NO: 31630 - DNA, 2797 bp, Homo sapiens
  misc_feature (405)..(405): n is a, c, g, or t
  misc_feature (430)..(430): n is a, c, g, or t
cagattattagaagataagaaaatcactgtgttactggatgaagttgcagaagatatgggtaagtgtcaccttaccaaaggcaaacaggctctagagattcgaagtagtttatctgagaagagagcacttactgatccaatacagggaacagaatattctgctgaatctcttgtgcggaatctacagtgggccaaggctcatgaacttccagaaagtatgtgtcttaagtttgactgtggtgttcagattcaattaggatttgcagctgagttttccaatgtcatgatcatctatacaagtatagtttacaaaccaccggagataataatgtgtgatgcctacgttactgattttccacttgatctagatattgatccaaaagatgcaaataaaggcacacctgnagaaactggcagctacttggtatcnaaggatcttcccaagcattgcctctataccagactcagttcactgcaaaaattaaaggaacatctagtcttcacagtatgtttatcatatcagtactcaggattggaagatactgtagaggacaagcaggaagtgaatgttgggaaacctctcattgctaaattagacatgcatcgaggtttgggaaggaagacttgctttcaaacttgtcttatgtctaatggtccttaccagagttctgcagccacctcaggaggagcagggcattatcactcattgcaagacccattccatggtgtttaccattcacatcctggtaatccaagtaatgttacaccagcagatagctgtcattgcagccggactccagatgcatttatttcaagtttcgctcaccatgcttcatgtcattttagtagaagtaatgtgccagtagagacaactgatgaaataccatttagtttctctgacaggctcagaatttctgaaaaatgacctccttgtttttgaaagttagcataattttagatgcctgtgaaatagtactgcacttacataaagtgagacattgtgaaaaggcaaatttgtatatgtagagaaagaatagtagtaactgtttcatagcaaacttcaggactttgagatgttgaaattacattatttaattacagacttcctctttctaagattttgtgaattggttgaatagttctatacaaatgaagtatggaggtgtgtatgtttatatgtatataacaaaatattttcattgtgaccactctgaagtaagagcaatgggaatggcattattgtagaataagtcattgtatttttaacaccagaaagaaccttgccgatcaccaggcataacctaattttatccatggaagaaacacagaaaggcatctaagttagagctggcaccagaactgagacctccagaaatctattccagtattttttccactacacaactgccttcctgacaggttctgagataagtgttatgtttgtagatagagtgaaatatatttatatatatataaatatatacagatacatatctgtgtattatctcaaggaatgtacaaactttagtttttgattataaggacttcactgcaagttttagttaagaggtttgtatataaatctgttatagaacaggctgaaatttcttgttcataagattatgaaaccacatgagaagtgataaaatgtttgttaaagctagatagaggttaagaatcaagatataatggataattttcatagctgcctatcagaatttcccaaatatttagcatcttccttgataatatgtattttcttcttgaatttcactggcctaatgagataatactcttatctttggctctacctaaaagttggttaaaaatgcaattggcattaacaaggaaaaatactgaattagtaattttaaaagtctcacaaagaaaatcccaggcctagatggctgcattgttgaattctgccaaacattaaaattagcactaattttttgcacactgtttctaaaagtaggagaggaaagaacacttcccaacttactctaggtcagtattaccctgatactagactagacatcacaagaaaactataagccaatattccttattaatacaaacacaaaaatcattaacaaaaatattagcaaactgaatccagcaacctataaaaaggattctatatcatgaccaagtggaatttatcccaggaattcaaggttggttcaacatctaaaaatcaaataagctaatatacagtcagttctcattattcacagtaattatgttctacagaatattctcccataaacactgaattaaatatggaacaactgcttttaggagaaagtgtatttgtgtatatgtgtgtatacatatgtttatctcacacacattatgagcttgaattcttaattcatcctagcaaattctaccttattttacagaagtgaaagtgaggtatcagaagtgttaagtgacatgcctgaggcacccccctaacaggtgtcagagctgaaattcaaaccccatccagctggccccggagccagagcttcttgtactacacagaattgcccctgccatttccaccctccagtcatttctctatgagactgaagcaggaaggcagagcatcatcttgttcagcctcagctgggaacatgtgtactgggtgactcaaatttttcacccatttacacatatccacaaatgactgcaaaagtgccacggatatcaatttgagggttataaattttagcaagttggtaaattcacaaatacataaccttgaataatgaggatcaactgtaccatatttaataaagcacaaaaccca

SEQ ID NO: 31631 - DNA, 3223 bp, Homo sapiens
  misc_feature (405)..(405): n is a, c, g, or t
  misc_feature (430)..(430): n is a, c, g, or t
cagattattagaagataagaaaatcactgtgttactggatgaagttgcagaagatatgggtaagtgtcaccttaccaaaggcaaacaggctctagagattcgaagtagtttatctgagaagagagcacttactgatccaatacagggaacagaatattctgctgaatctcttgtgcggaatctacagtgggccaaggctcatgaacttccagaaagtatgtgtcttaagtttgactgtggtgttcagattcaattaggatttgcagctgagttttccaatgtcatgatcatctatacaagtatagtttacaaaccaccggagataataatgtgtgatgcctacgttactgattttccacttgatctagatattgatccaaaagatgcaaataaaggcacacctgnagaaactggcagctacttggtatcnaaggatcttcccaagcattgcctctataccagactcagttcactgcaaaaattaaaggaacatctagtcttcacagtatgtttatcatatcagtactcaggattggaagatactgtagaggacaagcaggaagtgaatgttgggaaacctctcattgctaaattagacatgcatcgaggtttgggaaggaagacttgctttcaaacttgtcttatgtctaatggtccttaccagagttctgcagccacctcaggaggagcagggcattatcactcattgcaagacccattccatggtgtttaccattcacatcctggtaatccaagtaatgttacaccagcagatagctgtcattgcagccggactccagatgcatttatttcaagtttcgctcaccatgcttcatgtcattttagtagaagtaatgtgccagtagagacaactgatgaaataccatttagtttctctgacaggctcagaatttctgaaaaatgacctccttgtttttgaaagttagcataattttagatgcctgtgaaatagtactgcacttacataaagtgagacattgtgaaaaggcaaatttgtatatgtagagaaagaatagtagtaactgtttcatagcaaacttcaggactttgagatgttgaaattacattatttaattacagacttcctctttctaagattttgtgaattggttgaatagttctatacaaatgaagtatggaggtgtgtatgtttatatgtatataacaaaatattttcattgtgaccactctgaagtaagagcaatgggaatggcattattgtagaataagtcattgtatttttaacaccagaaagaaccttgccgatcaccaggcataacctaattttatccatggaagaaacacagaaaggcatctaagttagagctggcaccagaactgagacctccagaaatctattccagtattttttccactacacaactgccttcctgacaggttctgagataagtgttatgtttgtagatagagtgaaatatatttatatatatataaatatatacagatacatatctgtgtattatctcaaggaatgtacaaactttagtttttgattataaggacttcactgcaagttttagttaagaggtttgtatataaatctgttatagaacaggctgaaatttcttgttcataagattatgaaaccacatgagaagtgataaaatgtttgttaaagctagatagaggttaagaatcaagatataatggataattttcatagctgcctatcagaatttcccaaatatttagcatcttccttgataatatgtattttcttcttgaatttcactggcctaatgagataatactcttatctttggctctacctaaaagttggttaaaaatgcaattggcattaacaaggaaaaatactgaattagtaattttaaaagtctcacaaagaaaatcccaggcctagatggctgcattgttgaattctgccaaacattaaaattagcactaattttttgcacactgtttctaaaagtaggagaggaaagaacacttcccaacttactctaggtcagtattaccctgatactagactagacatcacaagaaaactataagccaatattccttattaatacaaacacaaaaatcattaacaaaaatattagcaaactgaatccagcaacctataaaaaggattctatatcatgaccaagtggaatttatcccaggaattcaaggttggttcaacatctaaaaatcaaataagctaatatacagtcagttctcattattcacagtaattatgttctacagaatattctcccataaacactgaattaaatatggaacaactgcttttaggagaaagtgtatttgtgtatatgtgtgtatacatatgtttatctcacacacattatgagcttgaattcttaattcatcctagcaaattctaccttattttacagaagtgaaagtgaggtatcagaagtgttaagtgacatgcctgaggcacccccctaacaggtgtcagagctgaaattcaaaccccatccagctggccccggagccagagcttcttgtactacacagaattgcccctgccatttccaccctccagtcatttctctatgagactgaagcaggaaggcagagcatcatcttgttcagcctcagctgggaacatgtgtactgggtgactcaaatttttcacccatttacacatatccacaaatgactgcaaaagtgccacggatatcaatttgagggttataaattttagcaagttggtaaattcacaaatacataaccttgaataatgaggatcaactgtaccatatttaataaagcacaaaacccacacagattgtcttattacagcatttgataaaatccaaaactctttcataaaaacactcaacaaacttaggaataaaaggaatcttcctagatatgataaatataacatctatgaaaagcccacacctaacattatacttcatggtgatagactgaaggctgaatgttttccccttaagattgggaagaaggacaaggatgttcactcggcactacttctattcagcattgtacttgaagttctagccacagcagttaggttaggaattcaaggtttgttcaacatctaaaaatcaaataagctaataaagaaaagaggtttatactgcaaaagaagtgaaactatatgtattcacagttgatacatagttgtatatagaaaatgctaaagaatccataaaaagtaataaatgagttcaacaggttg

SEQ ID NO: 31632 - DNA, 3279 bp, Homo sapiens
  misc_feature (405)..(405): n is a, c, g, or t
  misc_feature (430)..(430): n is a, c, g, or t
cagattattagaagataagaaaatcactgtgttactggatgaagttgcagaagatatgggtaagtgtcaccttaccaaaggcaaacaggctctagagattcgaagtagtttatctgagaagagagcacttactgatccaatacagggaacagaatattctgctgaatctcttgtgcggaatctacagtgggccaaggctcatgaacttccagaaagtatgtgtcttaagtttgactgtggtgttcagattcaattaggatttgcagctgagttttccaatgtcatgatcatctatacaagtatagtttacaaaccaccggagataataatgtgtgatgcctacgttactgattttccacttgatctagatattgatccaaaagatgcaaataaaggcacacctgnagaaactggcagctacttggtatcnaaggatcttcccaagcattgcctctataccagactcagttcactgcaaaaattaaaggaacatctagtcttcacagtatgtttatcatatcagtactcaggattggaagatactgtagaggacaagcaggaagtgaatgttgggaaacctctcattgctaaattagacatgcatcgaggtttgggaaggaagacttgctttcaaacttgtcttatgtctaatggtccttaccagagttctgcagccacctcaggaggagcagggcattatcactcattgcaagacccattccatggtgtttaccattcacatcctggtaatccaagtaatgttacaccagcagatagctgtcattgcagccggactccagatgcatttatttcaagtttcgctcaccatgcttcatgtcattttagtagaagtaatgtgccagtagagacaactgatgaaataccatttagtttctctgacaggctcagaatttctgaaaaatgacctccttgtttttgaaagttagcataattttagatgcctgtgaaatagtactgcacttacataaagtgagacattgtgaaaaggcaaatttgtatatgtagagaaagaatagtagtaactgtttcatagcaaacttcaggactttgagatgttgaaattacattatttaattacagacttcctctttctaagattttgtgaattggttgaatagttctatacaaatgaagtatggaggtgtgtatgtttatatgtatataacaaaatattttcattgtgaccactctgaagtaagagcaatgggaatggcattattgtagaataagtcattgtatttttaacaccagaaagaaccttgccgatcaccaggcataacctaattttatccatggaagaaacacagaaaggcatctaagttagagctggcaccagaactgagacctccagaaatctattccagtattttttccactacacaactgccttcctgacaggttctgagataagtgttatgtttgtagatagagtgaaatatatttatatatatataaatatatacagatacatatctgtgtattatctcaaggaatgtacaaactttagtttttgattataaggacttcactgcaagttttagttaagaggtttgtatataaatctgttatagaacaggctgaaatttcttgttcataagattatgaaaccacatgagaagtgataaaatgtttgttaaagctagatagaggttaagaatcaagatataatggataattttcatagctgcctatcagaatttcccaaatatttagcatcttccttgataatatgtattttcttcttgaatttcactggcctaatgagataatactcttatctttggctctacctaaaagttggttaaaaatgcaattggcattaacaaggaaaaatactgaattagtaattttaaaagtctcacaaagaaaatcccaggcctagatggctgcattgttgaattctgccaaacattaaaattagcactaattttttgcacactgtttctaaaagtaggagaggaaagaacacttcccaacttactctaggtcagtattaccctgatactagactagacatcacaagaaaactataagccaatattccttattaatacaaacacaaaaatcattaacaaaaatattagcaaactgaatccagcaacctataaaaaggattctatatcatgaccaagtggaatttatcccaggaattcaaggttggttcaacatctaaaaatcaaataagctaatatacagtcagttctcattattcacagtaattatgttctacagaatattctcccataaacactgaattaaatatggaacaactgcttttaggagaaagtgtatttgtgtatatgtgtgtatacatatgtttatctcacacacattatgagcttgaattcttaattcatcctagcaaattctaccttattttacagaagtgaaagtgaggtatcagaagtgttaagtgacatgcctgaggcacccccctaacaggtgtcagagctgaaattcaaaccccatccagctggccccggagccagagcttcttgtactacacagaattgcccctgccatttccaccctccagtcatttctctatgagactgaagcaggaaggcagagcatcatcttgttcagcctcagctgggaacatgtgtactgggtgactcaaatttttcacccatttacacatatccacaaatgactgcaaaagtgccacggatatcaatttgagggttataaattttagcaagttggtaaattcacaaatacataaccttgaataatgaggatcaactgtaccatatttaataaagcacaaaacccacacagattgtcttattacagcatttgataaaatccaaaactctttcataaaaacactcaacaaacttaggaataaaaggaatcttcctagatatgataaatataacatctatgaaaagcccacacctaacattatacttcatggtgatagactgaaggctgaatgttttccccttaagattgggaagaaggacaaggatgttcactcggcactacttctattcagcattgtacttgaagttctagccacagcagttaggttaggaattcaaggtttgttcaacatctaaaaatcaaataagctaataaagaaaagaggtttatactgcaaaaaaaaaaaaaaacacacaaaactacaaaacacaacaacaccacacacacaacaaaaaaagggggggggggccccaaaaaattaccccgagggggcccaattccgccccccctttttgcgcaaaggggggccacaaaagaggcggcttaaac

SEQ ID NO: 31633 - DNA, 366 bp, Homo sapiens
ctgcgcaccgccggctgattacaggttaccgctccctcggctgtcaccctgtgactaccagaataaggcaacgacggtgggtgcacttcgcaaatatgctcccccgaagacctcttttgaaactataaagtggattagtaatgactacaaccagggatttgcaaatgcagttaaaactgtgtaatggatttctttaaagagtagtttaacagtaagaattctacccgattactttatattatagtatattacaaacttcaaaattagaatagatttgaagctattgaatacaatataaattcatgagtctatactgctgtaaataaatgaatgaataaatagaggggttaagccactctttcatat

SEQ ID NO: 31634 - DNA, 282 bp, Homo sapiens
ttttttaagtagagatggggtcttgccatattgctaggattacagttgtaagccactgcacccggccagcaacctgatcgtatagcagaggaaattgaggggcagagaggttaaggaacctgccaaatgtcacacagctggagaagcagagaagccagttgcccgagctcctcactgctctgtcagcctgattctcctcctcggggaggtcctcccttttcttccaagttctatcagggtcctcttgttccccctgactgtcttctgtgcctcctcctctgg

SEQ ID NO: 31635 - DNA, 4577 bp, Homo sapiens
gaattccgggcggcggcggccaaactccgcggcgtccccagggcgccagcgttcgccctcgccgccgcggccgcgctgctcttcggctccgacatggaagatggaccttctaataatgcgagctgcttccgaaggctgaccgagtgcttcctgagccccaaagctaatggtatagatatagaagtcatccacagagatgttacagttgaagagatgggggtagagaagactttgaaggaaaagaatgtagaatgaggatagaagagaggaaatcccaacatttaacaggtttgacagatgaaaaagtgaaggcatatctttctcttcacccccaggtattagatgaatttgtatctgaaagtgttagtgcagagacagtagagaaatggctgaagaggaagaacaacaaatcagaagatgaatcagctcctaaggaagtcagcaggtaccaagatacgaatatgcagggagttgtatatgaactaaacagctatatagaacaacggttggacacaggaggagacaaccagctactcctctatgaactgagcagcatcattaaaatagccacaaaagccgatggatttgcactgtatttccttggagagtgcaataatagcctgtgtatattcacgccacctgggataaaggaaggaaaaccccgcctcatccctgctgggcccatcactcagggcaccaccgtctctgcttatgtggccaagtccaggaaaacactgctagtagaagacatccttggagatgaacgatttccaagaggtactggactggaatcagggactcgtatccagtctgttctttgcttaccaattgtcactgcaattggtgacttgattggtattctcgagctgtatcggcactggggcaaagaagccttctgtcttagtcaccaggaggttgcaacagcaaatcttgcctgggcttcagtagcaatacatcaggtgcaggtatgcagaggccttgccaaacagacagaattgaatgacttcctactcgacgtatcaaaaacatattttgataacatagttgcaatagattctctacttgaacacataatgatatatgcaaaaaacctggtgaatgccgatcgttgtgcgcttttccaggtggaccataagaacaaggagttatattcagacctttttgatattggagaggaaaaggaaggaaaacctgtcttcaagaagaccaaagagataagattttcaattgagaaaggaattgctggccaagtagcaagaacaggggaagtcctgaacattccagatgcctatgcagacccacgctttaacagagaagtagacttgtacacaggctacaccacgcggaacatcctgtgcatgcccatcgtcagccgaggcagcgtgataggtgtggtgcagatggtcaacaaaatcagtggcagtgccttctctaaaacagatgaaaacaacttcaaaatgtttgccgtcttttgtgctttagccttacactgtgctaatatgtatcatagaattcgccactcagagtgcatttaccgggtaacgatggaaaagctgtcctaccatagcatttgtacttcagaagagtggcaaggtctcatgcaattcacccttcccgtgcgtctctgcaaagaaattgaattattccactttgacattggtccttttgaaaacatgtggcctggaatttttgtctacatggttcatcggtcctgtgggacatcctgctttgagcttgaaaagttgtgtcgttttattatgtctgtgaagaagaactatcggcgggttccttatcacaactggaagcatgcggtcactgtagcacactgcatgtatgccatacttcagaacaatcacacgcttttcacagaccttgagcgcaaaggactgctgattgcgtgtctgtgtcatgacctggaccacaggggcttcagtaacagctacctgcagaagttcgaccaccctctggccgctctctactccacttccaccatggagcagcaccacttctcccagactgtgtccatcctccagttggaagggcacaatatcttctccactctgagctccagtgaatatgagcaggtgcttgagatcatccgcaaagccatcattgccacagaccttgctttatactttggaaacaggaagcagttggaagagatgtaccagaccggatcactaaaccttaataatcaatcacatagagaccgtgtaattggtttgatgatgactgcctgtgacctttgttctgtgacaaaactgtggcccgttacaaaattgacggcaaatgatatatatgcagaattctgggctgagggtgatgaaatgaagaaattgggaatacagcctattcctatgatggacagagacaagaaggatgaagtcccccaaggccagcttgggttctacaatgccgtggccattccctgctatacaacccttacccagatcctccctcccacggagcctcttctgaaagcatgcagggataatctcagtcagtgggagaaggtgattcgaggggaggagactgcaacctggatttcatccccatccgtggctcagaaggcagctgcatctgaagattgagcactggtcaccctgacacgctgtcccacctacagatcctcatcttgcttctttgacattcttttcctttttttggggggggtggggggaacctgcacctggtaactggggtgcaaacctcttcaagaaggtaacatcaaataaataagtcaagcagaggacttcctgccaatctcttctgtgaggcatcatagacactgagcaaccaggaccacccccacgttcagaaatcagctggccaagtgactccatttgacttgcaaaccagccttttctaataggctaatattgctgaggccttaaaggaaatggacaaaaattatccagaaggggtacttttccattgtatctttctaataagggtttaaaatggtactattatggtattgtacttgggctttaacatcaatgttgctttgatgttgttggatataaataggaatttttacacattactattgtgaatggtgaatgttcatgtatgacctacttgtaattaacttgagttgtagtccacagcctcaggacaaatgtcgttgaggttacagagtaagaaatgatggcaaaacgtcaaactcttatttcagagcttcatgaatttagttagactaaacataattctttaagttcaacctaaagggctgagatcaataaatttaacactagacgaagtagacttcctgtctttttgagaagagatgaggtatatgttacaataaatctcagaacttcaagtagcagttcaaaagatgtcagtttttaaaattgtttttgttgttgtcttggcagttttactgaaccctttgcataaagaacaaaataaaagctcggcattgtaatttttttaatggacaagtcttatggatacgaagggtacatttttcataatgattcctttatattttcactttgtgtcattgcagaattttagactctcattcacaatgaaaagtttattttaaacattgtttaattaaaataccatacagttctcttttaaacatcaaaccataaaaagtgtattttgtaattttactctgacctgccgcagtcacctctcacttatctcttccacgtactgcacggtcgtatttcatgagctttctgtccatagcacagaaacagagcagaaagtagtacaatcatgttggaccttctttctgttctctttactcttctcacagatcagatcactccatagaagcctgtgggtttcgatggtttcttctatacacctttttggttgaccagtattactatacaatgtaagtgttttaaaaaatacgaaagtaatactctgcaccccttcctacaaagatgataaagcagtcacttctggcgcattttaataatttaaagatttttagtgcaatggcacggtaacctccaaacctgaattagacagagactcactcaggaagtgacaggcccatcatatcaaataacttattcacttttcatgtggcaggaaactggaatatcgcttttaataaaatggaaaaatatgcttctacatatttaccaccataggcgttttgttcatatgagcctggtttgtgcaaaattaaatcagaggcttctacaacatggtttatttatgttgtagcaaagttggctctacataaacattgttcttattttaaaattaacactatgtgttcagttttcttgtgggcttctgaaagttgccatcttccctccgtggagctccatttgctattttcattatacactatgaggtaaaatgtaataacaaaagagagagaagtaccactgtggctagatatatacacacacatatatatatggatggatgtaatatatgtagaacacacacatagatgtatataggatacacactcatgtatgtaaacgtatacatatgtgtatatatgatacatacacatacacacacacgagagacagaaggaaagagaggaagagagaagcaaacatgtaggaaaaaatataaatcagccggaattc

SEQ ID NO: 31636 - DNA, 4449 bp, Homo sapiens
gaattccgggcggcggcggccaaactccgcggcgtccccagggcgccagcgttcgccctcgccgccgcggccgcgctgctcttcggctccgacatggaagatggaccttctaataatgcgagctgcttccgaaggctgaccgagtgcttcctgagccccagtttgacagatgaaaaagtgaaggcatatctttctcttcacccccaggtattagatgaatttgtatctgaaagtgttagtgcagagacagtagagaaatggctgaagaggaagaacaacaaatcagaagatgaatcagctcctaaggaagtcagcaggtaccaagatacgaatatgcagggagttgtatatgaactaaacagctatatagaacaacggttggacacaggaggagacaaccagctactcctctatgaactgagcagcatcattaaaatagccacaaaagccgatggatttgcactgtatttccttggagagtgcaataatagcctgtgtatattcacgccacctgggataaaggaaggaaaaccccgcctcatccctgctgggcccatcactcagggcaccaccgtctctgcttatgtggccaagtccaggaaaacactgctagtagaagacatccttggagatgaacgatttccaagaggtactggactggaatcagggactcgtatccagtctgttctttgcttaccaattgtcactgcaattggtgacttgattggtattctcgagctgtatcggcactggggcaaagaagccttctgtcttagtcaccaggaggttgcaacagcaaatcttgcctgggcttcagtagcaatacatcaggtgcaggtatgcagaggccttgccaaacagacagaattgaatgacttcctactcgacgtatcaaaaacatattttgataacatagttgcaatagattctctacttgaacacataatgatatatgcaaaaaacctggtgaatgccgatcgttgtgcgcttttccaggtggaccataagaacaaggagttatattcagacctttttgatattggagaggaaaaggaaggaaaacctgtcttcaagaagaccaaagagataagattttcaattgagaaaggaattgctggccaagtagcaagaacaggggaagtcctgaacattccagatgcctatgcagacccacgctttaacagagaagtagacttgtacacaggctacaccacgcggaacatcctgtgcatgcccatcgtcagccgaggcagcgtgataggtgtggtgcagatggtcaacaaaatcagtggcagtgccttctctaaaacagatgaaaacaacttcaaaatgtttgccgtcttttgtgctttagccttacactgtgctaatatgtatcatagaattcgccactcagagtgcatttaccgggtaacgatggaaaagctgtcctaccatagcatttgtacttcagaagagtggcaaggtctcatgcaattcacccttcccgtgcgtctctgcaaagaaattgaattattccactttgacattggtccttttgaaaacatgtggcctggaatttttgtctacatggttcatcggtcctgtgggacatcctgctttgagcttgaaaagttgtgtcgttttattatgtctgtgaagaagaactatcggcgggttccttatcacaactggaagcatgcggtcactgtagcacactgcatgtatgccatacttcagaacaatcacacgcttttcacagaccttgagcgcaaaggactgctgattgcgtgtctgtgtcatgacctggaccacaggggcttcagtaacagctacctgcagaagttcgaccaccctctggccgctctctactccacttccaccatggagcagcaccacttctcccagactgtgtccatcctccagttggaagggcacaatatcttctccactctgagctccagtgaatatgagcaggtgcttgagatcatccgcaaagccatcattgccacagaccttgctttatactttggaaacaggaagcagttggaagagatgtaccagaccggatcactaaaccttaataatcaatcacatagagaccgtgtaattggtttgatgatgactgcctgtgacctttgttctgtgacaaaactgtggcccgttacaaaattgacggcaaatgatatatatgcagaattctgggctgagggtgatgaaatgaagaaattgggaatacagcctattcctatgatggacagagacaagaaggatgaagtcccccaaggccagcttgggttctacaatgccgtggccattccctgctatacaacccttacccagatcctccctcccacggagcctcttctgaaagcatgcagggataatctcagtcagtgggagaaggtgattcgaggggaggagactgcaacctggatttcatccccatccgtggctcagaaggcagctgcatctgaagattgagcactggtcaccctgacacgctgtcccacctacagatcctcatcttgcttctttgacattcttttcctttttttggggggggtggggggaacctgcacctggtaactggggtgcaaacctcttcaagaaggtaacatcaaataaataagtcaagcagaggacttcctgccaatctcttctgtgaggcatcatagacactgagcaaccaggaccacccccacgttcagaaatcagctggccaagtgactccatttgacttgcaaaccagccttttctaataggctaatattgctgaggccttaaaggaaatggacaaaaattatccagaaggggtacttttccattgtatctttctaataagggtttaaaatggtactattatggtattgtacttgggctttaacatcaatgttgctttgatgttgttggatataaataggaatttttacacattactattgtgaatggtgaatgttcatgtatgacctacttgtaattaacttgagttgtagtccacagcctcaggacaaatgtcgttgaggttacagagtaagaaatgatggcaaaacgtcaaactcttatttcagagcttcatgaatttagttagactaaacataattctttaagttcaacctaaagggctgagatcaataaatttaacactagacgaagtagacttcctgtctttttgagaagagatgaggtatatgttacaataaatctcagaacttcaagtagcagttcaaaagatgtcagtttttaaaattgtttttgttgttgtcttggcagttttactgaaccctttgcataaagaacaaaataaaagctcggcattgtaatttttttaatggacaagtcttatggatacgaagggtacatttttcataatgattcctttatattttcactttgtgtcattgcagaattttagactctcattcacaatgaaaagtttattttaaacattgtttaattaaaataccatacagttctcttttaaacatcaaaccataaaaagtgtattttgtaattttactctgacctgccgcagtcacctctcacttatctcttccacgtactgcacggtcgtatttcatgagctttctgtccatagcacagaaacagagcagaaagtagtacaatcatgttggaccttctttctgttctctttactcttctcacagatcagatcactccatagaagcctgtgggtttcgatggtttcttctatacacctttttggttgaccagtattactatacaatgtaagtgttttaaaaaatacgaaagtaatactctgcaccccttcctacaaagatgataaagcagtcacttctggcgcattttaataatttaaagatttttagtgcaatggcacggtaacctccaaacctgaattagacagagactcactcaggaagtgacaggcccatcatatcaaataacttattcacttttcatgtggcaggaaactggaatatcgcttttaataaaatggaaaaatatgcttctacatatttaccaccataggcgttttgttcatatgagcctggtttgtgcaaaattaaatcagaggcttctacaacatggtttatttatgttgtagcaaagttggctctacataaacattgttcttattttaaaattaacactatgtgttcagttttcttgtgggcttctgaaagttgccatcttccctccgtggagctccatttgctattttcattatacactatgaggtaaaatgtaataacaaaagagagagaagtaccactgtggctagatatatacacacacatatatatatggatggatgtaatatatgtagaacacacacatagatgtatataggatacacactcatgtatgtaaacgtatacatatgtgtatatatgatacatacacatacacacacacgagagacagaaggaaagagaggaagagagaagcaaacatgtaggaaaaaatataaatcagccggaattc

SEQ ID NO: 31637 - DNA, 3140 bp, Homo sapiens
tttgttgtgatttccactcccctcttacccacacataacgggcggcattcgttctgttttcaatgtatcatagaattcgccactcagagtgcatttaccgggtaacgatggaaaagctgtcctaccatagcatttgtacttcagaagagtggcaaggtctcatgcaattcacccttcccgtgcgtctctgcaaagaaattgaattattccactttgacattggtccttttgaaaacatgtggcctggaatttttgtctacatggttcatcggtcctgtgggacatcctgctttgagcttgaaaagttgtgtcgttttattatgtctgtgaagaagaactatcggcgggttccttatcacaactggaagcatgcggtcactgtagcacactgcatgtatgccatacttcagaacaatcacacgcttttcacagaccttgagcgcaaaggactgctgattgcgtgtctgtgtcatgacctggaccacaggggcttcagtaacagctacctgcagaagttcgaccaccctctggccgctctctactccacttccaccatggagcagcaccacttctcccagactgtgtccatcctccagttggaagggcacaatatcttctccactctgagctccagtgaatatgagcaggtgcttgagatcatccgcaaagccatcattgccacagaccttgctttatactttggaaacaggaagcagttggaagagatgtaccagaccggatcactaaaccttaataatcaatcacatagagaccgtgtaattggtttgatgatgactgcctgtgacctttgttctgtgacaaaactgtggcccgttacaaaattgacggcaaatgatatatatgcagaattctgggctgagggtgatgaaatgaagaaattgggaatacagcctattcctatgatggacagagacaagaaggatgaagtcccccaaggccagcttgggttctacaatgccgtggccattccctgctatacaacccttacccagatcctccctcccacggagcctcttctgaaagcatgcagggataatctcagtcagtgggagaaggtgattcgaggggaggagactgcaacctggatttcatccccatccgtggctcagaaggcagctgcatctgaagattgagcactggtcaccctgacacgctgtcccacctacagatcctcatcttgcttctttgacattcttttcctttttttggggggggtggggggaacctgcacctggtaactggggtgcaaacctcttcaagaaggtaacatcaaataaataagtcaagcagaggacttcctgccaatctcttctgtgaggcatcatagacactgagcaaccaggaccacccccacgttcagaaatcagctggccaagtgactccatttgacttgcaaaccagccttttctaataggctaatattgctgaggccttaaaggaaatggacaaaaattatccagaaggggtacttttccattgtatctttctaataagggtttaaaatggtactattatggtattgtacttgggctttaacatcaatgttgctttgatgttgttggatataaataggaatttttacacattactattgtgaatggtgaatgttcatgtatgacctacttgtaattaacttgagttgtagtccacagcctcaggacaaatgtcgttgaggttacagagtaagaaatgatggcaaaacgtcaaactcttatttcagagcttcatgaatttagttagactaaacataattctttaagttcaacctaaagggctgagatcaataaatttaacactagacgaagtagacttcctgtctttttgagaagagatgaggtatatgttacaataaatctcagaacttcaagtagcagttcaaaagatgtcagtttttaaaattgtttttgttgttgtcttggcagttttactgaaccctttgcataaagaacaaaataaaagctcggcattgtaatttttttaatggacaagtcttatggatacgaagggtacatttttcataatgattcctttatattttcactttgtgtcattgcagaattttagactctcattcacaatgaaaagtttattttaaacattgtttaattaaaataccatacagttctcttttaaacatcaaaccataaaaagtgtattttgtaattttactctgacctgccgcagtcacctctcacttatctcttccacgtactgcacggtcgtatttcatgagctttctgtccatagcacagaaacagagcagaaagtagtacaatcatgttggaccttctttctgttctctttactcttctcacagatcagatcactccatagaagcctgtgggtttcgatggtttcttctatacacctttttggttgaccagtattactatacaatgtaagtgttttaaaaaatacgaaagtaatactctgcaccccttcctacaaagatgataaagcagtcacttctggcgcattttaataatttaaagatttttagtgcaatggcacggtaacctccaaacctgaattagacagagactcactcaggaagtgacaggcccatcatatcaaataacttattcacttttcatgtggcaggaaactggaatatcgcttttaataaaatggaaaaatatgcttctacatatttaccaccataggcgttttgttcatatgagcctggtttgtgcaaaattaaatcagaggcttctacaacatggtttatttatgttgtagcaaagttggctctacataaacattgttcttattttaaaattaacactatgtgttcagttttcttgtgggcttctgaaagttgccatcttccctccgtggagctccatttgctattttcattatacactatgaggtaaaatgtaataacaaaagagagagaagtaccactgtggctagatatatacacacacatatatatatggatggatgtaatatatgtagaacacacacatagatgtatataggatacacactcatgtatgtaaacgtatacatatgtgtatatatgatacatacacatacacacacacgagagacagaaggaaagagaggaagagagaagcaaacatgtaggaaaaaatataaatcagccggaattc

SEQ ID NO: 31638 - DNA, 4734 bp, Homo sapiens
gaattccgggcggcggcggccaaactccgcggcgtccccagggcgccagcgttcgccctcgccgccgcggccgcgctgctcttcggctccgacatggaagatggaccttctaataatgcgagctgcttccgaaggctgaccgagtgcttcctgagccccaaagctaatggtatagatatagaagtcatccacagagatgttacagttgaagagatgggggtagagaagactttgaaggaaaagaatgtagaatgaggatagaagagaggaaatcccaacatttaacaggtttgacagatgaaaaagtgaaggcatatctttctcttcacccccaggtattagatgaatttgtatctgaaagtgttagtgcagagacagtagagaaatggctgaagaggaagaacaacaaatcagaagatgaatcagctcctaaggaagtcagcaggtaccaagatacgaatatgcagggagttgtatatgaactaaacagctatatagaacaacggttggacacaggaggagacaaccagctactcctctatgaactgagcagcatcattaaaatagccacaaaagccgatggatttgcactgtatttccttggagagtgcaataatagcctgtgtatattcacgccacctgggataaaggaaggaaaaccccgcctcatccctgctgggcccatcactcagggcaccaccgtctctgcttatgtggccaagtccaggaaaacactgctagtagaagacatccttggagatgaacgatttccaagaggtactggactggaatcagggactcgtatccagtctgttctttgcttaccaattgtcactgcaattggtgacttgattggtattctcgagctgtatcggcactggggcaaagaagccttctgtcttagtcaccaggaggttgcaacagcaaatcttgcctgggcttcagtagcaatacatcaggtgcaggtatgcagaggccttgccaaacagacagaattgaatgacttcctactcgacgtatcaaaaacatattttgataacatagttgcaatagattctctacttgaacacataatgatatatgcaaaaaacctggtgaatgccgatcgttgtgcgcttttccaggtggaccataagaacaaggagttatattcagacctttttgatattggagaggaaaaggaaggaaaacctgtcttcaagaagaccaaagagataagattttcaattgagaaaggaattgctggccaagtagcaagaacaggggaagtcctgaacattccagatgcctatgcagacccacgctttaacagagaagtagacttgtacacaggctacaccacgcggaacatcctgtgcatgcccatcgtcagccgaggcagcgtgataggtgtggtgcagatggtcaacaaaatcagtggcagtgccttctctaaaacagatgaaaacaacttcaaaatgtttgccgtcttttgtgctttagccttacactgtgctaatatgtatcatagaattcgccactcagagtgcatttaccgggtaacgatggaaaagctgtcctaccatagcatttgtacttcagaagagtggcaaggtctcatgcaattcacccttcccgtgcgtctctgcaaagaaattgaattattccactttgacattggtccttttgaaaacatgtggcctggaatttttgtctacatggttcatcggtcctgtgggacatcctgctttgagcttgaaaagttgtgtcgttttattatgtctgtgaagaagaactatcggcgggttccttatcacaactggaagcatgcggtcactgtagcacactgcatgtatgccatacttcagaacaatcacacgcttttcacagaccttgaggtacatcatgatgacacagcagcatataacatggaaaccaccccaaaacaaaatgatactaacaacataattaattcagttatcttaagaatgccagaattgggagtacttgagagcttagaccttgaccctcctccaacctcaaactacaaccttgcgcaaaggactgctgattgcgtgtctgtgtcatgacctggaccacaggggcttcagtaacagctacctgcagaagttcgaccaccctctggccgctctctactccacttccaccatggagcagcaccacttctcccagactgtgtccatcctccagttggaagggcacaatatcttctccactctgagctccagtgaatatgagcaggtgcttgagatcatccgcaaagccatcattgccacagaccttgctttatactttggaaacaggaagcagttggaagagatgtaccagaccggatcactaaaccttaataatcaatcacatagagaccgtgtaattggtttgatgatgactgcctgtgacctttgttctgtgacaaaactgtggcccgttacaaaattgacggcaaatgatatatatgcagaattctgggctgagggtgatgaaatgaagaaattgggaatacagcctattcctatgatggacagagacaagaaggatgaagtcccccaaggccagcttgggttctacaatgccgtggccattccctgctatacaacccttacccagatcctccctcccacggagcctcttctgaaagcatgcagggataatctcagtcagtgggagaaggtgattcgaggggaggagactgcaacctggatttcatccccatccgtggctcagaaggcagctgcatctgaagattgagcactggtcaccctgacacgctgtcccacctacagatcctcatcttgcttctttgacattcttttcctttttttggggggggtggggggaacctgcacctggtaactggggtgcaaacctcttcaagaaggtaacatcaaataaataagtcaagcagaggacttcctgccaatctcttctgtgaggcatcatagacactgagcaaccaggaccacccccacgttcagaaatcagctggccaagtgactccatttgacttgcaaaccagccttttctaataggctaatattgctgaggccttaaaggaaatggacaaaaattatccagaaggggtacttttccattgtatctttctaataagggtttaaaatggtactattatggtattgtacttgggctttaacatcaatgttgctttgatgttgttggatataaataggaatttttacacattactattgtgaatggtgaatgttcatgtatgacctacttgtaattaacttgagttgtagtccacagcctcaggacaaatgtcgttgaggttacagagtaagaaatgatggcaaaacgtcaaactcttatttcagagcttcatgaatttagttagactaaacataattctttaagttcaacctaaagggctgagatcaataaatttaacactagacgaagtagacttcctgtctttttgagaagagatgaggtatatgttacaataaatctcagaacttcaagtagcagttcaaaagatgtcagtttttaaaattgtttttgttgttgtcttggcagttttactgaaccctttgcataaagaacaaaataaaagctcggcattgtaatttttttaatggacaagtcttatggatacgaagggtacatttttcataatgattcctttatattttcactttgtgtcattgcagaattttagactctcattcacaatgaaaagtttattttaaacattgtttaattaaaataccatacagttctcttttaaacatcaaaccataaaaagtgtattttgtaattttactctgacctgccgcagtcacctctcacttatctcttccacgtactgcacggtcgtatttcatgagctttctgtccatagcacagaaacagagcagaaagtagtacaatcatgttggaccttctttctgttctctttactcttctcacagatcagatcactccatagaagcctgtgggtttcgatggtttcttctatacacctttttggttgaccagtattactatacaatgtaagtgttttaaaaaatacgaaagtaatactctgcaccccttcctacaaagatgataaagcagtcacttctggcgcattttaataatttaaagatttttagtgcaatggcacggtaacctccaaacctgaattagacagagactcactcaggaagtgacaggcccatcatatcaaataacttattcacttttcatgtggcaggaaactggaatatcgcttttaataaaatggaaaaatatgcttctacatatttaccaccataggcgttttgttcatatgagcctggtttgtgcaaaattaaatcagaggcttctacaacatggtttatttatgttgtagcaaagttggctctacataaacattgttcttattttaaaattaacactatgtgttcagttttcttgtgggcttctgaaagttgccatcttccctccgtggagctccatttgctattttcattatacactatgaggtaaaatgtaataacaaaagagagagaagtaccactgtggctagatatatacacacacatatatatatggatggatgtaatatatgtagaacacacacatagatgtatataggatacacactcatgtatgtaaacgtatacatatgtgtatatatgatacatacacatacacacacacgagagacagaaggaaagagaggaagagagaagcaaacatgtaggaaaaaatataaatcagccggaattc

SEQ ID NO: 31639 - DNA, 2437 bp, Homo sapiens
gaattccgggcggcggcggccaaactccgcggcgtccccagggcgccagcgttcgccctcgccgccgcggccgcgctgctcttcggctccgacatggaagatggaccttctaataatgcgagctgcttccgaaggctgaccgagtgcttcctgagccccaaagctaatggtatagatatagaagtcatccacagagatgttacagttgaagagatgggggtagagaagactttgaaggaaaagaatgtagaatgaggatagaagagaggaaatcccaacatttaacaggtttgacagatgaaaaagtgaaggcatatctttctcttcacccccaggtattagatgaatttgtatctgaaagtgttagtgcagagacagtagagaaatggctgaagaggaagaacaacaaatcagaagatgaatcagctcctaaggaagtcagcaggtaccaagatacgaatatgcagggagttgtatatgaactaaacagctatatagaacaacggttggacacaggaggagacaaccagctactcctctatgaactgagcagcatcattaaaatagccacaaaagccgatggatttgcactgtatttccttggagagtgcaataatagcctgtgtatattcacgccacctgggataaaggaaggaaaaccccgcctcatccctgctgggcccatcactcagggcaccaccgtctctgcttatgtggccaagtccaggaaaacactgctagtagaagacatccttggagatgaacgatttccaagaggtactggactggaatcagggactcgtatccagtctgttctttgcttaccaattgtcactgcaattggtgacttgattggtattctcgagctgtatcggcactggggcaaagaagccttctgtcttagtcaccaggaggttgcaacagcaaatcttgcctgggcttcagtagcaatacatcaggtgcaggtatgcagaggccttgccaaacagacagaattgaatgacttcctactcgacgtatcaaaaacatattttgataacatagttgcaatagattctctacttgaacacataatgatatatgcaaaaaacctggtgaatgccgatcgttgtgcgcttttccaggtggaccataagaacaaggagttatattcagacctttttgatattggagaggaaaaggaaggaaaacctgtcttcaagaagaccaaagagataagattttcaattgagaaaggaattgctggccaagtagcaagaacaggggaagtcctgaacattccagatgcctatgcagacccacgctttaacagagaagtagacttgtacacaggctacaccacgcggaacatcctgtgcatgcccatcgtcagccgaggcagcgtgataggtgtggtgcagatggtcaacaaaatcagtggcagtgccttctctaaaacagatgaaaacaacttcaaaatgtttgccgtcttttgtgctttagccttacactgtgctaatatgtatcatagaattcgccactcagagtgcatttaccgggtaacgatggaaaagctgtcctaccatagcatttgtacttcagaagagtggcaaggtctcatgcaattcacccttcccgtgcgtctctgcaaagaaattgaattattccactttgacattggtccttttgaaaacatgtggcctggaatttttgtctacatggttcatcggtcctgtgggacatcctgctttgagcttgaaaagttgtgtcgttttattatgtctgtgaagaagaactatcggcgggttccttatcacaactggaagcatgcggtcactgtagcacactgcatgtatgccatacttcagaacaatcacacgcttttcacagaccttgaggtacatcatgatgacacagcagcatataacatggaaaccaccccaaaacaaaatgatactaacaacataattaattcagttatcttaagaatgccagaattgggagtacttgagagcttagaccttgaccctcctccaacctcaaactacaaccttgcgcaaaggactgctgattgcgtgtctgtgtcatgacctggaccacaggggcttcagtaacagctacctgcagaagttcgaccaccctctggccgctctctactccacttccaccatggagcagcaccacttctcccagactgtgtccatcctccagttggaagggcacaatatcttctccactctgagctccagtgaatatgagcaggtgcttgagatcatccgcaaagccatcattgccacagaccttgctttatactttggaaacaggaagcagttggaagagatgtaccagaccggatcactaaaccttaataatcaatcacataggtaaaaataatttttaaaagcttagaagcccagaaagtgttatctggaataaattgatacttaagaaatgtaat

SEQ ID NO: 31640 - DNA, 1023 bp, Homo sapiens
gaattccgggcggcggcggccaaactccgcggcgtccccagggcgccagcgttcgccctcgccgccgcggccgcgctgctcttcggctccgacatggaagatggaccttctaataatgcgagctgcttccgaaggctgaccgagtgcttcctgagccccaaagctaatggtatagatatagaagtcatccacagagatgttacagttgaagagatgggggtagagaagactttgaaggaaaagaatgtagaatgaggatagaagagaggaaatcccaacatttaacagctaataaatgaagaaggcatgatagaatgaggaaaatcaccattgtcaagccctactgaattagtcactcaagagccactaatgctgctgacatcacaaaaaacttctgacagaagtgtgcagtaacactgaccagattgtaccccaaatggaacctacatctcttcaggccttgaggactaatgtcaattttcaagaaatgcagagagcggaggaacatgctaaaccccacagggataaagtcagaaaaatccagattgaagtaaaccataggactaaaaacctattttattcagaaataagttataatgggggaaagtaagagatggagggaatattattggaccaaagagacctaaatataatttaaaaaatgaaattccgagctactgcaacatgtggaatttacttgtgtcctagtgcagaccaacaagcagtaaaaaaaaaaaaaaaaaaaaaaaaaggagttttaaggccgggatattctgaggagggaacttaaacaataataattcccttaatgtggcgaaacagacagcataattaacgcgcacaaactagcttctcactcttcggacgaacaccttttggaaagggctccctacttttttaacaataattcggggaattggttggaaactctttcagcacggaagtcgctgcaccacctgaccacttggcttgcatgtagaggtgacctgcgctcaaccatgggccaactttcgcggcacacgc

SEQ ID NO: 31641 - DNA, 547 bp, Homo sapiens
ccagttaaggataatagttacaatggaagaaacagatcaaatttattcaaatatatggtttcgtagtaatactgttattttttagttgtttacccatgggagaatgttactgcatccactcattattttcaaaactggtgaacaaaggggaacaaattaagcatttgtcttgtttgatctacatgaactgtcccaccggacaaccacatagtagatgaagctaagtttctcttcatattatttcagctaataaatgaagaaggcatgatagaatgaggaaaatcaccattgtcaagccctactgaattagtcactcaagagccactaatgctgctgacatcacaaaaaacttctgacagaagtgtgcagtaacactgaccagattgtaccccaaatggaacctacatctcttcaggccttgaggactaatgtcaattttcaagaaatgcagagagcggaggaacatgctaaaccccacagggataaagtcagaaaaatccagattgaagtaaaccataggactaaaaacctattttattcagaaata

SEQ ID NO: 31642 - DNA, 387 bp, Homo sapiens
gtacatcatgatgacacagcagcatataacatggaaaccaccccaaaacaaaatgatactaacaacataattaattcagttatcttaagaatgccaggcgagtatgattgttaacatgatacttcatggggttaggggttactggcgagatttcccttccaattatgtggcgggaaaaaccagttcagcattatcaggacaaagaagcaggcatatcgctaaaaatgtacctgtgagaacttctgctgactcccatcgcagcacccccatctgtctgcatctgccctcagcaggctctgccttgcacacttccttaaaccttcacactcctctccagagctgacccttctgctttattgtatctgtcgcctccacctcttggagaac

SEQ ID NO: 31643 - DNA, 313 bp, Homo sapiens
atgaaaaagtgaaggcatatctttctcttcacccccaggtattagatgaatttgtatctgaaagtgttagtgcagagacagtagagaaatggctgaagaggaagaacaacaaatcagaaggtaaggtctcttgtggatctcattttaaaccagctttttctatcttacggcaaaagactaagcatttaatatattctagagtgtgaaatataaagtagacaaatattaacactgtaattctatcagagttattccatttaaaaagataaagtaagttagagaagaaataaatacaaaagaaagatccgtgact

SEQ ID NO: 31644 - DNA, 694 bp, Homo sapiens
gccgactactaactactactaaattcgcggccgcgtcgacggctgtgacaaacaattggtttgtgttttgaattattcatggcacaaacccctcctgaaaacaccagactagacttttctgatcatgaagggtgagtgcaggcctcgatggtcttcaggtctcttctggctgcagcattctgtgagtctgtgaaatcaaacagtgtctataaaagggtttgtccttttctttcttcagttaatgattgtggatgaggattctttgcactggtagacactagtgttttgatgacatgaagacagaagaagaagtagcattagttaattcaaacaagcctgtattgatcttgtaaattggctaaaatctttgttgtactaaagagattgcttaatgtttttgaatcctattctttaaaatgttttggtttgagtaataaagctaaatatcaccagaaagataacttattgaaaattgtaaaagtatttctttgagaagaaatgcataaagtattttcaaatagtctcatttacttcctgtaaaacatggtgaggctaggtgcagtggctcacgcatgcaatcccagcactttgggaggccaaggagggagtatcccttgtacccaggagttcaagaccagcctaggcaacatagtgagacactcaacaccacaaaaagaaaaagcatgacaagaca

SEQ ID NO: 31645 - DNA, 244 bp, Homo sapiens
gcatctagccctggaagaaatgatgcaacatcacaatgtcatcaaaggccgaacgtgtaaatcaactctgctttgcatgtttattccaagaatgagcacagtagacatagcagaaccagatttggaaacggcatctctaattttgtttggccaaatttgccaagcataatagattatgagcccttatgggtgttcccaagtaattacacttaattgtttgtgcaaatcagaggatctatgagct

SEQ ID NO: 31646 - DNA, 775 bp, Homo sapiens
aatgccttctaaataggaattttgttctcctcatgttgttttcttctcttcatttctggtacccaaccaatatccaagattagatccctctatataaatgaaaatgtataacctttaaaattattttcttttggtctttttttctaccaagtaagaactaaaaaagattaccatccccctcagcatttcactagtttttgttcaaacagcacacaaacagaattatttcaagatatttagctaattaaatttgattgtgcaattcagatctatataaattaaccttagcattattcctgtgctttattattcactgataggttcttattcaactaatgtttatttcttgcctaatatgtgccagaaaccgtgaagtgtttaggatatgcagtgagtggttaatgagacaagtatgatccaacttgtgtttgcaattaagcagggatacaggtactgaataaatactgaaaataattaaaatggtaataagtgatttgttaatactgatgcatgtagatctaattcattttaaatgttacaaaataagttacaaaatggtatatgccatatgatgctatttttgtacatctataataaactttatgagacacaaatatgcaatgtagttactaataaaactataagaacaagaacaccaatctttagataaagcttactgccaggagggaatggaatggatgcagagagcatggttagctgtatctttaatgtttcatttctttaaaaaatatttcagcaaatataatgataatga

SEQ ID NO: 31647 - DNA, 543 bp, Homo sapiens
tttgctcaaattcagactctggtcttcaggccagaaaaggatcccctgctgccaaagtgaataaaggaacaaatgccaaaagtagcttgcccacttgatggtggggagatgagcatctttaaactgggggcagaggccctcactccaggtggagacaagactgcaaaggcaaatactttgatggagaacatagcaacaacttaaactataggactacaccaatccttgctactcaaagtgcagcccatggacaagcagtattgtcataacctggaaatgagctagaaatgcaatctcaagagccatcccaatccgcttttcagcaagatcctcatttgcttggtatgtacattaaagtgtgagaagcattggcataaatgacagatatcatctcctctgtggaaaacagattttgcaggatcttgaacttttgagaaggaaaaagaaaaatgacatgaaatgaggagagggagaaggaagagggagatgtaagaaggacacagatcactagtttgccctggggtgccctgcattctcagttct

SEQ ID NO: 31648 - DNA, 419 bp, Homo sapiens
gaaagcaatgtttgttctatgaatggcctgtgtgctcacagagaaagatggctgagtaagggccatcttacttttccttttccactggattgattacaatgagacaatctttttatgccaaagattatctcaatgttctatatacaatgttctacatacagctaattcccaagggaattaggtctaaatttaattttaaccactgcatttcatatttttcaggagttatatttgtcatttggtttgtaatatctactctctgatctaaactattcacttctgccttttatttttgtgctcatctggaagctaaatcaacaaaacagcttggcatagtaaatcatatgttctcaccataaagtttatcatattttttaaagtaaaaaaaaatcactcaaaatattctataagcaacagta

SEQ ID NO: 31649 - DNA, 199 bp, Homo sapiens
atttaggatctctacccttaaataagtgacaaaaactttctaatttaaaaaaatagataattcaaatttcttttaaacctttaatgttctcttgactgatctattttgacttaagactgccaacaaacagttaactaggagcagctacctctgcaattgctaataaggaaagtaagaatagaaactctttcatcctatt

SEQ ID NO: 31650 - DNA, 392 bp, Homo sapiens
caaacagcaaagatggcggcccccttctcccccagggaacttatcccagggagaattcaaatctccgtcagcctgagagcacctgccggagtagcagcaggccccagttgggaggtcccacccagcgaggaggaatggattggggacccacttaaagaggcagtctggccacattttggtagagcagctgtgctgcgtgggggatcccttctgccctcagttggtttgggttctcaaaagcccaacaggctggaatagctaagttacccaagcaacaaagatggtggcctgccctgtcccctaggaagtcagtctcaggtaggtaaaacactgttgctggtggctggctggagttgtttccttgattatatgagtaatgcgagtacctggtt

SEQ ID NO: 31651 - DNA, 1327 bp, Homo sapiens
gaacatttgaaatttattctcttgacaattttgaaagatccaatacactattattaactatagtcactatgctgtgcaatagatctcaaaagcttattcctcttaactgaaacctactaccctgtgacatgtggggaacatctctctattccccagccccagtccctaaatgttgaatacacaatggggaaaaaatagtcttcaatgaatggtggtgggaaaattgtatatccacatgcagaagaataaaattggacccttacctcctaccatatataaaaaccaactgaaaatcgattaaagacttaaactgtaaaactactaaaagaaaatatagggagaaagcttcacaacgttggtctgggcaataatttttggatttgacctcaaaagtagatgcaaccacagtgaaaataaacaaatgaaattgcataaaataaaaaatgtttctgcacagcaaaggaaataattaatggagtaaagagacaacttacagattgggagaatatatttccaaactattgttggggctcagaaacggataccctaacatatagtgatttgacaggtggaactaaagaagactcgaggtctctctgacctcctcctcaacctctgtttcttaatcctctgttttcccagagcacaggaggaagttctctgaagttcctttatctgctttaagttcagactcaccaaataagaaaacagttaattctggtgccttccatgggttttcattaactgaagtcatattgtaggaaaaagaatgaagtctcttaacccacctggatagatttttctcacaaaccattgtcttctctgcaagcccagtagactttgtcccaggccatttatgtgaatcttcaccccattaagttctccccaaattatttactcttcccccaaaatcacccacacttccccatctccctctcccctaaggacaagggtatatcaccatctataccccattgcttggtggggtgatcactctgattctctgcatgcatttttatagatttgtttgccatttatcctattaatctgcattctgtcaattgtggcaagttatcagcatattttttaacttttaattattattaatggaaagacacttctgtatacactggaaatctcaggaaatttcttttttccttaagcttaattgaaatgtttacttttcagtaaaatttcaagcttgagtaatgttcatgcctgcttttcattgaaatagaatgaaaaggttgcacaatattattttcatgaaattacttctagtataattctgaataaacactttgaaaggcagtgaactgtaaatata

SEQ ID NO: 31652 - DNA, 1276 bp, Homo sapiens
tttaagtgttaaattcaatatacagtaatctgtacttcaaaagtttgtttcttgcttttctaagggcagtactaaataataataacaataataatccttgctaaaatttatgaattcttactctatgtcatgcaccatgtagatttttcacatatataatctgtttaacaaccctgggaagttcatattattatctccattttacatatggtgaaactgaggcttagagcagttaaataaattgcttaagatcatatggcttgttggtggcagatctggaattttctaactcagaaccctgcttttagctggacatggtggtacatgcgtgtaatcccagctactcactcaggaggctgaggtgggaggatcacttaatcccaggagtttgagaccaacctaggcaaagagagaccccatcttaaaaaaaaaaaaaagaaagaaaaggaaagaaaaaaaagaaccctgcttttaatctaaccttgggctagattcttgatacttttttacagggcattttttcctcactactcaagtatacctaagtaggaaataaaacttattttaatattcatctaagtgaaatataaaaagaaaacctataaacctattcttcaaaaaactatgctatattttaatgccatcccaaaatatcttgaattatctatggctcatttctataccattgcccccttttctttaaagctgtagcatattgagaattgaatatgacctttctgagccactcatttctgaatttttaattttaaataaaaatactttttcagattgtttcagatttttagagagggtaaagcaaaatagaaacataaaatatgaaacatacgagtgtatgtatatatgtgtatgcatatatattgatatataaaatgaatgccttaacagataatgtgcattacaattgctgtttcacacttttgttggtattattttaattacactctgacaaaaagttcagcataaaggaaaattggccagacacagtagttcacgcatataaccccagggctttgggaggccaaggcaggagaatcgcttgagaccaggggttcgagatcagtctggacaacatagcaagacccatcgctagcaaaaatttaaaaattagcccagcatagcagcatatagctgtaggcctagctactcagaagaccgaggtgagaggattgcttcagcccaagagtatgaggctacagtgatctgtgatcgtgccactgcactccaacctgagtgatggaatgagaccctgtctcta

SEQ ID NO: 31653 - DNA, 899 bp, Homo sapiens
agattactgaagtagaaatgagcctaagatataccaaaaagaaagagaaagctggcaaatttccgggaagcaagagcaagtaggggccaggtgcagtggctcatgcctgtaatcccagcgcattttgggaggccaaagtgggaggattgtttgaggccaggtgttcaagaccagcctgggcacatagtgagaccccgtttccacaaaaaattttaaaattaactgggcatggtagtacgcacctatagtcctagctatttgaggggtgaggtaggaggatcgcttgagcccaaacgttcaaggctacagtgagctatggtggtgccactgtacttgagcctgagtgacagagcaagactctgtctttaaaggatttttttttttcaaattttttaataaagcaaatggctgggaaaaaaggtgagaaactgctcgcttggatttaagaactgctgctacttgctgtgtgacctggactagttttttgtttgttagttttatttttatttttgtttttttgctgggctttaccttggttttaattttctgaacttcattctgctcatctgaaaaatgaaatactaatgtcttcatcttagtgtaatagggatgattaggtaaggtcaaatatatggaagcatcttgtaaactgtaaaggtatgtaaaaatgtgagggtttgttttttgtgtgtgtatgtgctcttaatgcccaagatgcagagtagaaattaggcagctgggatgccaaacagccaggatgcaacatattggagagaagagccagatatctgaggaggaagtcacaccatcattgccatccatgttgtgatagtcaacagaaggagtaaaaagagacatcagaggaatgaaagggaggaatgaggattgggaaggaacga

SEQ ID NO: 31654 - DNA, 475 bp, Homo sapiens
aatactttttaaaattagcttttcagtatttcattagaattttaaaacttctttgacttttaaaaaattaaataatccaaatattattaaaagcaaaatgcaggggttttcctgctgcccctctgagtttaggagcagctgtcctgctccatggttgcccccttgatggaactggaagttgcctgcctgtcttctcttttttcttccatttcttcttcagactcttccttggcttagcacacctgactcccttccacatcagggataaatgcatacagggaggggaaagtggagaaggagggaccatgcaactcgtccaactcctctccccattcgtggacaagctcttcaccattccctctccactcatatagactccctggtctttccattgtcttcagtctctcaaatcccaccttatttgtgttgtttccaatttttcttgacaattacaaataaagcttctataaacatt

SEQ ID NO: 31655 - DNA, 366 bp, Homo sapiens
ggatgggggtatggttagtggaggggagattgttgataggactcaaaagcaatttaggaggaaggactgaccagaattggggactgatgggtggggcagggtggagtcaagatgatgcccagatttctggctctggcttctgggtggagaggagtgtcatttacagagagggggagccgaggggaggagcaggactggaggagtgctcagaaagggtgagttgccagagtggagggcccacggcagaccctgaagcacctgcttgggatttgtggagtcagacaaacctgagggtgaatcttggctcaaattacaaggtgatggcagaggctgaagacagggagggtgagcaaaggctgcagagga

SEQ ID NO: 31656 - DNA, 583 bp, Homo sapiens
aagctatttcaaaatgtaaaaacataaagtaactatgtgactctgcaagtgaactcctagaaagatacccaagaaaaatgaaaacacatgttcacacaagaaatcgtacattaatgtacatagaagcattactatagccaaaaagtggaaacaaccaaaatgtccatggactgacgaacggataaacaacgtgttatatttatgcagtggagtattactcagcaataaaaagagtgaagtctggagccgggcgcggagcgtcacacctgtaatcccagcactttgggaagcagaggcaagacaactgcttcatcccaggcatttgagaccagctttgggcaatgtggtgagaccctgtctctctttctaaaaaaaaaaataataaaaaaataaaaatagatgggcggtagggggaatccaaatgaggtttatattttgcagttagtcgatttaagtcccttgacttttaggttcccattcctttttttatcttccccccaccccctaccccattggttgaagaaactcttttatcctgtcatgtttaggttggctgacttcatccttgaagtacagtacatgt

SEQ ID NO: 31657 - DNA, 1470 bp, Homo sapiens
gtggaaagcgagagtgtcatggatgggttgtggctatgtcagtaaccttacaactgagattttaaaaggcaatgacaaggccgggcacggtggctcacacctgtaatcccagcactttgggaggctgaggctggtctcgaactcctgacctcaggtgatccacctgccttggcctccaaagtgctgggattatgggtgtgagccagcatgcccagcccactgatgttaaccttgatcacctggatgaaatagtatttgttagtttgcaccaccacccctccctgccaatactttgcacaacccgtacttaagtagtggagaattacgctctatctccttgagggtggaccgtctacataaattatttggaatttctctccttggagatctgttcaatcttccctatttgttcagtcatttggcttgtggatatttattttgtactctgagctatagtctaatactactttaactattttgctgttctgatgttccagctttggctgttgggggctcctgtgtccctttggtcactccatcattgtgtgtttctgtgtgtggtggttttttgttggttggttgcgattggtttttcctttttgagtacgtactttctggcactacaagatatttcaggattatcttgtagaattgctgcttcagtccttgaaatagctatttgtctaaggagctttggttccttttattggagaatggctcaggcactccatctgccttggcctcccaaagggctgggattagaggtgtgagccagcacgcctggccaatatttcacatcttaaaaactttatgaaatggataatttttaagcatttacaaatgtagagagaatagtataataaatctccccatgtacctatcccctaacttcaattatcagcttaaggccaatctcattttctctatatctatcccacctctctctatcagataatttgaaacaaatcttagataagtaatttcattagaaattatttcagcatgtatctctaaaagatatgggcttaaaaaaatcaatatcatcacatataaaaaattctcataaaccatgaagtctgttcaaatatcttagttggttcacatttgaaaaattgtattaggatccaaataggctggatgtggtggctcatgcctgtaatcccagcactttgggaagcagaggcaagacaactgcttcatcccaggcatttgagaccagctttgggcaatgtggtgagaccctgtctctctttctaaaaaaaaaaataataaaaaaataaaaatagatgggcggtagggggaatccaaatgaggtttatattttgcagttagtcgatttaagtcccttgacttttaggttcccattcctttttttatcttccccccaccccctaccccattggttgaagaaactcttttatcctgtcatgtttaggttggctgacttcatccttgaagtacagtacatgt

SEQ ID NO: 31658 - DNA, 310 bp, Homo sapiens
ggtcgacgtcttgccaggcttcagagttgtgagaaaatacatttctgttatttataattccctggtgtgtggtattttgctatagcagcacaaatattttaagagcattcatttctccatatcataaccagtaactgaatttcttaatactactttttggcaaatatggttgtcctgcaattcaaacatcctcagtattgctggcagaagtatgaactatgtctcctgacaatattctctccatcttattgcctacagaaattcatgaaaggatcaaatgtaaatggactgacttactccatttgtgctg

SEQ ID NO: 31659 - DNA, 498 bp, Homo sapiens
ttctaaaactgtatacatgcttggtaaatacagagttagaattaggaagagtgttgttaaaaatcattccctattctacttattctcatcaaaatggagtttcttagacactgctattccttcacatattctgatctctcttttgttgagcatcttgcgtgaaggtagactagagttttctcagtctagaattggttacctgttaaatatctaatggttctgtattctttcttacacactagctttagttctgtaggctggttcctggttcacagtcgttttagacactttgtcagactaagttgcttttggctcagtttgtatcacagcaagcttaacaaatgttaacatgataagtcctagttcgctttttttgtagaaaaggtaaggctaatggtattgttactaattctggaaatgcctcctctgcttcccccaactggcagtgatccttatttcttcctaagctttgggcagattcaggtgatccttgggcag

SEQ ID NO: 31660 - DNA, 595 bp, Homo sapiens
aggtaaacatcaaatgtgaaatctagggacaggcaagtttttgttgagaataacaaagctggggtatgagttgaactgaggcagcatatgtcataaaatgtaggctgttataagataaaaacacacttatatattggattgctttgaagtcaagtgtggtaaatgtgttgtagtgtgaatttccaagagaccacatactgaagagctttcctatcctgttgaatgccttttccccagaatggggacagtcacaaaaatctttcagtcccaatgtgtctgtctaggagagaaaaagtgcccacacttctgaaaagcattcagatccaccttctgtatccccattggagaattaagaaattactctgcagggaaagccactaaaaccagtatcatagaggcaccagggcaacctcttaggaactgagatgggaaaagaggtcttcttctaagttccattgagaactacctcccctctctttcttatttaatcacagccttaatctgcagttcaagtcagcaaatctggaaggtgataacaccaaaagagaacattggagctgtgggagggaacaactggggaaaacaagaggactcc

SEQ ID NO: 31661 - DNA, 393 bp, Homo sapiens
ctcccaccttggcctccaaagtgctaggattacaagtgtgagttatcatgcccagccaaaaataattttttatagttttatacttattccatactcaaactctccagttttgaaaaataagtcctttataactggtttgtccaaattaggatccagttgaggaccctatattgctagtggttatgtcctttagggctctttaaatctgatctccctttttaatgtcattgacttgttaaagaggctggacctattgataaatgagaatatttatttaaacttacttaaacattaaatctttaagcttacttaaatatttaagaatatctctttacatttattcagaacattttcttacatagcaaaaattctattcaaatttttgcaagttaa

SEQ ID NO: 31662 - DNA, 653 bp, Homo sapiens
tcatgattctgtgggttatcaatttaggctaggcttggctgaggggttcttctggtctaagctatgctgcctcatgcatctgtggtcagctgcagaatagcttgtctgatcttggctgggttctctcacaggtttatggcctgtggtcagtgtgatctctcatctccaacagggtaacttgggcttgttcacaccccagagtctgaggttcttagagagaaagcagaagtgttcaagccctcttgaacgaaggactatgaatctgtgtaccattacttctgctatattcttttggccagtgcaagctaagccacagtctaggccagattcaaagggtgggaaataaacttcagtccttgataggaggatctacaaagtcgtatgcacaggatgtggaaacggggaggagtgaagatttttgggcagtttggaaatttaccacagtgtacacgtgtgtttacatatgtgtacgtagatgaaaagtgagagcatatacattctgcatttttatcaccagacatgctccaaatccaagttactaatccaaccctgtggatatattggggaaagtaagtaaatcttaaatgggaagtgcctcaacaagtatctagaacaataccttccattcaatcaatggaaggcttaaaaaaaaa

SEQ ID NO: 31663 - DNA, 465 bp, Homo sapiens
atttaaaataagacaatagttttaaaattttaaaatgggtaaagtttggcactagaaaatttaatctcaattgtatatttataggatcttcagattactaaaaagatttgagataatgctggaaaaattggattcacacaatttcactcaatgtttgtctgagagatgagacagttttgaaaagctactttattgtaatacattcatcaatattggaaatataactttatttaataaaaagagccccagactggacattggcaggtttgaaatgagttttttctcattagcttttgaccttggatgggatggtaagttttagaaatcagagaacatgtacatttatacattgttgtatctacactgccttgcacattgtgactgcttcataaatatctagaattaacttttatttcttattttacaatacggaagtagtaaattttctctacctaattcttaaaa

SEQ ID NO: 31664 - DNA, 276 bp, Homo sapiens
agaccatcctggctaacatggaatgtgtaagttggagtattttaattacataaaagtagatcaatatcttcaagatgtctgtttgtgttctgaagagaaagaatcgcgctgcaaacaagcacagcatgcctttccatctgaggaagccagatttaagtaggaaaacagggtctctaactcagttacatctaatacaagctgtgcaatcaccttgagtaccagtcttcttactgagaaatacaattgctgtgaggattaaaataaatcatattcaga

SEQ ID NO: 31665 - DNA, 479 bp, Homo sapiens
ggggctcttggctttaacgaatttactgtatctaaaagacatcttagtacaggaagaaaactaaatctgtagcatgtaaggagcagttttatttgattggtatattcaggtttctaaccagctgaaaaattcaaatacatgccctttaaggattaagtttaaaccacactacagaaagagaaaagatttatatgatcacatataagcaatggaatcagcaatatgagtacttttcacaactatacaaatcaaatttaataatctccagaacattaaggaagttcagcccttaatggaaatgaatgaaaagaaattattcacccactgttacatgccctggaaagagaatgtcctgccagactcaaaagagtatcacaatattactcagattttcagcaatgaaggccctccgaggatctaatgatgttcatattttcagtttatttccttcactgataaacattgttaatagataaaat

SEQ ID NO: 31666 - DNA, 489 bp, Homo sapiens
atcctttacacaggtggatagaaaacgggccgacagtcagtccactcataatagctggacaaatgtttccttgtttaaggatgcataaagactaaaaaaaggctgtggaaaagtcctgcagaacaaggtaaaagcaagagcttctgtagactgagatggagtttctattttgaaaaaccatctacagcagactccagaagatagttttgggaaaatatgtggcatcctcagtatacagcaaaaggacatggtctcccagggccaggaacagtaaaacgtgaagaaaggatatttgacatggaaaagcaacagaaagggaaaagcaaggagatggattccataaggaaaggttttaaggatccaatagcagaactaaaatccaaattagcaagagtatagaaaagtattcatgtatagtaaactgaataatggcctccaaaagttttccatatcctaatccttggcacttgtgaatgttacctcacatgg

SEQ ID NO: 31667 - DNA, 486 bp, Homo sapiens
  misc_feature (25)..(25): n is a, c, g, or t
aaactatagtgctaggtacgaggcntgggtggtgttacgctttgctgcagcctatggctttcgaaacatccagaacatgatcctgaagcttaagaagggcaagttcccattccactttgtggaggtcctcgcctgtgctggaggatgcttaaatggcagaggccaagcccagactccagacggacatgcggataaggccctgctgcggcagatggaaggcatttacgctgacatccctgtgcggcgtccggagtccagtgcacacgtgcaggagctgtaccaggagtggctggaggggatcaactcccccaaggcccgagaggtgctgcataccacgtaccagagccaggagcgtggcacacacagcctggacatcaagtggtgaagtcaggccagggccttccagctgctcttggggccagagccaagagcctctcagtagagggaggggctgccctgagtggagtattaaagacacttaagaaa

SEQ ID NO: 31668 - DNA, 632 bp, Homo sapiens
gttgcgtggctcgcgttgacgaggtgtgcaagtgtctgtggggtcaggtcctaaaatcagttgccaggtcagcaagttctgtgatgttcttatgcactctgactgggctgtacgcctgcgggaaaggagtaggcagggctcctgcggtggaattgctgttgtgtggtcagctgcagtggtgacttgtgttcaccctggaaaccacagcagcactcaacctcaggaaagtgctcagattgtgcgggcatgtagtgacactacagatgttgctatttattacgacttgaggagtatagatttcttatattttaaaaagcgtgcagttgttgggctgttagtttctcgccggtgagagaagttgggcaagcatgtggctgctctcccctgagcggtagctgcgtgtcctggctgtaaggacgctgtagctggccaggcgattttgcacggtgcagcctgggccgctgctcctgctgcctttcagtgcttgttccccttcacctttttgggggacctgttactccgactcttacttgtctgtcggccttgcagggatgctcccatttcccagtagcctccaggcctgcaggttcccatgacccacagccgggccaccgaggacgggttttgggtcc

SEQ ID NO: 31669 - DNA, 309 bp, Homo sapiens
ggcattcggtctcccatccctcttgttctgggcaccaagcgtaagctgccgtcacctcttcaccagccctaaatatgggtgcccctctcccacagaacctgtctccagagaagattttccacgtcattgtggccccttgttatgacaagaagctggaggctcttcaggaaagccttccccctgctttgcatggctcccggggcgctgactgcgtgttaacatcaggtgaaattgctcaaataatggagcaagagcctctcagtagagggaggggctgccctgagtggagtattaaagacacttaagaaa

SEQ ID NO: 31670 - DNA, 2347 bp, Homo sapiens
tgatttcataaaacgtttatgagtccaacacttccattatagccctgtatcaatgttttgcttagctgaaatcaatttcttggaggagtaagtgttatctttactttgtgagctgtaagggcccaaatcaatgtacttggtaaaactatccatagtgaacacacgcaaatgtcaaacggccatcatttagcatctgccctcgggcttccgggtccatcacgtggttactgacaggcaggccgcgcatgcgcgctgctactccgctgagcctacgtgacacgacgtgaagtggcaatggcggcggacgagggctgtgcccccggcccgccccgttaggagccgcgagtaaggcgagtgtccaacgccgagctggctgacagagcccggccgcggcctccgcgggcccaggggcctccaggccccgtgaccaccggaccgagcaccctggaacggccccagcttggcctcgggacagtccgcgcgctcaccgactccctggtgaacgccgcttggccgccgccgccgccgcaggacccacgagaagcggaaaccggcgcaaggacccggtccccccggcgccgtacgtgaagtgaggctgcgctccgccccgcgcgctccgattggctctggggcctggcccgccccttcccgacactgtcattggcctaggcaaagccgtaagggtggggaatcctattggcccaggggtgcggcttgtcctctcccggtgctctcattggccgagcgcggccgttgggggtgaggccgcgtcgggggaggacaacaaagggccgcgggcggcgggcagtggtgtcccagtctcccggtgcttccctgaggctgaggcgcccggcctcccgcccgccgcgctccagatgaagtgtgagcactgcacgcgcaaggaatgtagtaagaaaacaaaaactgatgaccaagagaatgtgtcagccgatgcaccgagtccagcccaggaaaatggagagaagggagaattccacaagttggctgatgccaagatatttttgagcgactgcctggcatgtgacagctgtatgactgcagaggaaggagtccaactttcccagcaaaatgccaaggacttcttccgcgttctgaaccttaacaagaaatgtgatacctcaaagcacaaagtgctggtagtgtctgtgtgtcctcaatctttgccttattttgctgctaaattcaacctcagtgtaactgatgcatccagaagactctgtggtttcctcaaaagtcttggggtgcactatgtatttgatacgacgatagctgcggattttagtatcctggagagtcaaaaagaattcgtgcgtcgctatcgccagcacagtgaggaggaacgcaccctgcccatgctgacctctgcctgtcctggctgggtccgatacgccgagcgggtgctgggtcgccccatcactgcccacctctgcaccgccaagtccccccagcaggtcatgggctctttggtgaaggattatttcgccagacagcagaacctgtctccagagaagattttccacgtcattgtggccccttgttatgacaagaagctggaggctcttcaggaaagccttccccctgctttgcatggctcccggggcgctgactgcgtgttaacatcaggtgaaattgctcaaataatggagcaaggtgacctctcagtgagagatgctgccgtcgacactctgtttggagacttgaaggaggacaaagtgacgcgtcatgatggagccagctcagacgggcacctggcacacatcttcagacatgcggccaaggagctgttcaacgaggatgtggaggaggtcacttaccgagccctgagaaacaaagacttccaagaggtcacccttgagaagaacggagaggtggtgttacgctttgctgcagcctatggctttcgaaacatccagaacatgatcctgaagcttaagaagggcaagttcccattccactttgtggaggtcctcgcctgtgctggaggatgcttaaatggcagaggccaagcccagactccagacggacatgcggataaggccctgctgcggcagatggaaggcatttacgctgacatccctgtgcggcgtccggagtccagtgcacacgtgcaggagctgtaccaggagtggctggaggggatcaactcccccaaggcccgagaggtgctgcataccacgtaccagagccaggagcgtggcacacacagcctggacatcaagtggtgaagtcaggccagggccttccagctgctcttggggccagagccaagagcctctcagtagagggaggggctgccctgagtggagtattaaagacacttaagaaa

SEQ ID NO: 31671 - DNA, 3380 bp, Homo sapiens
tgatttcataaaacgtttatgagtccaacacttccattatagccctgtatcaatgttttgcttagctgaaatcaatttcttggaggagtaagtgttatctttactttgtgagctgtaagggcccaaatcaatgtacttggtaaaactatccatagtgaacacacgcaaatgtcaaacggccatcatttagcatctgccctcgggcttccgggtccatcacgtggttactgacaggcaggccgcgcatgcgcgctgctactccgctgagcctacgtgacacgacgtgaagtggcaatggcggcggacgagggctgtgcccccggcccgccccgttaggagccgcgagtaaggcgagtgtccaacgccgagctggctgacagagcccggccgcggcctccgcgggcccaggggcctccaggccccgtgaccaccggaccgagcaccctggaacggccccagcttggcctcgggacagtccgcgcgctcaccgactccctggtgaacgccgcttggccgccgccgccgccgcaggacccacgagaagcggaaaccggcgcaaggacccggtccccccggcgccgtacgtgaagtgaggctgcgctccgccccgcgcgctccgattggctctggggcctggcccgccccttcccgacactgtcattggcctaggcaaagccgtaagggtggggaatcctattggcccaggggtgcggcttgtcctctcccggtgctctcattggccgagcgcggccgttgggggtgaggccgcgtcgggggaggacaacaaagggccgcgggcggcgggcagtggtgtcccagtctcccggtgcttccctgaggctgaggcgcccggcctcccgcccgccgcgctccagatgaagtgtgagcactgcacgcgcaaggaatgtagtaagaaaacaaaaactgatgaccaagagaatgtgtcagccgatgcaccgagtccagcccaggaaaatggagagaagggagaattccacaagttggctgatgccaagatatttttgagcgactgcctggcatgtgacagctgtatgactgcagaggaaggagtccaactttcccagcaaaatgccaaggacttcttccgcgttctgaaccttaacaagaaatgtgatacctcaaagcacaaagtgctggtagtgtctgtgtgtcctcaatctttgccttattttgctgctaaattcaacctcagtgtaactgatgcatccagaagactctgtggtttcctcaaaagtcttggggtgcactatgtatttgatacgacgatagctgcggattttagtatcctggagagtcaaaaagaattcgtgcgtcgctatcgccagcacagtgaggaggaacgcaccctgcccatgctgacctctgcctgtcctggctgggtccgatacgccgagcgggtgctgggtcgccccatcactgcccacctctgcaccgccaagtccccccagcaggtcatgggctctttggtgaaggattatttcgccagacagcagaacctgtctccagagaagattttccacgtcattgtggccccttgttatgacaagaagctggaggctcttcaggaaagccttccccctgctttgcatggctcccggggcgctgactgcgtgttaacatcaggtgaaattgctcaaataatggagcaaggtgacctctcagtgagagatgctgccgtcgacactctgtaagtggcttctctggggagagtcctctggggggcaggacctctcgtcagccctgccagccacctgccaggcccagggctgccctgctttatgacgaggccatgtgaagcactgcgatgcagtcccccaggcccctgccacaaccctcagccaccctatagctgttgaatgggataccattcaccagggctgccagggagttgaaggtttggcgggcttccatggtgtgattgccaccctaaacccttgaggaaggacaaaatgcacaaacagctttgtcctcgctggcgcagggctgttcatgtgtgcaccagcccccttcttcctgagtgccgtctgtgcctcacattccgtgtggtctatggggcagtggggcagctccctcaggcccctttgcaccaagagtggcagtctgggttctgctgggggcggtgacctcgatacccagcaaggcccagggctcctgctgcaccccaggcactgggcagagagcaccacaaaggcagcagcgtgtgtcctcgccaacagtccgcatcccaggtgctgcattcgtgcccttttgggggaaggtaagatagaagtttacagaatttaagcatctgtggggccaggcgtggtggctcacacctataatcacagtactttgggaggctgaggtaggaggatcacttgagtccaggaggctggggctgtagtgagctatgattgtgccactgcactccagcctgagagacagaacaagaccctgtctccaaaagaaaaagaccataagcatctggagcacctgcaagagcctgtgcatgggctcggcgtgactgagagtcctccgccttgcccgagcatcaggcaggccctcccaagacccctcaagatgctagaatgggactttctgcaaagtttaaacatctgtacaggatttagcttctttggtggcgaacttggattgtgatgccctcaggaagtctggtttcactctttctgtcactgtacgtcagcattcatgaaggacttgtattttctctgccttgtgaggtttggagacttgaaggaggacaaagtgacgcgtcatgatggagccagctcagacgggcacctggcacacatcttcagacatgcggccaaggagctgttcaacgaggatgtggaggaggtcacttaccgagccctgagaaacaaagacttccaagaggtcacccttgagaagaacggagaggtggtgttacgctttgctgcagcctatggctttcgaaacatccagaacatgatcctgaagcttaagaagggcaagttcccattccactttgtggaggtcctcgcctgtgctggaggatgcttaaatggcagaggccaagcccagactccagacggacatgcggataaggccctgctgcggcagatggaaggcatttacgctgacatccctgtgcggcgtccggagtccagtgcacacgtgcaggagctgtaccaggagtggctggaggggatcaactcccccaaggcccgagaggtgctgcataccacgtaccagagccaggagcgtggcacacacagcctggacatcaagtggtgaagtcaggccagggccttccagctgctcttggggccagagccaagagcctctcagtagagggaggggctgccctgagtggagtattaaagacacttaagaaa

SEQ ID NO: 31672 - DNA, 2485 bp, Homo sapiens
tgatttcataaaacgtttatgagtccaacacttccattatagccctgtatcaatgttttgcttagctgaaatcaatttcttggaggagtaagtgttatctttactttgtgagctgtaagggcccaaatcaatgtacttggtaaaactatccatagtgaacacacgcaaatgtcaaacggccatcatttagcatctgccctcgggcttccgggtccatcacgtggttactgacaggcaggccgcgcatgcgcgctgctactccgctgagcctacgtgacacgacgtgaagtggcaatggcggcggacgagggctgtgcccccggcccgccccgttaggagccgcgagtaaggcgagtgtccaacgccgagctggctgacagagcccggccgcggcctccgcgggcccaggggcctccaggccccgtgaccaccggaccgagcaccctggaacggccccagcttggcctcgggacagtccgcgcgctcaccgactccctggtgaacgccgcttggccgccgccgccgccgcaggacccacgagaagcggaaaccggcgcaaggacccggtccccccggcgccgtacgtgaagtgaggctgcgctccgccccgcgcgctccgattggctctggggcctggcccgccccttcccgacactgtcattggcctaggcaaagccgtaagggtggggaatcctattggcccaggggtgcggcttgtcctctcccggtgctctcattggccgagcgcggccgttgggggtgaggccgcgtcgggggaggacaacaaagggccgcgggcggcgggcagtggtgtcccagtctcccggtgcttccctgaggctgaggcgcccggcctcccgcccgccgcgctccagatgaagtgtgagcactgcacgcgcaaggaatgtagtaagaaaacaaaaactgatgaccaagagaatgtgtcagccgatgcaccgagtccagcccaggaaaatggagagaagggagaattccacaagttggctgatgccaagatatttttgagcgactgcctggcatgtgacagctgtatgactgcagaggaaggagtccaactttcccagcaaaatgccaaggacttcttccgcgttctgaaccttaacaagaaatgtgatacctcaaagcacaaagtgctggtagtgtctgtgtgtcctcaatctttgccttattttgctgctaaattcaacctcagtgtaactgatgcatccagaagactctgtggtttcctcaaaagtcttggggtgcactatgtatttgatacgacgatagctgcggattttagtatcctggagagtcaaaaagaattcgtgcgtcgctatcgccagcacagtgaggaggaacgcaccctgcccatgctgacctctgcctgtcctggctgggtccgatacgccgagcgggtgctgggtcgccccatcactgcccacctctgcaccgccaagtccccccagcaggtcatgggctctttggtgaaggattatttcgccagacagcagaacctgtctccagagaagattttccacgtcattgtggccccttgttatgacaagaagctggaggctcttcaggaaagccttccccctgctttgcatggctcccggggcgctgactgcgtgttaacatcagaaattagccaggcgtggtggtgcacacctgtgatcacagctactcgggaggctgcggcaagagaatcacttgaacccgggaggcagaggttacagcgagacaagattgcaccactggactccagcctgggcggcggaggtgaaattgctcaaataatggagcaaggtgacctctcagtgagagatgctgccgtcgacactctgtttggagacttgaaggaggacaaagtgacgcgtcatgatggagccagctcagacgggcacctggcacacatcttcagacatgcggccaaggagctgttcaacgaggatgtggaggaggtcacttaccgagccctgagaaacaaagacttccaagaggtcacccttgagaagaacggagaggtggtgttacgctttgctgcagcctatggctttcgaaacatccagaacatgatcctgaagcttaagaagggcaagttcccattccactttgtggaggtcctcgcctgtgctggaggatgcttaaatggcagaggccaagcccagactccagacggacatgcggataaggccctgctgcggcagatggaaggcatttacgctgacatccctgtgcggcgtccggagtccagtgcacacgtgcaggagctgtaccaggagtggctggaggggatcaactcccccaaggcccgagaggtgctgcataccacgtaccagagccaggagcgtggcacacacagcctggacatcaagtggtgaagtcaggccagggccttccagctgctcttggggccagagccaagagcctctcagtagagggaggggctgccctgagtggagtattaaagacacttaagaaa

SEQ ID NO: 31673 - DNA, 2268 bp, Homo sapiens
tgatttcataaaacgtttatgagtccaacacttccattatagccctgtatcaatgttttgcttagctgaaatcaatttcttggaggagtaagtgttatctttactttgtgagctgtaagggcccaaatcaatgtacttggtaaaactatccatagtgaacacacgcaaatgtcaaacggccatcatttagcatctgccctcgggcttccgggtccatcacgtggttactgacaggcaggccgcgcatgcgcgctgctactccgctgagcctacgtgacacgacgtgaagtggcaatggcggcggacgagggctgtgcccccggcccgccccgttaggagccgcgagtaaggcgagtgtccaacgccgagctggctgacagagcccggccgcggcctccgcgggcccaggggcctccaggccccgtgaccaccggaccgagcaccctggaacggccccagcttggcctcgggacagtccgcgcgctcaccgactccctggtgaacgccgcttggccgccgccgccgccgcaggacccacgagaagcggaaaccggcgcaaggacccggtccccccggcgccgtacgtgaagtgaggctgcgctccgccccgcgcgctccgattggctctggggcctggcccgccccttcccgacactgtcattggcctaggcaaagccgtaagggtggggaatcctattggcccaggggtgcggcttgtcctctcccggtgctctcattggccgagcgcggccgttgggggtgaggccgcgtcgggggaggacaacaaagggccgcgggcggcgggcagtggtgtcccagtctcccggtgcttccctgaggctgaggcgcccggcctcccgcccgccgcgctccagatgaagtgtgagcactgcacgcgcaaggaatgtagtaagaaaacaaaaactgatgaccaagagaatgtgtcagccgatgcaccgagtccagcccaggaaaatggagagaagggagaattccacaagttggctgatgccaagatatttttgagcgactgcctggcatgtgacagctgtatgactgcagaggaaggagtccaactttcccagcaaaatgccaaggacttcttccgcgttctgaaccttaacaagaaatgtgatacctcaaagcacaaagtgctggtagtgtctgtgtgtcctcaatctttgccttattttgctgctaaattcaacctcagtgtaactgatgcatccagaagactctgtggtttcctcaaaagtcttggggtgcactatgtatttgatacgacgatagctgcggattttagtatcctggagagtcaaaaagaattcgtgcgtcgctatcgccagcacagtgaggaggaacgcaccctgcccatgctgacctctgcctgtcctggctgggtccgatacgccgagcgggtgctgggtcgccccatcactgcccacctctgcaccgccaagtccccccagcaggtcatgggctctttggtgaaggattatttcgccagacagcagaacctgtctccagagaagattttccacgtcattgtggccccttgttatgacaagaagctggaggctcttcaggaaagccttccccctgctttgcatggctcccggggcgctgactgcgtgttaacatcaggtgaaattgctcaaataatggagcaaggtgacctctcagtgagagatgctgccgtcgacactctaaacaaagacttccaagaggtcacccttgagaagaacggagaggtggtgttacgctttgctgcagcctatggctttcgaaacatccagaacatgatcctgaagcttaagaagggcaagttcccattccactttgtggaggtcctcgcctgtgctggaggatgcttaaatggcagaggccaagcccagactccagacggacatgcggataaggccctgctgcggcagatggaaggcatttacgctgacatccctgtgcggcgtccggagtccagtgcacacgtgcaggagctgtaccaggagtggctggaggggatcaactcccccaaggcccgagaggtgctgcataccacgtaccagagccaggagcgtggcacacacagcctggacatcaagtggtgaagtcaggccagggccttccagctgctcttggggccagagccaagagcctctcagtagagggaggggctgccctgagtggagtattaaagacacttaagaaaaccgctcaatggattactttggtttctccgagttccctgctaccccgtttattggaggc

SEQ ID NO: 31674 - DNA, 3098 bp, Homo sapiens
tgatttcataaaacgtttatgagtccaacacttccattatagccctgtatcaatgttttgcttagctgaaatcaatttcttggaggagtaagtgttatctttactttgtgagctgtaagggcccaaatcaatgtacttggtaaaactatccatagtgaacacacgcaaatgtcaaacggccatcatttagcatctgccctcgggcttccgggtccatcacgtggttactgacaggcaggccgcgcatgcgcgctgctactccgctgagcctacgtgacacgacgtgaagtggcaatggcggcggacgagggctgtgcccccggcccgccccgttaggagccgcgagtaaggcgagtgtccaacgccgagctggctgacagagcccggccgcggcctccgcgggcccaggggcctccaggccccgtgaccaccggaccgagcaccctggaacggccccagcttggcctcgggacagtccgcgcgctcaccgactccctggtgaacgccgcttggccgccgccgccgccgcaggacccacgagaagcggaaaccggcgcaaggacccggtccccccggcgccgtacgtgaagtgaggctgcgctccgccccgcgcgctccgattggctctggggcctggcccgccccttcccgacactgtcattggcctaggcaaagccgtaagggtggggaatcctattggcccaggggtgcggcttgtcctctcccggtgctctcattggccgagcgcggccgttgggggtgaggccgcgtcgggggaggacaacaaagggccgcgggcggcgggcagtggtgtcccagtctcccggtgcttccctgaggctgaggcgcccggcctcccgcccgccgcgctccagatgaagtgtgagcactgcacgcgcaaggaatgtagtaagaaaacaaaaactgatgaccaagagaatgtgtcagccgatgcaccgagtccagcccaggaaaatggagagaagggagaattccacaagttggctgatgccaagatatttttgagcgactgcctggcatgtgacagctgtatgactgcagaggaaggagtccaactttcccagcaaaatgccaaggacttcttccgcgttctgaaccttaacaagaaatgtgatacctcaaagcacaaagtgctggtagtgtctgtgtgtcctcaatctttgccttattttgctgctaaattcaacctcagtgtaactgatgcatccagaagactctgtggtttcctcaaaagtcttggggtgcactatgtatttgatacgacgatagctgcggattttagtatcctggagagtcaaaaagaattcgtgcgtcgctatcgccagcacagtgaggaggaacgcaccctgcccatgctgacctctgcctgtcctggctgggtccgatacgccgagcgggtgctgggtcgccccatcactgcccacctctgcaccgccaagtccccccagcaggtcatgggctctttggtgaaggattatttcgccagacagcagaacctgtctccagagaagattttccacgtcattgtggccccttgttatgacaagaagctggaggctcttcaggaaagccttccccctgctttgcatggctcccggggcgctgactgcgtgttaacatcaggtgaaattgctcaaataatggagcaaggtgacctctcagtgagagatgctgccgtcgacactctgtaagtggcttctctggggagagtcctctggggggcaggacctctcgtcagccctgccagccacctgccaggcccagggctgccctgctttatgacgaggccatgtgaagcactgcgatgcagtcccccaggcccctgccacaaccctcagccaccctatagctgttgaatgggataccattcaccagggctgccagggagttgaaggtttggcgggcttccatggtgtgattgccaccctaaacccttgaggaaggacaaaatgcacaaacagctttgtcctcgctggcgcagggctgttcatgtgtgcaccagcccccttcttcctgagtgccgtctgtgcctcacattccgtgtggtctatggggcagtggggcagctccctcaggcccctttgcaccaagagtggcagtctgggttctgctgggggcggtgacctcgatacccagcaaggcccagggctcctgctgcaccccaggcactgggcagagagcaccacaaaggcagcagcgtgtgtcctcgccaacagtccgcatcccaggtgctgcattcgtgcccttttgggggaaggtaagatagaagtttacagaatttaagcatctgtggggccaggcgtggtggctcacacctataatcacagtactttgggaggctgaggtaggaggatcacttgagtccaggaggctggggctgtagtgagctatgattgtgccactgcactccagcctgagagacagaacaagaccctgtctccaaaagaaaaagaccataagcatctggagcacctgcaagagcctgtgcatgggctcggcgtgactgagagtcctccgccttgcccgagcatcaggcaggccctcccaagacccctcaagatgctagaatgggactttctgcaaagtttaaacatctgtacaggatttagcttctttggtggcgaacttggattgtgatgccctcaggaagtctggtttcactctttctgtcactgtacgtcagcattcatgaaggacttgtattttctctgccttgtgaggtttggagacttgaaggaggacaaagtgacgcgtcatgatggagccagctcagacgggcacctggcacacatcttcagacatgcggccaaggagctgttcaacgaggatgtggaggaggtcacttaccgagccctgagaaacaaagacttccaagaggtcacccttgagaaagtacggttgcacgtgcaaccgtactttctccgggagggccatgggtcttctagtttggacagagaattagaaagagagaaagaacgcctgcgactagagcgtgaagccaaagaaagggagaaagaacggcgaagatcccgaagtattgaccgggggttagaacgcaggcgtagcagaagtaggga

SEQ ID NO: 31675 - DNA, 2539 bp, Homo sapiens
tgatttcataaaacgtttatgagtccaacacttccattatagccctgtatcaatgttttgcttagctgaaatcaatttcttggaggagtaagtgttatctttactttgtgagctgtaagggcccaaatcaatgtacttggtaaaactatccatagtgaacacacgcaaatgtcaaacggccatcatttagcatctgccctcgggcttccgggtccatcacgtggttactgacaggcaggccgcgcatgcgcgctgctactccgctgagcctacgtgacacgacgtgaagtggcaatggcggcggacgagggctgtgcccccggcccgccccgttaggagccgcgagtaaggcgagtgtccaacgccgagctggctgacagagcccggccgcggcctccgcgggcccaggggcctccaggccccgtgaccaccggaccgagcaccctggaacggccccagcttggcctcgggacagtccgcgcgctcaccgactccctggtgaacgccgcttggccgccgccgccgccgcaggacccacgagaagcggaaaccggcgcaaggacccggtccccccggcgccgtacgtgaagtgaggctgcgctccgccccgcgcgctccgattggctctggggcctggcccgccccttcccgacactgtcattggcctaggcaaagccgtaagggtggggaatcctattggcccaggggtgcggcttgtcctctcccggtgctctcattggccgagcgcggccgttgggggtgaggccgcgtcgggggaggacaacaaagggccgcgggcggcgggcagtggtgtcccagtctcccggtgcttccctgaggctgaggcgcccggcctcccgcccgccgcgctccagatgaagtgtgagcactgcacgcgcaaggaatgtagtaagaaaacaaaaactgatgaccaagagaatgtgtcagccgatgcaccgagtccagcccaggaaaatggagagaagggagaattccacaagttggctgatgccaagatatttttgagcgactgcctggcatgtgacagctgtatgactgcagaggaaggagtccaactttcccagcaaaatgccaaggacttcttccgcgttctgaaccttaacaagaaatgtgatacctcaaagcacaaagtgctggtagtgtctgtgtgtcctcaatctttgccttattttgctgctaaattcaacctcagtgtaactgatgcatccagaagactctgtggtttcctcaaaagtcttggggtgcactatgtatttgatacgacgatagctgcggattttagtatcctggagagtcaaaaagaattcgtgcgtcgctatcgccagcacagtgaggaggaacgcaccctgcccatgctgacctctgcctgtcctggctgggtccgatacgccgagcgggtgctgggtcgccccatcactgcccacctctgcaccgccaagtccccccagcaggtcatgggctctttggtgaaggattatttcgccagacagcagaacctgtctccagagaagattttccacgtcattgtggccccttgttatgacaagaagctggaggctcttcaggaaagccttccccctgctttgcatggctcccggggcgctgactgcgtgttaacatcaggtgaaattgctcaaataatggagcaaggtgacctctcagtgagagatgctgccgtcgacactctgtaagtggcttctctggggagagtcctctggggggcaggacctctcgtcagccctgccagccacctgccaggcccagggctgccctgctttatgacgaggccatgtgaagcactgcgatgcagtcccccaggcccctgccacaaccctcagccaccctatagctgttgaatgggataccattcaccagggctgccagggagttgaaggtttggcgggcttccatggtgtgattgccaccctaaacccttgaggaaggacaaaatgcacaaacagctttgtcctcgctggcgcagggctgttcatgtgtgcaccagcccccttcttcctgagtgccgtctgtgcctcacattccgtgtggtctatggggcagtggggcagctccctcaggcccctttgcaccaagagtggcagtctgggttctgctgggggcggtgacctcgatacccagcaaggcccagggctcctgctgcaccccaggcactgggcagagagcaccacaaaggcagcagcgtgtgtcctcgccaacagtccgcatcccaggtgctgcattcgtgcccttttgggggaaggtaagatagaagtttacagaatttaagcatctgtggggccaggcgtggtggctcacacctataatcacagtactttgggaggctgaggtaggaggatcacttgagtccaggaggctggggctgtagtgagctatgattgtgccactgcactccagcctgagagacagaacaagaccctgtctccaaaagaaaaagaccataagcatctggagcacctgcaagagcctggagattgagctgcagtcccatgctcagcattga

SEQ ID NO: 31676 - DNA, 2029 bp, Homo sapiens
tgatttcataaaacgtttatgagtccaacacttccattatagccctgtatcaatgttttgcttagctgaaatcaatttcttggaggagtaagtgttatctttactttgtgagctgtaagggcccaaatcaatgtacttggtaaaactatccatagtgaacacacgcaaatgtcaaacggccatcatttagcatctgccctcgggcttccgggtccatcacgtggttactgacaggcaggccgcgcatgcgcgctgctactccgctgagcctacgtgacacgacgtgaagtggcaatggcggcggacgagggctgtgcccccggcccgccccgttaggagccgcgagtaaggcgagtgtccaacgccgagctggctgacagagcccggccgcggcctccgcgggcccaggggcctccaggccccgtgaccaccggaccgagcaccctggaacggccccagcttggcctcgggacagtccgcgcgctcaccgactccctggtgaacgccgcttggccgccgccgccgccgcaggacccacgagaagcggaaaccggcgcaaggacccggtccccccggcgccgtacgaatgtagtaagaaaacaaaaactgatgaccaagagaatgtgtcagccgatgcaccgagtccagcccaggaaaatggagagaagggagaattccacaagttggctgatgccaagatatttttgagcgactgcctggcatgtgacagctgtatgactgcagaggaaggagtccaactttcccagcaaaatgccaaggacttcttccgcgttctgaaccttaacaagaaatgtgatacctcaaagcacaaagtgctggtagtgtctgtgtgtcctcaatctttgccttattttgctgctaaattcaacctcagtgtaactgatgcatccagaagactctgtggtttcctcaaaagtcttggggtgcactatgtatttgatacgacgatagctgcggattttagtatcctggagagtcaaaaagaattcgtgcgtcgctatcgccagcacagtgaggaggaacgcaccctgcccatgctgacctctgcctgtcctggctgggtccgatacgccgagcgggtgctgggtcgccccatcactgcccacctctgcaccgccaagtccccccagcaggtcatgggctctttggtgaaggattatttcgccagacagcagaacctgtctccagagaagattttccacgtcattgtggccccttgttatgacaagaagctggaggctcttcaggaaagccttccccctgctttgcatggctcccggggcgctgactgcgtgttaacatcaggtgaaattgctcaaataatggagcaaggtgacctctcagtgagagatgctgccgtcgacactctgtttggagacttgaaggaggacaaagtgacgcgtcatgatggagccagctcagacgggcacctggcacacatcttcagacatgcggccaaggagctgttcaacgaggatgtggaggaggtcacttaccgagccctgagaaacaaagacttccaagaggtcacccttgagaagaacggagaggtggtgttacgctttgctgcagcctatggctttcgaaacatccagaacatgatcctgaagcttaagaagggcaagttcccattccactttgtggaggtcctcgcctgtgctggaggatgcttaaatggcagaggccaagcccagactccagacggacatgcggataaggccctgctgcggcagatggaaggcatttacgctgacatccctgtgcggcgtccggagtccagtgcacacgtgcaggagctgtaccaggagtggctggaggggatcaactcccccaaggcccgagaggtgctgcataccacgtaccagagccaggagcgtggcacacacagcctggacatcaagtggtgaagtcaggccagggccttccagctgctcttggggccagagccaagagcctctcagtagagggaggggctgccctgagtggagtattaaagacacttaagaaa

SEQ ID NO: 31677 - DNA, 1566 bp, Homo sapiens
  misc_feature (53)..(53): n is a, c, g, or t
atgtaagtagaaaatgcttgtctatgcgttcgtttgctccttgcctgttgtcntggattgttgatgggatggctggatcttgggcagccatattgaatcatgaggtggaacccatactgaggaaggtggaaggtaaagctgtccatctgacccatcttaagatgggtcagatggacagggtgcgttccaggaaaatggagagaagggagaattccacaagttggctgatgccaagatatttttgagcgactgcctggcatgtgacagctgtatgactgcagaggaaggagtccaactttcccagcaaaatgccaaggacttcttccgcgttctgaaccttaacaagaaatgtgatacctcaaagcacaaagtgctggtagtgtctgtgtgtcctcaatctttgccttattttgctgctaaattcaacctcagtgtaactgatgcatccagaagactctgtggtttcctcaaaagtcttggggtgcactatgtatttgatacgacgatagctgcggattttagtatcctggagagtcaaaaagaattcgtgcgtcgctatcgccagcacagtgaggaggaacgcaccctgcccatgctgacctctgcctgtcctggctgggtccgatacgccgagcgggtgctgggtcgccccatcactgcccacctctgcaccgccaagtccccccagcaggtcatgggctctttggtgaaggattatttcgccagacagcagaacctgtctccagagaagattttccacgtcattgtggccccttgttatgacaagaagctggaggctcttcaggaaagccttccccctgctttgcatggctcccggggcgctgactgcgtgttaacatcaggtgaaattgctcaaataatggagcaaggtgacctctcagtgagagatgctgccgtcgacactctgtttggagacttgaaggaggacaaagtgacgcgtcatgatggagccagctcagacgggcacctggcacacatcttcagacatgcggccaaggagctgttcaacgaggatgtggaggaggtcacttaccgagccctgagaaacaaagacttccaagaggtcacccttgagaagaacggagaggtggtgttacgctttgctgcagcctatggctttcgaaacatccagaacatgatcctgaagcttaagaagggcaagttcccattccactttgtggaggtcctcgcctgtgctggaggatgcttaaatggcagaggccaagcccagactccagacggacatgcggataaggccctgctgcggcagatggaaggcatttacgctgacatccctgtgcggcgtccggagtccagtgcacacgtgcaggagctgtaccaggagtggctggaggggatcaactcccccaaggcccgagaggtgctgcataccacgtaccagagccaggagcgtggcacacacagcctggacatcaagtggtgaagtcaggccagggccttccagctgctcttggggccagagccaagagcctctcagtagagggaggggctgccctgagtggagtattaaagacacttaagaaa

SEQ ID NO: 31678 - DNA, 1885 bp, Homo sapiens
tgatttcataaaacgtttatgagtccaacacttccattatagccctgtatcaatgttttgcttagctgaaatcaatttcttggaggagtaagtgttatctttactttgtgagctgtaagggcccaaatcaatgtacttggtaaaactatccatagtgaacacacgcaaatgtcaaacggccatcatttagcatctgccctcgggcttccgggtccatcacgtggttactgacaggcaggccgcgcatgcgcgctgctactccgctgagcctacgtgacacgacgtgaagtggcaatggcggcggacgagggctgtgcccccggcccgccccgttaggagccgcgagtaaggcgagtgtccaacgccgagctggctgacagagcccggccgcggcctccgcgggcccaggggcctccaggccccgtgaccaccggaccgagcaccctggaacggccccagcttggcctcgggacagtccgcgcgctcaccgactccctggtgaacgccgcttggccgccgccgccgccgcaggacccacgagaagcggaaaccggcgcaaggacccggtccccccggcgccgtacgaatgtagtaagaaaacaaaaactgatgaccaagagaatgtgtcagccgatgcaccgagtccagcccaggaaaatggagagaaatgtgatacctcaaagcacaaagtgctggtagtgtctgtgtgtcctcaatctttgccttattttgctgctaaattcaacctcagtgtaactgatgcatccagaagactctgtggtttcctcaaaagtcttggggtgcactatgtatttgatacgacgatagctgcggattttagtatcctggagagtcaaaaagaattcgtgcgtcgctatcgccagcacagtgaggaggaacgcaccctgcccatgctgacctctgcctgtcctggctgggtccgatacgccgagcgggtgctgggtcgccccatcactgcccacctctgcaccgccaagtccccccagcaggtcatgggctctttggtgaaggattatttcgccagacagcagaacctgtctccagagaagattttccacgtcattgtggccccttgttatgacaagaagctggaggctcttcaggaaagccttccccctgctttgcatggctcccggggcgctgactgcgtgttaacatcaggtgaaattgctcaaataatggagcaaggtgacctctcagtgagagatgctgccgtcgacactctgtttggagacttgaaggaggacaaagtgacgcgtcatgatggagccagctcagacgggcacctggcacacatcttcagacatgcggccaaggagctgttcaacgaggatgtggaggaggtcacttaccgagccctgagaaacaaagacttccaagaggtcacccttgagaagaacggagaggtggtgttacgctttgctgcagcctatggctttcgaaacatccagaacatgatcctgaagcttaagaagggcaagttcccattccactttgtggaggtcctcgcctgtgctggaggatgcttaaatggcagaggccaagcccagactccagacggacatgcggataaggccctgctgcggcagatggaaggcatttacgctgacatccctgtgcggcgtccggagtccagtgcacacgtgcaggagctgtaccaggagtggctggaggggatcaactcccccaaggcccgagaggtgctgcataccacgtaccagagccaggagcgtggcacacacagcctggacatcaagtggtgaagtcaggccagggccttccagctgctcttggggccagagccaagagcctctcagtagagggaggggctgccctgagtggagtattaaagacacttaagaaa

SEQ ID NO: 31679 - DNA, 1885 bp, Homo sapiens
tgatttcataaaacgtttatgagtccaacacttccattatagccctgtatcaatgttttgcttagctgaaatcaatttcttggaggagtaagtgttatctttactttgtgagctgtaagggcccaaatcaatgtacttggtaaaactatccatagtgaacacacgcaaatgtcaaacggccatcatttagcatctgccctcgggcttccgggtccatcacgtggttactgacaggcaggccgcgcatgcgcgctgctactccgctgagcctacgtgacacgacgtgaagtggcaatggcggcggacgagggctgtgcccccggcccgccccgttaggagccgcgagtaaggcgagtgtccaacgccgagctggctgacagagcccggccgcggcctccgcgggcccaggggcctccaggccccgtgaccaccggaccgagcaccctggaacggccccagcttggcctcgggacagtccgcgcgctcaccgactccctggtgaacgccgcttggccgccgccgccgccgcaggacccacgagaagcggaaaccggcgcaaggacccggtccccccggcgccgtacgtgaagtgaggctgcgctccgccccgcgcgctccgattggctctggggcctggcccgccccttcccgacactgtcattggcctaggcaaagccgtaagggtggggaatcctattggcccaggggtgcggcttgtcctctcccggtgctctcattggccgagcgcggccgttgggggtgaggccgcgtcgggggaggacaacaaagggccgcgggcggcgggcagtggtgtcccagtctcccggtgcttccctgaggctgaggcgcccggcctcccgcccgccgcgctccagatgaagtgtgagcactgcacgcgcaaggaatgtagtaagaaaacaaaaactgatgaccaagagaatgtgtcagccgatgcaccgagtccagcccaggaaaatggagagaagggagaattccacaagttggctgatgccaagatatttttgagcgactgcctggcatgtgacagctgtatgactgcagaggaaggagtccaactttcccagcaaaatgccaaggacttcttccgcgttctgaaccttaacaagaaatgtgatacctcaaagcacaaagtgctggtagtgtctgtgtgtcctcaatctttgccttattttgctgctaaattcaacctcagtgtaactgatgcatccagaagactctgtggtttcctcaaaagtcttggggtgcactatgtatttgatacgacgatagctgcggattttagtatcctggagagtcaaaaagaattcgtgcgtcgctatcgccagcacagtgaggaggaacgcaccctgcccatgctgacctctgcctgtcctggctgggtccgatacgccgagcgggtgctgggtcgccccatcactgcccacctctgcaccgccaagtccccccagcaggtcatgggctctttggtgaaggattatttcgccagacagcagaacctgtctccagagaagattttccacgtcattgtggccccttgttatgacaagaagctggaggctcttcaggaaagccttccccctgtgcggcagatggaaggcatttacgctgacatccctgtgcggcgtccggagtccagtgcacacgtgcaggagctgtaccaggagtggctggaggggatcaactcccccaaggcccgagaggtgctgcataccacgtaccagagccaggagcgtggcacacacagcctggacatcaagtggtgaagtcaggccagggccttccagctgctcttggggccagagccaagagcctctcagtagagggaggggctgccctgagtggagtattaaagacacttaagaaa

SEQ ID NO: 31680 - DNA, 2020 bp, Homo sapiens
ggcattcggtctcccatccctcttgttctgggcaccaagcgtaagctgccgtcacctcttcaccagccctaaatatgggtgcccctctcccacagaacctgtctccagagaagattttccacgtcattgtggccccttgttatgacaagaagctggaggctcttcaggaaagccttccccctgctttgcatggctcccggggcgctgactgcgtgttaacatcaggtgaaattgctcaaataatggagcaaggtgacctctcagtgagagatgctgccgtcgacactctgtaagtggcttctctggggagagtcctctggggggcaggacctctcgtcagccctgccagccacctgccaggcccagggctgccctgctttatgacgaggccatgtgaagcactgcgatgcagtcccccaggcccctgccacaaccctcagccaccctatagctgttgaatgggataccattcaccagggctgccagggagttgaaggtttggcgggcttccatggtgtgattgccaccctaaacccttgaggaaggacaaaatgcacaaacagctttgtcctcgctggcgcagggctgttcatgtgtgcaccagcccccttcttcctgagtgccgtctgtgcctcacattccgtgtggtctatggggcagtggggcagctccctcaggcccctttgcaccaagagtggcagtctgggttctgctgggggcggtgacctcgatacccagcaaggcccagggctcctgctgcaccccaggcactgggcagagagcaccacaaaggcagcagcgtgtgtcctcgccaacagtccgcatcccaggtgctgcattcgtgcccttttgggggaaggtaagatagaagtttacagaatttaagcatctgtggggccaggcgtggtggctcacacctataatcacagtactttgggaggctgaggtaggaggatcacttgagtccaggaggctggggctgtagtgagctatgattgtgccactgcactccagcctgagagacagaacaagaccctgtctccaaaagaaaaagaccataagcatctggagcacctgcaagagcctgtgcatgggctcggcgtgactgagagtcctccgccttgcccgagcatcaggcaggccctcccaagacccctcaagatgctagaatgggactttctgcaaagtttaaacatctgtacaggatttagcttctttggtggcgaacttggattgtgatgccctcaggaagtctggtttcactctttctgtcactgtacgtcagcattcatgaaggacttgtattttctctgccttgtgaggtttggagacttgaaggaggacaaagtgacgcgtcatgatggagccagctcagacgggcacctggcacacatcttcagacatgcggccaaggagctgttcaacgaggatgtggaggaggtcacttaccgagccctgagaaacaaagacttccaagaggtcacccttgagaagaacggagaggtggtgttacgctttgctgcagcctatggctttcgaaacatccagaacatgatcctgaagcttaagaagggcaagttcccattccactttgtggaggtcctcgcctgtgctggaggatgcttaaatggcagaggccaagcccagactccagacggacatgcggataaggccctgctgcggcagatggaaggcatttacgctgacatccctgtgcggcgtccggagtccagtgcacacgtgcaggagctgtaccaggagtggctggaggggatcaactcccccaaggcccgagaggtgctgcataccacgtaccagagccaggagcgtggcacacacagcctggacatcaagtggtgaagtcaggccagggccttccagctgctcttggggccagagccaagagcctctcagtagagggaggggctgccctgagtggagtattaaagacacttaagaaaaccgctcaatggattactttggtttctccgagttccctgctaccccgtttattggaggc

SEQ ID NO: 31681 - DNA, 1657 bp, Homo sapiens
tgatttcataaaacgtttatgagtccaacacttccattatagccctgtatcaatgttttgcttagctgaaatcaatttcttggaggagtaagtgttatctttactttgtgagctgtaagggcccaaatcaatgtacttggtaaaactatccatagtgaacacacgcaaatgtcaaacggccatcatttagcatctgccctcgggcttccgggtccatcacgtggttactgacaggcaggccgcgcatgcgcgctgctactccgctgagcctacgtgacacgacgtgaagtggcaatggcggcggacgagggctgtgcccccggcccgccccgttaggagccgcgagtaaggcgagtgtccaacgccgagctggctgacagagcccggccgcggcctccgcgggcccaggggcctccaggccccgtgaccaccggaccgagcaccctggaacggccccagcttggcctcgggacagtccgcgcgctcaccgactccctggtgaacgccgcttggccgccgccgccgccgcaggacccacgagaagcggaaaccggcgcaaggacccggtccccccggcgccgtacgtgaagtgaggctgcgctccgccccgcgcgctccgattggctctggggcctggcccgccccttcccgacactgtcattggcctaggcaaagccgtaagggtggggaatcctattggcccaggggtgcggcttgtcctctcccggtgctctcattggccgagcgcggccgttgggggtgaggccgcgtcgggggaggacaacaaagggccgcgggcggcgggcagtggtgtcccagtctcccggtgcttccctgaggctgaggcgcccggcctcccgcccgccgcgctccagatgaagtgtgagcactgcacgcgcaaggaatgtagtaagaaaacaaaaactgatgaccaagagaatgtgtcagccgatgcaccgagtccagcccaggaaaatggagagaagggagaattccacaagttggctgatgccaagatatttttgagcgactgcctggcatgtgacagctgtatgactgcagaggaaggagtccaactttcccagcaaaatgccaaggacttcttccgcgttctgaaccttaacaagaaatgtgatacctcaaagcacaaagtgctggtagtgtctgtgtgtcctcaatctttgccttattttgctgctaaattcaacctcagtgtaactgatgcatccagaagactctgtggtttcctcaaaagtcttggggtgcactatgtatttgatacgacgatagctgcggattttagtatcctggagagatgcttaaatggcagaggccaagcccagactccagacggacatgcggataaggccctgctgcggcagatggaaggcatttacgctgacatccctgtgcggcgtccggagtccagtgcacacgtgcaggagctgtaccaggagtggctggaggggatcaactcccccaaggcccgagaggtgctgcataccacgtaccagagccaggagcgtggcacacacagcctggacatcaagtggtgaagtcaggccagggccttccagctgctcttggggccagagccaagagcctctcagtagagggaggggctgccctgagtggagtattaaagacacttaagaaa

SEQ ID NO: 31682 - DNA, 967 bp, Homo sapiens
  misc_feature (365)..(365): n is a, c, g, or t
  misc_feature (791)..(791): n is a, c, g, or t
  misc_feature (829)..(829): n is a, c, g, or t
tggaacataaactcaagatttaatggtcttcataataaaagatgacacttaaaacgggatcactgggccctttctcttcttatctcctcccagttcaaaaggctggcatctttaaatagccagcattctcttagatctgcagtggggctcaacgcactcaagccttagcacaatcttcttggtagtttatagccttttcccggaaaatcggcttagttggcccaccatagccactctgcttcctgtcataacgccgcttccccggggcgtacagagaatcctggcccttctggtacggtgtcactttatgggggtgggtgctggccacacttcttacagaaagtccggggggtttcagggacgtnaaaccatgctggcgtgagcggggcggcgggcagtggtgtcccagtctcccggtgcttccctgaggctgaggcgcccggcctcccgcccgccgcgctccagatgaagtgtgagcactgcacgcgcaaggaatgtagtaagaaaacaaaaactgatgaccaagagaatgtgtcagccgatgcaccgagtccagcccaggaaaatggagagaagggagaattccacaagttggctgatgccaagatatttttgagcgactgcctggcatgtgacagctgtatgactgcagaggaaggagtccaactttcccagcaaaatgccaaggacttcttccgcgttctgaaccttaacaagaaaaaaaaaaaaaaaaaaaaaaaaaaacgttgtgtgggggggcttgggcccttggaaaaggtttttgaagaccntttggtgtggggcgggggggccccaatgttggtgttangtggaaccgggggccaaagaggtggttccctagagggaacaccggggacaagagacactagggctggtggatttctccacaatattaaaaaaagcccgggggggacacggatccgtttcggaacaaattcccaaatgg

SEQ ID NO: 31683 - DNA, 204 bp, Homo sapiens
agctgctcagtggcagagactgtcctgcttccagccccttgagcaccaggcctggaccctggtattatctccaatgtttactgtgaattctgtatatgggtgttacctctctaaagaagcacattaaagagtatttgttgaataatcatgctgaaacgtcatctttcatagaagggagaattccacaagttggctgatgccaag

SEQ ID NO: 31684 - DNA, 188 bp, Homo sapiens
aaaaataaataaataaactaaaagaaaggatagaaatacatgagcttcattggtcagaatgtgcacattttcttaagggagacgaagtaaaagttcattgataatgttcctttgcttttttaaggaatgtagtaagaaaacaaaaactgatgaccaagagaatgtgtcagccgatgcaccgagtccag

SEQ ID NO: 31685 - DNA, 664 bp, Homo sapiens
  misc_feature (25)..(25): n is a, c, g, or t
aaactatagtgctaggtacgaggcntgggtggtgttacgctttgctgcagcctatggctttcgaaacatccagaacatgatcctgaagcttaagaagggcaagttcccattccactttgtggaggtcctcgcctgtgctggaggatgcttaaatggcagaggccaagcccagactccagacggacatgcggataaggccctgctgcggcagatggaaggcatttacgctgacatccctgtgcggcgtccggagtccagtgcacacgtgcaggagctgtaccaggagtggctggaggggatcaactcccccaaggcccgagaggtgctgcataccacgtaccagagccaggagcgtggcacacacagcctggacatcaagtggtgaagtcaggccagggccttccagctgctcttggggccagagccaagagcctctcagtagagggaggggctgccctgagtggagtattaaagacacttaagaaacaacaacaaaaaaaaaaaaccccgacgccacctaatccggggccgcggcgcaagggggtactgtgactggcgcccagggccttagctgttcccttgccccagcttccttggtcccacgtgggagatctcgcgggtcccctatagcgagccggataactccggaaaccgggtacctgca

SEQ ID NO: 31686 - DNA, 2406 bp, Homo sapiens
tgatttcataaaacgtttatgagtccaacacttccattatagccctgtatcaatgttttgcttagctgaaatcaatttcttggaggagtaagtgttatctttactttgtgagctgtaagggcccaaatcaatgtacttggtaaaactatccatagtgaacacacgcaaatgtcaaacggccatcatttagcatctgccctcgggcttccgggtccatcacgtggttactgacaggcaggccgcgcatgcgcgctgctactccgctgagcctacgtgacacgacgtgaagtggcaatggcggcggacgagggctgtgcccccggcccgccccgttaggagccgcgagtaaggcgagtgtccaacgccgagctggctgacagagcccggccgcggcctccgcgggcccaggggcctccaggccccgtgaccaccggaccgagcaccctggaacggccccagcttggcctcgggacagtccgcgcgctcaccgactccctggtgaacgccgcttggccgccgccgccgccgcaggacccacgagaagcggaaaccggcgcaaggacccggtccccccggcgccgtacgtgaagtgaggctgcgctccgccccgcgcgctccgattggctctggggcctggcccgccccttcccgacactgtcattggcctaggcaaagccgtaagggtggggaatcctattggcccaggggtgcggcttgtcctctcccggtgctctcattggccgagcgcggccgttgggggtgaggccgcgtcgggggaggacaacaaagggccgcgggcggcgggcagtggtgtcccagtctcccggtgcttccctgaggctgaggcgcccggcctcccgcccgccgcgctccagatgaagtgtgagcactgcacgcgcaaggaatgtagtaagaaaacaaaaactgatgaccaagagaatgtgtcagccgatgcaccgagtccagcccaggaaaatggagagaagggagaattccacaagttggctgatgccaagatatttttgagcgactgcctggcatgtgacagctgtatgactgcagaggaaggagtccaactttcccagcaaaatgccaaggacttcttccgcgttctgaaccttaacaagaaatgtgatacctcaaagcacaaagtgctggtagtgtctgtgtgtcctcaatctttgccttattttgctgctaaattcaacctcagtgtaactgatgcatccagaagactctgtggtttcctcaaaagtcttggggtgcactatgtatttgatacgacgatagctgcggattttagtatcctggagagtcaaaaagaattcgtgcgtcgctatcgccagcacagtgaggaggaacgcaccctgcccatgctgacctctgcctgtcctggctgggtccgatacgccgagcgggtgctgggtcgccccatcactgcccacctctgcaccgccaagtccccccagcaggtcatgggctctttggtgaaggattatttcgccagacagcagaacctgtctccagagaagattttccacgtcattgtggccccttgttatgacaagaagctggaggctcttcaggaaagccttccccctgctttgcatggctcccggggcgctgactgcgtgttaacatcaggtgaaattgctcaaataatggagcaaggtgacctctcagtgagagatgctgccgtcgacactctgtttggagacttgaaggaggacaaagtgacgcgtcatgatggagccagctcagacgggcacctggcacacatcttcagacatgcggccaaggagctgttcaacgaggatgtggaggaggtcacttaccgagccctgagaaacaaagacttccaagaggtcacccttgagaagaacggagaggtggtgttacgctttgctgcagcctatggctttcgaaacatccagaacatgatcctgaagcttaagaagggcaagttcccattccactttgtggaggtcctcgcctgtgctggaggatgcttaaatggcagaggccaagcccagactccagacggacatgcggataaggccctgctgcggcagatggaaggcatttacgctgacatccctgtgcggcgtccggagtccagtgcacacgtgcaggagctgtaccaggagtggctggaggggatcaactcccccaaggcccgagaggtgctgcataccacgtaccagagccaggagcgtggcacacacagcctggacatcaagtggtgaagtcaggccagggccttccagctgctcttggggccagagccaagagcctctcagtagagggaggggctgccctgagtggagtattaaagacacttaagaaaaccgctcaatggattactttggtttctccgagttccctgctaccccgtttattggaggc

SEQ ID NO: 31687 - DNA, 2480 bp, Homo sapiens
tgatttcataaaacgtttatgagtccaacacttccattatagccctgtatcaatgttttgcttagctgaaatcaatttcttggaggagtaagtgttatctttactttgtgagctgtaagggcccaaatcaatgtacttggtaaaactatccatagtgaacacacgcaaatgtcaaacggccatcatttagcatctgccctcgggcttccgggtccatcacgtggttactgacaggcaggccgcgcatgcgcgctgctactccgctgagcctacgtgacacgacgtgaagtggcaatggcggcggacgagggctgtgcccccggcccgccccgttaggagccgcgagtaaggcgagtgtccaacgccgagctggctgacagagcccggccgcggcctccgcgggcccaggggcctccaggccccgtgaccaccggaccgagcaccctggaacggccccagcttggcctcgggacagtccgcgcgctcaccgactccctggtgaacgccgcttggccgccgccgccgccgcaggacccacgagaagcggaaaccggcgcaaggacccggtccccccggcgccgtacgtgaagtgaggctgcgctccgccccgcgcgctccgattggctctggggcctggcccgccccttcccgacactgtcattggcctaggcaaagccgtaagggtggggaatcctattggcccaggggtgcggcttgtcctctcccggtgctctcattggccgagcgcggccgttgggggtgaggccgcgtcgggggaggacaacaaagggccgcgggcggcgggcagtggtgtcccagtctcccggtgcttccctgaggctgaggcgcccggcctcccgcccgccgcgctccagatgaagtgtgagcactgcacgcgcaaggaatgtagtaagaaaacaaaaactgatgaccaagagaatgtgtcagccgatgcaccgagtccagcccaggaaaatggagagaagggagaattccacaagttggctgatgccaagatatttttgagcgactgcctggcatgtgacagctgtatgactgcagaggaaggagtccaactttcccagcaaaatgccaaggacttcttccgcgttctgaaccttaacaagaaatgtgatacctcaaagcacaaagtgctggtagtgtctgtgtgtcctcaatctttgccttattttgctgctaaattcaacctcagtgtaactgatgcatccagaagactctgtggtttcctcaaaagtcttggggtgcactatgtatttgatacgacgatagctgcggattttagtatcctggagagtcaaaaagaattcgtgcgtcgctatcgccagcacagtgaggaggaacgcaccctgcccatgctgacctctgcctgtcctggctgggtccgatacgccgagcgggtgctgggtcgccccatcactgcccacctctgcaccgccaagtccccccagcaggtcatgggctctttggtgaaggattatttcgccagacagcagaacctgtctccagagaagattttccacgtcattgtggccccttgttatgacaagaagctggaggctcttcaggaaagccttccccctgctttgcatggctcccggggcgctgactgcgtgttaacatcaggtgaaattgctcaaataatggagcaaggtgacctctcagtgagagatgctgccgtcgacactctgtttggagacttgaaggaggacaaagtgacgcgtcatgatggagccagctcagacgggcacctggcacacatcttcagacatgcggccaaggagctgttcaacgaggatgtggaggaggtcacttaccgagccctgagaaacaaagacttccaagaggtcacccttgagaagaacggagaggtggtgttacgctttgctgcagcctatggctttcgaaacatccagaacatgatcctgaagcttaagaagggcaagttcccattccactttgtggaggtcctcgcctgtgctggaggatgcttaaatggcagaggccaagcccagactccagacggacatgcggataaggccctgctgcggcagatggaaggcatttacgctgacatccctgtgcggcgtccggagtccagtgcacacgtgcaggagctgtaccaggagtggctggaggggatcaactcccccaaggcccgagaggtgctgcataccacgtaccagagccaggagcgtggcacacacagcctggacatcaagtggtgaagtcaggccagggccttccagctgctcttggggccagagccaagagcctctcagtagagggaggggctgccctgagtggagtattaaagacacttaagaaaaaaaaaaaaaaaaaaaaaaaaaaaaaacgggggttttttgggggggagaaaaggaataaaaggtgggatatgttttgacacctttttagacagggggaaatggggccaaagggggtatattaggggtggaaaa

SEQ ID NO: 31688 - DNA, 2897 bp, Homo sapiens
tgatttcataaaacgtttatgagtccaacacttccattatagccctgtatcaatgttttgcttagctgaaatcaatttcttggaggagtaagtgttatctttactttgtgagctgtaagggcccaaatcaatgtacttggtaaaactatccatagtgaacacacgcaaatgtcaaacggccatcatttagcatctgccctcgggcttccgggtccatcacgtggttactgacaggcaggccgcgcatgcgcgctgctactccgctgagcctacgtgacacgacgtgaagtggcaatggcggcggacgagggctgtgcccccggcccgccccgttaggagccgcgagtaaggcgagtgtccaacgccgagctggctgacagagcccggccgcggcctccgcgggcccaggggcctccaggccccgtgaccaccggaccgagcaccctggaacggccccagcttggcctcgggacagtccgcgcgctcaccgactccctggtgaacgccgcttggccgccgccgccgccgcaggacccacgagaagcggaaaccggcgcaaggacccggtccccccggcgccgtacgtgaagtgaggctgcgctccgccccgcgcgctccgattggctctggggcctggcccgccccttcccgacactgtcattggcctaggcaaagccgtaagggtggggaatcctattggcccaggggtgcggcttgtcctctcccggtgctctcattggccgagcgcggccgttgggggtgaggccgcgtcgggggaggacaacaaagggccgcgggcggcgggcagtggtgtcccagtctcccggtgcttccctgaggctgaggcgcccggcctcccgcccgccgcgctccagatgaagtgtgagcactgcacgcgcaaggaatgtagtaagaaaacaaaaactgatgaccaagagaatgtgtcagccgatgcaccgagtccagcccaggaaaatggagagaagggagaattccacaagttggctgatgccaagatatttttgagcgactgcctggcatgtgacagctgtatgactgcagaggaaggagtccaactttcccagcaaaatgccaaggacttcttccgcgttctgaaccttaacaagaaatgtgatacctcaaagcacaaagtgctggtagtgtctgtgtgtcctcaatctttgccttattttgctgctaaattcaacctcagtgtaactgatgcatccagaagactctgtggtttcctcaaaagtcttggggtgcactatgtatttgatacgacgatagctgcggattttagtatcctggagagtcaaaaagaattcgtgcgtcgctatcgccagcacagtgaggaggaacgcaccctgcccatgctgacctctgcctgtcctggctgggtccgatacgccgagcgggtgctgggtcgccccatcactgcccacctctgcaccgccaagtccccccagcaggtcatgggctctttggtgaaggattatttcgccagacagcagaacctgtctccagagaagattttccacgtcattgtggccccttgttatgacaagaagctggaggctcttcaggaaagccttccccctgctttgcatggctcccggggcgctgactgcgtgttaacatcaggtgaaattgctcaaataatggagcaaggtgacctctcagtgagagatgctgccgtcgacactctgtaagtggcttctctggggagagtcctctggggggcaggacctctcgtcagccctgccagccacctgccaggcccagggctgccctgctttatgacgaggccatgtgaagcactgcgatgcagtcccccaggcccctgccacaaccctcagccaccctatagctgttgaatgggataccattcaccagggctgccagggagttgaaggtttggcgggcttccatggtgtgattgccaccctaaacccttgaggaaggacaaaatgcacaaacagctttgtcctcgctggcgcagggctgttcatgtgtgcaccagcccccttcttcctgagtgccgtctgtgcctcacattccgtgtggtctatggggcagtggggcagctccctcaggcccctttgcaccaagagtggcagtctgggttctgctgggggcggtgacctcgatacccagcaaggcccagggctcctgctgcaccccaggcactgggcagagagcaccacaaaggcagcagcgtgtgtcctcgccaacagtccgcatcccaggtgctgcattcgtgcccttttgggggaaggtaagatagaagtttacagaatttaagcatctgtggggccaggcgtggtggctcacacctataatcacagtactttgggaggctgaggtaggaggatcacttgagtccaggaggctggggctgtagtgagctatgattgtgccactgcactccagcctgagagacagaacaagaccctgtctccaaaagaaaaagaccataagcatctggagcacctgcaagagcctgtgcatgggctcggcgtgactgagagtcctccgccttgcccgagcatcaggcaggccctcccaagacccctcaagatgctagaatgggactttctgcaaagtttaaacatctgtacaggatttagcttctttggtggcgaacttggattgtgatgccctcaggaagtctggtttcactctttctgtcactgtacgtcagcattcatgaaggacttgtattttctctgccttgtgaggtttggagacttgaaggaggacaaagtgacgcgtcatgatggagccagctcagacgggcacctggcacacatcttcagacatgcggccaaggagctgttcaacgaggatgtggaggaggggctgccctgagtggagtattaaagacacttaagaaa

SEQ ID NO: 31689 - DNA, 2499 bp, Homo sapiens
tgatttcataaaacgtttatgagtccaacacttccattatagccctgtatcaatgttttgcttagctgaaatcaatttcttggaggagtaagtgttatctttactttgtgagctgtaagggcccaaatcaatgtacttggtaaaactatccatagtgaacacacgcaaatgtcaaacggccatcatttagcatctgccctcgggcttccgggtccatcacgtggttactgacaggcaggccgcgcatgcgcgctgctactccgctgagcctacgtgacacgacgtgaagtggcaatggcggcggacgagggctgtgcccccggcccgccccgttaggagccgcgagtaaggcgagtgtccaacgccgagctggctgacagagcccggccgcggcctccgcgggcccaggggcctccaggccccgtgaccaccggaccgagcaccctggaacggccccagcttggcctcgggacagtccgcgcgctcaccgactccctggtgaacgccgcttggccgccgccgccgccgcaggacccacgagaagcggaaaccggcgcaaggacccggtccccccggcgccgtacgtgaagtgaggctgcgctccgccccgcgcgctccgattggctctggggcctggcccgccccttcccgacactgtcattggcctaggcaaagccgtaagggtggggaatcctattggcccaggggtgcggcttgtcctctcccggtgctctcattggccgagcgcggccgttgggggtgaggccgcgtcgggggaggacaacaaagggccgcgggcggcgggcagtggtgtcccagtctcccggtgcttccctgaggctgaggcgcccggcctcccgcccgccgcgctccagatgaagtgtgagcactgcacgcgcaaggaatgtagtaagaaaacaaaaactgatgaccaagagaatgtgtcagccgatgcaccgagtccagcccaggaaaatggagagaagggagaattccacaagttggctgatgccaagatatttttgagcgactgcctggcatgtgacagctgtatgactgcagaggaaggagtccaactttcccagcaaaatgccaaggacttcttccgcgttctgaaccttaacaagaaatgtgatacctcaaagcacaaagtgctggtagtgtctgtgtgtcctcaatctttgccttattttgctgctaaattcaacctcagtgtaactgatgcatccagaagactctgtggtttcctcaaaagtcttggggtgcactatgtatttgatacgacgatagctgcggattttagtatcctggagagtcaaaaagaattcgtgcgtcgctatcgccagcacagtgaggaggaacgcaccctgcccatgctgacctctgcctgtcctggctgggtccgatacgccgagcgggtgctgggtcgccccatcactgcccacctctgcaccgccaagtccccccagcaggtcatgggctctttggtgaaggattatttcgccagacagcagaacctgtctccagagaagattttccacgtcattgtggccccttgttatgacaagaagctggaggctcttcaggaaagccttccccctgctttgcatggctcccggggcgctgactgcgtgttaacatcagaaattagccaggcgtggtggtgcacacctgtgatcacagctactcgggaggctgcggcaagagaatcacttgaacccgggaggcagaggttacagcgagacaagattgcaccactggactccagcctgggcggcggaggtgaaattgctcaaataatggagcaaggtgacctctcagtgagagatgctgccgtcgacactctgtttggagacttgaaggaggacaaagtgacgcgtcatgatggagccagctcagacgggcacctggcacacatcttcagacatgcggccaaggagctgttcaacgaggatgtggaggaggtcacttaccgagccctgagaaacaaagacttccaagaggtcacccttgagaagaacggagaggtggtgttacgctttgctgcagcctatggctttcgaaacatccagaacatgatcctgaagcttaagaagggatgcttaaatggcagaggccaagcccagactccagacggacatgcggataaggccctgctgcggcagatggaaggcatttacgctgacatccctgtgcggcgtccggagtccagtgcacacgtgcaggagctgtaccaggagtggctggaggggatcaactcccccaaggcccgagaggtgctgcataccacgtaccagagccaggagcgtggcacacacagcctggacatcaagtggtgaagtcaggccagggccttccagctgctcttggggccagagccaagagcctctcagtagagggaggggctgccctgagtggagtattaaagacacttaagaaaaccgctcaatggattactttggtttctccgagttccctgctaccccgtttattggaggc

SEQ ID NO: 31690 - DNA, 1678 bp, Homo sapiens
ggcggccgaggttggcggtccgggcccgcgctcgctcgcttcagggctcttcaaggcgcccccggcctcggcaccctgggccgctcggcgtggaggcggccggcgcggggtccctgcctctgcagggcgggttcggtcttcgcggttctccctgaacttgtccatctttcccacgcccgcgaaggcggaaacgcacggagaccgagcctctcgtgccgcgcaccacagtccgagaatgtagtaagaaaacaaaaactgatgaccaagagaatgtgtcagccgatgcaccgagtccagcccaggaaaatggagagaagggagaattccacaagttggctgatgccaagatatttttgagcgactgcctggcatgtgacagctgtatgactgcagaggaaggagtccaactttcccagcaaaatgccaaggacttcttccgcgttctgaaccttaacaagaaatgtgatacctcaaagcacaaagtgctggtagtgtctgtgtgtcctcaatctttgccttattttgctgctaaattcaacctcagtgtaactgatgcatccagaagactctgtggtttcctcaaaagtcttggggtgcactatgtatttgatacgacgatagctgcggattttagtatcctggagagtcaaaaagaattcgtgcgtcgctatcgccagcacagtgaggaggaacgcaccctgcccatgctgacctctgcctgtcctggctgggtccgatacgccgagcgggtgctgggtcgccccatcactgcccacctctgcaccgccaagtccccccagcaggtcatgggctctttggtgaaggattatttcgccagacagcagaacctgtctccagagaagattttccacgtcattgtggccccttgttatgacaagaagctggaggctcttcaggaaagccttccccctgctttgcatggctcccggggcgctgactgcgtgttaacatcaggtgaaattgctcaaataatggagcaaggtgacctctcagtgagagatgctgccgtcgacactctgtttggagacttgaaggaggacaaagtgacgcgtcatgatggagccagctcagacgggcacctggcacacatcttcagacatgcggccaaggagctgttcaacgaggatgtggaggaggtcacttaccgagccctgagaaacaaagacttccaagaggtcacccttgagaagaacggagaggtggtgttacgctttgctgcagcctatggctttcgaaacatccagaacatgatcctgaagcttaagaagggcaagttcccattccactttgtggaggtcctcgcctgtgctggaggatgcttaaatggcagaggccaagcccagactccagacggacatgcggataaggccctgctgcggcagatggaaggcatttacgctgacatccctgtgcggcgtccggagtccagtgcacacgtgcaggagctgtaccaggagtggctggaggggatcaactcccccaaggcccgagaggtgctgcataccacgtaccagagccaggagcgtggcacacacagcctggacatcaagtggtgaagtcaggccagggccttccagctgctcttggggccagagccaagagcctctcagtagagggaggggctgccctgagtggagtattaaagacacttaagaaa

SEQ ID NO: 31691 - DNA, 2203 bp, Homo sapiens
tgatttcataaaacgtttatgagtccaacacttccattatagccctgtatcaatgttttgcttagctgaaatcaatttcttggaggagtaagtgttatctttactttgtgagctgtaagggcccaaatcaatgtacttggtaaaactatccatagtgaacacacgcaaatgtcaaacggccatcatttagcatctgccctcgggcttccgggtccatcacgtggttactgacaggcaggccgcgcatgcgcgctgctactccgctgagcctacgtgacacgacgtgaagtggcaatggcggcggacgagggctgtgcccccggcccgccccgttaggagccgcgagtaaggcgagtgtccaacgccgagctggctgacagagcccggccgcggcctccgcgggcccaggggcctccaggccccgtgaccaccggaccgagcaccctggaacggccccagcttggcctcgggacagtccgcgcgctcaccgactccctggtgaacgccgcttggccgccgccgccgccgcaggacccacgagaagcggaaaccggcgcaaggacccggtccccccggcgccgtacgtgaagtgaggctgcgctccgccccgcgcgctccgattggctctggggcctggcccgccccttcccgacactgtcattggcctaggcaaagccgtaagggtggggaatcctattggcccaggggtgcggcttgtcctctcccggtgctctcattggccgagcgcggccgttgggggtgaggccgcgtcgggggaggacaacaaagggccgcgggcggcgggcagtggtgtcccagtctcccggtgcttccctgaggctgaggcgcccggcctcccgcccgccgcgctccagatgaagtgtgagcactgcacgcgcaaggaatgtagtaagaaaacaaaaactgatgaccaagagaatgtgtcagccgatgcaccgagtccagcccaggaaaatggagagaaatgtgatacctcaaagcacaaagtgctggtagtgtctgtgtgtcctcaatctttgccttattttgctgctaaattcaacctcagtgtaactgatgcatccagaagactctgtggtttcctcaaaagtcttggggtgcactatgtatttgatacgacgatagctgcggattttagtatcctggagagtcaaaaagaattcgtgcgtcgctatcgccagcacagtgaggaggaacgcaccctgcccatgctgacctctgcctgtcctggctgggtccgatacgccgagcgggtgctgggtcgccccatcactgcccacctctgcaccgccaagtccccccagcaggtcatgggctctttggtgaaggattatttcgccagacagcagaacctgtctccagagaagattttccacgtcattgtggccccttgttatgacaagaagctggaggctcttcaggaaagccttccccctgctttgcatggctcccggggcgctgactgcgtgttaacatcaggtgaaattgctcaaataatggagcaaggtgacctctcagtgagagatgctgccgtcgacactctgtttggagacttgaaggaggacaaagtgacgcgtcatgatggagccagctcagacgggcacctggcacacatcttcagacatgcggccaaggagctgttcaacgaggatgtggaggaggtcacttaccgagccctgagaaacaaagacttccaagaggtcacccttgagaagaacggagaggtggtgttacgctttgctgcagcctatggctttcgaaacatccagaacatgatcctgaagcttaagaagggcaagttcccattccactttgtggaggtcctcgcctgtgctggaggatgcttaaatggcagaggccaagcccagactccagacggacatgcggataaggccctgctgcggcagatggaaggcatttacgctgacatccctgtgcggcgtccggagtccagtgcacacgtgcaggagctgtaccaggagtggctggaggggatcaactcccccaaggcccgagaggtgctgcataccacgtaccagagccaggagcgtggcacacacagcctggacatcaagtggtgaagtcaggccagggccttccagctgctcttggggccagagccaagagcctctcagtagagggaggggctgccctgagtggagtattaaagacacttaagaaa

SEQ ID NO: 31692 - DNA, 1121 bp, Homo sapiens
  misc_feature (2)..(2): n is a, c, g, or t
anttcggcatgaggggacttcttccgcgttctgagggtgcactatgtatttgatacgacgatagctgcggattttagtatcctggagagtcaaaaagaattcgtgcgtcgctatcgccagcacagtgaggaggaacgcaccctgcccatgctgacctctgcctgtcctggctgggtccgatacgccgagcgggtgctgggtcgccccatcactgcccacctctgcaccgccaagtccccccagcaggtcatgggctctttggtgaaggattatttcgccagacagcagaacctgtctccagagaagattttccacgtcattgtggccccttgttatgacaagaagctggaggctcttcaggaaagccttccccctgctttgcatggctcccggggcgctgactgcgtgttaacatcaggtgaaattgctcaaataatggagcaaggtgacctctcagtgagagatgctgccgtcgacactctgtttggagacttgaaggaggacaaagtgacgcgtcatgatggagccagctcagacgggcacctggcacacatcttcagacatgcggccaaggagctgttcaacgaggatgtggaggaggtcacttaccgagccctgagaaacaaagacttccaagaggtcacccttgagaagaacggagaggtggtgttacgctttgctgcagcctatggctttcgaaacatccagaacatgatcctgaagcttaagaagggcaagttcccattccactttgtggaggtcctcgcctgtgctggaggatgcttaaatggcagaggccaagcccagactccagacggacatgcggataaggccctgctgcggcagatggaaggcatttacgctgacatccctgtgcggcgtccggagtccagtgcacacgtgcaggagctgtaccaggagtggctggaggggatcaactcccccaaggcccgagaggtgctgcataccacgtaccagagccaggagcgtggcacacacagcctggacatcaagtggtgaagtcaggccagggccttccagctgctcttggggccagagccaagagcctctcagtagagggaggggctgccctgagtggagtattaaagacacttaagaaa

SEQ ID NO: 31693 - DNA, 1478 bp, Homo sapiens
tgatttcataaaacgtttatgagtccaacacttccattatagccctgtatcaatgttttgcttagctgaaatcaatttcttggaggagtaagtgttatctttactttgtgagctgtaagggcccaaatcaatgtacttggtaaaactatccatagtgaacacacgcaaatgtcaaacggccatcatttagcatctgccctcgggcttccgggtccatcacgtggttactgacaggcaggccgcgcatgcgcgctgctactccgctgagcctacgtgacacgacgtgaagtggcaatggcggcggacgagggctgtgcccccggcccgccccgttaggagccgcgagtaaggcgagtgtccaacgccgagctggctgacagagcccggccgcggcctccgcgggcccaggggcctccaggccccgtgaccaccggaccgagcaccctggaacggccccagcttggcctcgggacagtccgcgcgctcaccgactccctggtgaacgccgcttggccgccgccgccgccgcaggacccacgagaagcggaaaccggcgcaaggacccggtccccccggcgccgtacgtgaagtgaggctgcgctccgccccgcgcgctccgattggctctggggcctggcccgccccttcccgacactgtcattggcctaggcaaagccgtaagggtggggaatcctattggcccaggggtgcggcttgtcctctcccggtgctctcattggccgagcgcggccgttgggggtgaggccgcgtcgggggaggacaacaaagggccgcgggcggcgggcagtggtgtcccagtctcccggtgcttccctgaggctgaggcgcccggcctcccgcccgccgcgctccagatgaagtgtgagcactgcacgcgcaaggaatgtagtaagaaaacaaaaactgatgaccaagagaatgtgtcagccgatgcaccgagtccagcccaggaaaatggagagaagggagaattccacaagttggctgatgccaagatatttttgagcgactgcctggcatgtgacagctgtatgactgcagaggaaggagtccaactttcccagcaaaatgccaaggacttcttccgcgttctgaaccttaacaagaaatgtgatacctcaaagcacaaagtgctggtagtgtctgtgtgtcctcaatctttgccttattttgctgctaaattcaacctcagtgtaactgatgcatccagaagactctgtggtttcctcaaaagtcttggggtgcactatgtatttgatacgacgatagctgcggattttagtatcctggagagtcaaaaagaattcgtgcgtcgctatcgccagcacagtgaggaggaacgcaccctgcccatgctgacctctgcctgtcctgggatgctcccatttcccagtagcctccaggcctgcaggttcccatgacccacagccgggccaccgaggacgggttttgggtcc

SEQ ID NO: 31694 - DNA, 1377 bp, Homo sapiens
  misc_feature (1201)..(1201): n is a, c, g, or t
  misc_feature (1239)..(1239): n is a, c, g, or t
tgatttcataaaacgtttatgagtccaacacttccattatagccctgtatcaatgttttgcttagctgaaatcaatttcttggaggagtaagtgttatctttactttgtgagctgtaagggcccaaatcaatgtacttggtaaaactatccatagtgaacacacgcaaatgtcaaacggccatcatttagcatctgccctcgggcttccgggtccatcacgtggttactgacaggcaggccgcgcatgcgcgctgctactccgctgagcctacgtgacacgacgtgaagtggcaatggcggcggacgagggctgtgcccccggcccgccccgttaggagccgcgagtaaggcgagtgtccaacgccgagctggctgacagagcccggccgcggcctccgcgggcccaggggcctccaggccccgtgaccaccggaccgagcaccctggaacggccccagcttggcctcgggacagtccgcgcgctcaccgactccctggtgaacgccgcttggccgccgccgccgccgcaggacccacgagaagcggaaaccggcgcaaggacccggtccccccggcgccgtacgtgaagtgaggctgcgctccgccccgcgcgctccgattggctctggggcctggcccgccccttcccgacactgtcattggcctaggcaaagccgtaagggtggggaatcctattggcccaggggtgcggcttgtcctctcccggtgctctcattggccgagcgcggccgttgggggtgaggccgcgtcgggggaggacaacaaagggccgcgggcggcgggcagtggtgtcccagtctcccggtgcttccctgaggctgaggcgcccggcctcccgcccgccgcgctccagatgaagtgtgagcactgcacgcgcaaggaatgtagtaagaaaacaaaaactgatgaccaagagaatgtgtcagccgatgcaccgagtccagcccaggaaaatggagagaagggagaattccacaagttggctgatgccaagatatttttgagcgactgcctggcatgtgacagctgtatgactgcagaggaaggagtccaactttcccagcaaaatgccaaggacttcttccgcgttctgaaccttaacaagaaaaaaaaaaaaaaaaaaaaaaaaaaacgttgtgtgggggggcttgggcccttggaaaaggtttttgaagaccntttggtgtggggcgggggggccccaatgttggtgttangtggaaccgggggccaaagaggtggttccctagagggaacaccggggacaagagacactagggctggtggatttctccacaatattaaaaaaagcccgggggggacacggatccgtttcggaacaaattcccaaatgg

SEQ ID NO: 31695 - DNA, 2846 bp, Homo sapiens
gtccctcacaccgagagttcctgcgcgtggggagttggagagtttgcgtggcgggaacgcggcggcagtgagagcgagcggcgccggcccttgcgtccggtgcggcgatgctgaccccggcgttcgacctcagccaggatccggacttcctgactatcgccatccgcgtgccctacgcccgggtctccgagttcgacgtctacttcgaggggtctgacttcaagttctacgccaagccatactttctcagattaacccttcctggaagaattgtagaaaatggaagtgagcaagggtcctatgatgcagataaaggaatttttaccattcgcctgcccaaagaaacccctggccagcattttgaggggctgaacatgttaactgctcttctggcaccaagaaaatccaggacagcaaaaccacttgtggaagaaataggtgcttctgagattcctgaggaagtagttgacgatgaagagtttgattgggaaattgagcagacaccctgtgaagaggtatcagaaagtgctttgaatccgcagtgccactatggatttggaaacttacgatcaggagtgttgcaacggttacaggatgaactgagtgatgttattgatattaaggatccagatttcacccctgcagctgaacgaagacagaagcgcctggccgctgagctggccaagtttgatcctgatcattatctagctgacttttttgaagatgaggcgattgaacagattttgaagtataatccttggtggactgacaaatattcaaaaatgatggcctttttggaaaagagtcaggaacaagaaaatcatgctacattagtgtctttttctgaagaagagaagtatcagctacgaaaatttgtcaataaatcttatctgctggacaagagagcctgtcgtcaagtgtgctacagtttgattgatatccttctggcatattgctatgaaacccgtgtcactgaaggagagaagaatgttgaatctgcatggaatatcaggaaactgagtccaacactatgctggtttgagacttggactaacgttcatgatatcatggtgtcttttggaagaagggtgttgtgttacccactctatcgccatttcaagctggtgatgaaggcctacagggacactataaagatattgcaactgggtaaaagtgcagttttaaagtgtctcctggatattcacaaaatttttcaggaaaatgacccagcgtacatactgaatgatctctacatctcagactactgtgtgtggattcagaaagtcaaatccaaaaagttggcagctcttgcagaagccttaaaggaagtctcccttacaaaggcccagctggggttagaactggaagaactagaagcagcagcactgcttgtccaggaggaagaaactgcattaaaagcagcccattcagtttctgggcagcagacactttgctccagctctgaggcaagtgattcggaggactcagacagcagcgtgtcatctggaaacgaagactcaggctcagattcagaacaagatgaactcaaagatagtccatctgagacagtcagttctttgcaaggtccctttcttgaagaaagcagtgcctttcttattgctgatggtggagtacgcagaaacacagccatccaggagtctgatgccagtcagggaaagccacttgcctcttcctggcctcttggagtgtctgggcctctgatagaggagcttggggaacaactgaagactacagttcaggtttctgaacccaagggcaccactgctgtaaaccgcagcaatattcaggagagagacggctgtcagacaccaaataattgactcttaggtggttttattcattgttgagaaatatggtagattgggtttcatttaccgaatgagaattcttcattttcactttgtaatttttcttagtatatagtcagcccactgtatttgtgtgttccacatctgtggattcaaccaactgcagatcaaaaatattgaagaaaaaatcgcatctgtaccaaacatgtacagacttttttcttgttattattctctaaataatacagtatgacaactatttccacagcatttacattgtattgggtaatataagtaatctagtgatgatttaaactgtgcaggaggatgtgggtaggttatatgcaaatactgcaccattttttatcaggggcttgagcatctgaggattttagtatcctcaggagtcctggaaccaaccccccacagatacggggacaactttatgacattgtttttcaaccaatgaatgtttataccttttgttttccttgccgcgactgtgaagataaagttcaaaagtatttttaccaaagtgtagctaatatttcaagctgaaaataatagttctactgcccgtgtctccagaatgtagagcccatcaatatttttattttaggaggtgtacttgacacccaataaactgcacgtatcaaaagtgtacaatgtgttggcgtatgtataccctgcgtaaaactatcaccacaactgaagtgaggaacggacccatcattcccaagtgcccttgtgccctgttattagtttgcatgtcctagaattctatgtaaattgaatcatacaatatgtatcccttttttggtcaggcatattttactcagtatagttattttgagattcatccatgtggtagcatgtgtcacgagtttttgtttttatgtttttcattgctgagtactgcttcattgaatagatttgttcattgacctctcgatggacacctgggttgtttccagtttggggctgttataaataaagctgttatgaacatttgtgtac

SEQ ID NO: 31696 - DNA, 617 bp, Homo sapiens
caaaaacatgaaatgtaaattatattaaaatgtcctttatgtgcatctgtattttgttaatgccatgtgttttagattcttatttgtaatctttaggactttatttaaaagctttcttgtgacatttgtgatgtattgatagtgtgagaaattacaaaaactaagattctgttttattgtaaagtatacaaaaagaatcttatttcatggttttatgtttctcttctacttggcttcacaatgatccgaacttgcagcttttaaatgagaaaagcttcctatttcattgtgtacttttgtttgtgtaacattttgtggaaatgactgcttattaaaatgacacttcacagacttggactaacgttcatgatatcatggtgtcttttggaagaagggtgttgtgttacccactctatcgccatttcaagctggtgatgaaggcctacagggacactataaagatattgcaactgggtaagatattactgtacttgcaaatttgggagggaaaaagttgtaagtttttagtctgtgaagatataataatgatttttgcttttttactgtatataaataagtaatgaaaaatgaatccaaccacttttaaagtatagaat

SEQ ID NO: 31697 - DNA, 140 bp, Homo sapiens
ttctccaaaacaaataaaggttgaatctgcatggaatatcaggaaactgagtccaacactatgctggtttgaggtaagatgtaaacaggaactgaaacacttacttcatatagaatcttactactccaaaaatgattcaa

SEQ ID NO: 31698 - DNA, 2830 bp, Homo sapiens
ctttttttttttgttattttgtatagtttgcgtggcgggaacgcggcggcagtgagagcgagcggcgccggcccttgcgtccggtgcggcgatgctgaccccggcgttcgacctcagccaggatccggacttcctgactatcgccatccgcgtgccctacgcccgggtctccgagttcgacgtctacttcgaggggtctgacttcaagttctacgccaagccatactttctcagattaacccttcctggaagaattgtagaaaatggaagtgagcaagggtcctatgatgcagataaaggaatttttaccattcgcctgcccaaagaaacccctggccagcattttgaggggctgaacatgttaactgctcttctggcaccaagaaaatccaggacagcaaaaccacttgtggaagaaataggtgcttctgagattcctgaggaagtagttgacgatgaagagtttgattgggaaattgagcagacaccctgtgaagaggtatcagaaagtgctttgaatccgcagtgccactatggatttggaaacttacgatcaggagtgttgcaacggttacaggatgaactgagtgatgttattgatattaaggatccagatttcacccctgcagctgaacgaagacagaagcgcctggccgctgagctggccaagtttgatcctgatcattatctagctgacttttttgaagatgaggcgattgaacagattttgaagtataatccttggtggactgacaaatattcaaaaatgatggcctttttggaaaagagtcaggaacaagaaaatcatgctacattagtgtctttttctgaagaagagaagtatcagctacgaaaatttgtcaataaatcttatctgctggacaagagagcctgtcgtcaagtgtgctacagtttgattgatatccttctggcatattgctatgaaacccgtgtcactgaaggagagaagaatgttgaatctgcatggaatatcaggaaactgagtccaacactatgctggtttgagacttggactaacgttcatgatatcatggtgtcttttggaagaagggtgttgtgttacccactctatcgccatttcaagctggtgatgaaggcctacagggacactataaagatattgcaactgggtaaaagtgcagttttaaagtgtctcctggatattcacaaaatttttcaggaaaatgacccagcgtacatactgaatgatctctacatctcagactactgtgtgtggattcagaaagtcaaatccaaaaagttggcagctcttgcagaagccttaaaggaagtctcccttacaaaggcccagctggggttagaactggaagaactagaagcagcagcactgcttgtccaggaggaagaaactgcattaaaagcagcccattcagtttctgggcagcagacactttgctccagctctgaggcaagtgattcggaggactcagacagcagcgtgtcatctggaaacgaagactcaggctcagattcagaacaagatgaactcaaagatagtccatctgagacagtcagttctttgcaaggtccctttcttgaagaaagcagtgcctttcttattgctgatggtggagtacgcagaaacacagccatccaggagtctgatgccagtcagggaaagccacttgcctcttcctggcctcttggagtgtctgggcctctgatagaggagcttggggaacaactgaagactacagttcaggtttctgaacccaagggcaccactgctgtaaaccgcagcaatattcaggagagagacggctgtcagacaccaaataattgactcttaggtggttttattcattgttgagaaatatggtagattgggtttcatttaccgaatgagaattcttcattttcactttgtaatttttcttagtatatagtcagcccactgtatttgtgtgttccacatctgtggattcaaccaactgcagatcaaaaatattgaagaaaaaatcgcatctgtaccaaacatgtacagacttttttcttgttattattctctaaataatacagtatgacaactatttccacagcatttacattgtattgggtaatataagtaatctagtgatgatttaaactgtgcaggaggatgtgggtaggttatatgcaaatactgcaccattttttatcaggggcttgagcatctgaggattttagtatcctcaggagtcctggaaccaaccccccacagatacggggacaactttatgacattgtttttcaaccaatgaatgtttataccttttgttttccttgccgcgactgtgaagataaagttcaaaagtatttttaccaaagtgtagctaatatttcaagctgaaaataatagttctactgcccgtgtctccagaatgtagagcccatcaatatttttattttaggaggtgtacttgacacccaataaactgcacgtatcaaaagtgtacaatgtgttggcgtatgtataccctgcgtaaaactatcaccacaactgaagtgaggaacggacccatcattcccaagtgcccttgtgccctgttattagtttgcatgtcctagaattctatgtaaattgaatcatacaatatgtatcccttttttggtcaggcatattttactcagtatagttattttgagattcatccatgtggtagcatgtgtcacgagtttttgtttttatgtttttcattgctgagtactgcttcattgaatagatttgttcattgacctctcgatggacacctgggttgtttccagtttggggctgttataaataaagctgttatgaacatttgtgtac

SEQ ID NO: 31699 - DNA, 1310 bp, Homo sapiens
gtccctcacaccgagagttcctgcgcgtggggagttggagagtttgcgtggcgggaacgcggcggcagtgagagcgagcggcgccggcccttgcgtccggtgcggcgatgctgaccccggcgttcgacctcagccaggatccggacttcctgactatcgccatccgcgtgccctacgcccgggtctccgagttcgacgtctacttcgaggggtctgacttcaagttctacgccaagccatactttctcagattaacccttcctggaagaattgtagaaaatggaagtgagcaagggtcctatgatgcagataaaggaatttttaccattcgcctgcccaaagaaacccctggccagcattttgaggggctgaacatgttaactgctcttctggcaccaagaaaatccaggacagcaaaaccacttgtggaagaaataggtgcttctgagattcctgaggaagtagttgacgatgaagagtttgattgggaaattgagcagacaccctgtgaagaggtatcagaaagtgctttgaatccgcagtgccactatggatttggaaacttacgatcaggagtgttgcaacggttacaggatgaactgagtgatgttattgatattaaggatccagatttcacccctgcagctgaacgaagacagaagcgcctggccgctgagctggccaagtttgatcctgatcattatctagctgacttttttgaagatgaggcgattgaacagattttgaagtataatccttggtggactgacaaatattcaaaaatgatggcctttttggaaaagagtcaggaacaagaaaatcatgctacattagtgtctttttctgaagaagagaagtatcagctacgaaaatttgtcaataaatcttatctgctggacaagagagcctgtcgtcaagtgtgctacagtttgattgatatccttctggcatattgctatgaaacccgtgtcactgaaggagagaagaatgttgaatctgcatggaatatcaggaaactgagtccaacactatgctggtttgagacttggactaacgttcatgatatcatggtgtcttttggaagaagggtgttgtgttacccactctatcgccatttcaagctggtgatgaaggcctacagggacactataaagatattgcaactgggtaagatattactgtacttgcaaatttgggagggaaaaagttgtaagtttttagtctgtgaagatataataatgatttttgcttttttactgtatataaataagtaatgaaaaatgaatccaaccacttttaaagtatagaat

SEQ ID NO: 31700 - DNA, 691 bp, Homo sapiens
gtccctcacaccgagagttcctgcgcgtggggagttggagagtttgcgtggcgggaacgcggcggcagtgagagcgagcggcgccggcccttgcgtccggtgcggcgatgctgaccccggcgttcgacctcagccaggatccggacttcctgactatcgccatccgcgtgccctacgcccgggtctccgagttcgacgtctacttcgaggggtctgacttcaagttctacgccaagccatactttctcagattaacccttcctggaagaattgtagaaaatggaagtgagcaagggtcctatgatgcagataaaggaatttttaccattcgcctgcccaaagaaacccctggccagcattttgaggggctgaacatgttaactgctcttctggcaccaagaaaatccaggacagcaaaaccacttgtggaagaaataggtgcttctgagattcctgaggaagtagttgacgatgaagagtttgattgggaaattgagcagacaccctgtgaagaggtatcagaaagtgctttgaatccgcagtgccactatggatttggaaacttacgatcaggagtgttgcaacggttacaggatgaactgagtgatgttattgatattaaggatccagatttcacccctgcagctcagcggccaggcgcttctgtcttcgttcagctgcagtcgacgcg

SEQ ID NO: 31701 - DNA, 2153 bp, Homo sapiens
caaaaacatgaaatgtaaattatattaaaatgtcctttatgtgcatctgtattttgttaatgccatgtgttttagattcttatttgtaatctttaggactttatttaaaagctttcttgtgacatttgtgatgtattgatagtgtgagaaattacaaaaactaagattctgttttattgtaaagtatacaaaaagaatcttatttcatggttttatgtttctcttctacttggcttcacaatgatccgaacttgcagcttttaaatgagaaaagcttcctatttcattgtgtacttttgtttgtgtaacattttgtggaaatgactgcttattaaaatgacacttcacagacttggactaacgttcatgatatcatggtgtcttttggaagaagggtgttgtgttacccactctatcgccatttcaagctggtgatgaaggcctacagggacactataaagatattgcaactgggtaaaagtgcagttttaaagtgtctcctggatattcacaaaatttttcaggaaaatgacccagcgtacatactgaatgatctctacatctcagactactgtgtgtggattcagaaagtcaaatccaaaaagttggcagctcttgcagaagccttaaaggaagtctcccttacaaaggcccagctggggttagaactggaagaactagaagcagcagcactgcttgtccaggaggaagaaactgcattaaaagcagcccattcagtttctgggcagcagacactttgctccagctctgaggcaagtgattcggaggactcagacagcagcgtgtcatctggaaacgaagactcaggctcagattcagaacaagatgaactcaaagatagtccatctgagacagtcagttctttgcaaggtccctttcttgaagaaagcagtgcctttcttattgctgatggtggagtacgcagaaacacagccatccaggagtctgatgccagtcagggaaagccacttgcctcttcctggcctcttggagtgtctgggcctctgatagaggagcttggggaacaactgaagactacagttcaggtttctgaacccaagggcaccactgctgtaaaccgcagcaatattcaggagagagacggctgtcagacaccaaataattgactcttaggtggttttattcattgttgagaaatatggtagattgggtttcatttaccgaatgagaattcttcattttcactttgtaatttttcttagtatatagtcagcccactgtatttgtgtgttccacatctgtggattcaaccaactgcagatcaaaaatattgaagaaaaaatcgcatctgtaccaaacatgtacagacttttttcttgttattattctctaaataatacagtatgacaactatttccacagcatttacattgtattgggtaatataagtaatctagtgatgatttaaactgtgcaggaggatgtgggtaggttatatgcaaatactgcaccattttttatcaggggcttgagcatctgaggattttagtatcctcaggagtcctggaaccaaccccccacagatacggggacaactttatgacattgtttttcaaccaatgaatgtttataccttttgttttccttgccgcgactgtgaagataaagttcaaaagtatttttaccaaagtgtagctaatatttcaagctgaaaataatagttctactgcccgtgtctccagaatgtagagcccatcaatatttttattttaggaggtgtacttgacacccaataaactgcacgtatcaaaagtgtacaatgtgttggcgtatgtataccctgcgtaaaactatcaccacaactgaagtgaggaacggacccatcattcccaagtgcccttgtgccctgttattagtttgcatgtcctagaattctatgtaaattgaatcatacaatatgtatcccttttttggtcaggcatattttactcagtatagttattttgagattcatccatgtggtagcatgtgtcacgagtttttgtttttatgtttttcattgctgagtactgcttcattgaatagatttgttcattgacctctcgatggacacctgggttgtttccagtttggggctgttataaataaagctgttatgaacatttgtgtac

SEQ ID NO: 31702 - DNA, 465 bp, Homo sapiens
agtttgcgtggcgggaacgcggcggcagtgagagcgagcggcgccggcccttgcgtccggtgcggcgatgctgaccccggcgttcgacctcagccaggatccggacttcctgactatcgccatccgcgtgccctacgcccgggtctccgagttcgacgtctacttcgaggggtctgacttcaagttctacgccaagccatactttctcaggcgagttcggggtgcctggccgcaggaaaggcgcattcgttagatagctgctttagagggagaatgcaaggtcgagagagcagtgctcgattgcgcgaatgccttttcccgacgtttccgcagcttctcttggtgccagggaactgccctcttccaggggtgcgttttagatgctgcggaagcccttttccttcttgagctttcttaaatcccatatcaaaggattgcggaatcacttgaaaaagtgacgtttgg

SEQ ID NO: 31703 - DNA, 578 bp, Homo sapiens
gttgaatctgcatggaatatcaggaaactgagtccaacactatgctggtttgaggtatgatttccagttgcaattgtttagaatttgttgttcaggaagttatttttgttgtttttacatcatttggggtaattcaagcaattccttgaatttttaaaagtagaagctctattgtacaagtatgttttccatctttttaataaaattctgataatgaaccaggtagagtactttggaagctgggggagggaaacacactttggagagaggatggagacatggtttgttgggaaagaatgtgggggcagagtgagaggtgtgtttgtaagttggcatgtattggagcttgaaactcagagatggaagcaaacctaggtgataagtgactgtcagggtctatgctaagaacacacacacacacacgaaaaataatgttttttatatgattttttatatatatgtgtatatgtaaaaaaacttcacctattctcagtatgtctgtgaggtaagtattgcaggttttacaggtgaggatccttagatcatatagcttaaatctcttatcttaggtcctacaa

SEQ ID NO: 31704 - DNA, 5370 bp, Homo sapiens
  misc_feature (1099)..(1099): n is a, c, g, or t
  misc_feature (3242)..(3242): n is a, c, g, or t
cgccttgtgtgtgctggatcctgcgcgggtagatccccgagtaattttttctgcaggatgaattaagagaagagacacttgctcatcaggcatggagagcactttgtcagcttccaatatgcaagacccttcatcttcacccttggaaaagtgtctcggctcagctaatggaaatggagaccttgattctgaagaaggctcaagcttggaggaaactggctttaactggggagaatatttggaagagacaggagcaagtgctgctccccacacatcattcaaacacgttgaaatcagcattcagagcaacttccagccaggaatgaaattggaagtggctaataagaacaacccggacacgtactgggtggccacgatcattaccacgtgcgggcagctgctgcttctgcgctactgcggttacggggaggaccgcagggccgacttctggtgtgacgtagtcatcgcggatttgcaccccgtggggtggtgcacacagaacaacaaggtgttgatgccgccggacgcaatcaaagagaagtacacagactggacagaatttctcatacgtgacttgactggttcgaggacagcacccgccaacctcctggaaggtcctctgcgagggaaaggccctatagacctcattacagttggttccttaatagaacttcaggattcccagaacccttttcagtactggatagttagtgtgattgaaaatgttggaggaagattacgccttcgctatgtgggattggaggacactgaatcctatgaccagtggttgttttacttggattacagacttcgaccagttggttggtgtcaagagaataaatacagaatggacccaccttcagaaatctatcctttgaagatggcctctgaatggaaatgtactctggaaaaatcccttattgatgctgccaaatttcctcttccaatggaagtgtttaaggatcacgcagatttgcgaagccatttcttcacagttgggatgaagcttgagacagtgaatatgtgcgagcccttttacatctctcctgcgtcggtgactaaggtttttaacaatcacttttttcaagtgactattgangacctaagacctgaaccaagtaaactgtcaatgctgtgccatgcagattctttggggattttgccagtacagtggtgccttaaaaatggagtcagcctcactcctcccaaaggttactctggccaggacttcgactgggcagattatcacaagcagcatggggcgcaggaagcccctcccttctgcttccgaaatacatcattcagtcgaggtttcacaaagaacatgaaacttgaagctgtgaaccccaggaatccaggagaactgtgtgtggcctccgttgtgagtgtgaaggggcggctaatgtggcttcacctggaagggctgcagactcctgttccagaggtcattgttgatgtggaatccatggacatcttcccagtgggctggtgtgaagccaattcttatcctttgactgcaccacacaaaacagtctcacaaaagaagagaaagattgcagtcgtgcaaccagagaaacaattgccgcccacagtgcctgttaagaaaatacctcatgacctttgtttattccctcacctggacaccacaggaaccgtcaacgggaaatactgctgtcctcagctcttcatcaaccacaggtgtttctcaggcccttacctgaacaaaggaaggattgcagagctacctcagtcggtgggaccgggcaaatgcgtgctggttcttaaagaggttcttagcatgataatcaacgcagcctacaagcctggaagggtattaagagaattacagctggtagaagatccccactggaatttccaggaagagacgctgaaggccaaatacagaggcaaaacatacagggctgtggtcaaaatcgtacggacatctgaccaagtcgcaaatttctgccgccgagtctgtgccaagctagagtgctgtccaaatttgtttagtcctgtgctgatatctgaaaactgcccagagaactgctccattcataccaaaaccaaatacacctattactatggaaagagaaagaagatctccaagccccccatcggggaaagcaaccccgacagcggacaccccaaacccgccaggcggaggaagcgacggaaatccattttcgtgcagaagaaacggaggtcttctgccgtggacttcaccgcgggctcgggggaggaaagtgaagaggaggacgctgacgccatggacgatgacaccgccagtgaggagaccggctccgagctccgggatgaccagacggacacctcgtcggcggaggtgccctcggcccggccccggagggccgtcaccctgcggagcggctcagagcccgtgcgccggccacccccagagaggacacgaaggggccgcggggcgccggctgcctcctcagcagaggaaggggagaagtgcccgccgaccaagcccgaggggacagaggacacgaaacaggaggaggaggagagactggttctggagagcaacccgttggagtggacggtcaccgacgtggtgaggttcattaagctgacagactgtgcccccttggccaagatatttcaggagcaggatattgacggccaagcactcctgcttctgacccttccgacggtgcaggagtgcatggagctgaagctggggcctgccatcaagttatgccaccagatcgagagagtcaaagtggctttctacgcccagtacgccaactgagtctgccctcgggaggtggcccattattgctgggatgcggtgttggtaaaggtttccaggactgaaactttgattttccgggatatgttaaatggtacagccactaagtatcaccagaaaaccagaagcccaggatcttctgcctccgccagcctgtgagctgtttccatgttttcaaagcacagcagcagtcgcttctggggagtgccagttaaagtcatgcatcagaccctgccagacgtgggcctgcttcttggctcacccacgttttgcctttctcctgccccaaatcaggcagctcccttggagcagggtttcctcagatgaggactgcattctttgaaaacaaagaatgtcgccaaggaagaaacctcacgccatgctgtagtgtttcctgtaatcacacgagcacatttatatatgcagtttcccatggataggcgtgtgaccctggttgagtggcacntgcggtttcatcttggtggcaactcctttgcaatgcagctggcagcgacatccttataaaaacatgtgctaaagctctgtcctctgttagaggtgccttttaggaatacggggagtgaaggaaggccggcaggcatctccatgcaactagatggtttgtttgtttgtttgtttgtttgttgttcattttgttgtgttttttgagacagggtcttgctctgtcgcccaggttgtaatgcagtggcgcaatctcagctcactgcaacctctctctcccgggttcaagtgattctcctgcctcagcctcccaagtagctgggattacaggcacccaccaccatgcctggctaatttttgtatttttggtagagacagggtttcaccatgttggtcaggctagtcttgaactcccaacctcaagtgatctgcccgcctcggcctcccaacgtgctgggattacaggtgtgagccactacgccccggcccaactggatggtttttgattgaagcctagaacatctgtagagacaaactctacccagtcttttctagaccctcaactatctccagtgttgttgtttaatcgtagccggatcagggagtgagtcttttaggcaaatgttggattatatatcaaaggaaaagcttagtttcagagaggaggaagggaaagagatgtgagggaagcatttcatcaaccagctacgtcccccttagaaggatcactgcagcaggtcaccgagcaggagtccctctgagcgtcccttctgtctcgttctgccctagctggcagcatatgaaccaggcatgatgcagcaggagcagtgaatctggagtcagccacttggcaccctggtttcgctgagaacaaactctgagatcttgggtgacttctcatcactctggacctccattcctgtgaagtgacaggtgtggaccctgagggtgcggtggtgagcacactgtctcctgctggcattcaccccactcatgctggaaaggaagatccagatcgtacaaaaatgagaaaaagaaagaataagaagggtctggtcccagttctgactcggccattcttacagctctttctggctttgagtttgcttgtggaatttcctgggcagttgtgttaaatccgccaggtcacgtgcagacaaagctgtggctgcgagagttggctggcctcttggaccagaagccatctccatatcctcatgagcgattccatatctccactcagaccctgtggactacagtgttccgctgtggtggctgccaagatgccttcttaaacttatgcaaggaaaccaaaccctcccacagttcccaagcagacactggaagcagaggcttctcacccttcctgctttttcaccacaatcaccttgagctcgtcccttggactagagtctccacagttccagtaaaattctgcggtgggctgatgagctgcttgcatttctgtgacatttccagatatgattctcagtgggattttggaaactttgattgctcaagctcacccttcttaacattctgtaatggttacagatgagaatggaaaacacatattttatggatgaggcgttttggtctcccctgcagtcgatttctagaatcaagttttagagttcggctgatgcatctgcctggggacctcagatgggaggagtgtgtcagttgtaccccgacagaaatgtctctgggatctgtggctggcttgccccgggcatctctcctttaagctcaagttttgaactctctgcggttttccacccctgccttctcagccacatgcttttggccttaaacgctcagtcttgtggagttcaactctgtcaaacgattggaaagggcatccatttccagatctttggcattttccccgcgctgactctttgatgatccttcactgtggccttttcaagctcagctgttcctgttgtatttgagacgagggtgagggaatgtggtggccacaaaagaacagggacttgcagcacaaatgtcacttctgtctcccttttcaatggtagcacggaggaggaggtgctgcgttggagggaggggatcctccaggagcctctggagcccatctaggaagctagagtgtgtggcccgccaggagc

SEQ ID NO: 31705 - DNA, 761 bp, Homo sapiens
cgccttgtgtgtgctggatcctgcgcgggtagatccccgagtaattttttctgcaggatgaattaagagaagagacacttgctcatcaggcatggagagcactttgtcagcttccaatatgcaagacccttcatcttcacccttggaaaagtgtctcggctcagctaatggaaatggagaccttgattctgaagaaggctcaagcttggaggaaactggctttaactggggagaatatttggaagagacaggagcaagtgctgctccccacacatcattcaaacacgttgaaatcagcattcagagcaacttccagccaggaatgaaattggaagtggctaataagaacaacccggacacgtactgggtggccacgatcattaccacgtgcgggcagctgctgcttctgcgctactgcggttacggggaggaccgcagggccgacttctggtgtgacgtagtcatcgcggatttgcaccccgtggggtggtgcacacagaacaacaaggtgttgatgccgccggacgcaatcaaagagaagtacacagactggacagaatttctcatacgtgacttgactggttcgaggacagcacccgccaacctcctggaaggtgtatgtattgttgttatacatctaatgtatctctgaagcaccccagttacgtgagctcagacctgacagcacctttgcatatatccttcagcagatgcgtgctttctgcagacactgccatccaaatagcctccttcctcttttg

SEQ ID NO: 31706 - DNA, 525 bp, Homo sapiens
cttcatgctatctaagccatttaagtgactaaaatccttacagagacatttgtaattataaagaattagaaaaacttaatgtgtactctctgctatcaaatttccagttgattgtgaacatgtcttaagattatattaccaatttcccttaaaactacctggaactgaacgaaagcatcttattcccctttacccttcaacatgctttcacctaccttcttcagttgaatactaattataaaatgtaggatttaatttatgtatttctaataatttgattttgtatatacctacatacatatgtacatatatacatgtatgtagagagagaactttcatattctaatttttcccaatagttttttgaggctaattcccatgtcagtacagcctacatttattgtgtacatgtatgtttcaataatttctacttaactgcaataattaatataaatctgaggcataattaagtcaaatcctttaggtgtaacgcatttcctatttagtgcagtgaattttgttata

SEQ ID NO: 31707 - DNA, 642 bp, Homo sapiens
atttcggaacgaggtgaaaatgtatatgaaattcaaattttgttgtccataaatacattttattgaaacacagccacacatcactaacatattgtttatgactgtgtttgtgctacaatggcaacagaaactgtacagcctgcaaagctgaaaatattcacaatgtggctatttagaaaaaaagtttgctgaaccctgctccattatctacttttttgtccatattatttatacaataaccttactgaaaaacttgtccagagctgagaaatcagcatagatgtcttcccagaaaagctctctctggaaacctctcccagtgacatccattgtatcatccagctttacttattttgcaatttagttatcaattttcctctctacttgtttattgcctaccttcttttatattatgtgatcctgagggtaggagataagttagctattgcattttcttttcctttacccttgataaatggtgagcttcacaaatcatttgctgaataaatgaatcaaggaagtgatgaagtaacaacattctaactgacggctttgtttctctgctaggctttcctggggtttgatgtatgctggcttcatccttatcatggccactttaatggctcttattgtaaaatctgc

SEQ ID NO: 31708 - DNA, 475 bp, Homo sapiens
aagcactgaggactctgattcatcatgtcaagcggtcaattagaatccgggaaagcctctctctggcctcaccttacttcctgtaccaggagagatgctcatcaatagtgagaaagagttgatgggattagagtctggaagtgacaacctctcctgaacctgaactcattgatttcttcgttttacaaaacagtgttcttgaaaaaaataaacaaaaaaaggaaataatacaactaagaactccaaggtctaaattttaaccagctgtatctcataacaacagaagctgcaatggccaacatacgtcatttataaaacgccaacttatgtggatggggattgggatttattggcctaatgcaaagagcatataaaaaatgagtagggaaaagactactgtttgtgtatatatgtaattattacatatattcttaaatgatatttaataaataatcaaatgattaaataatatata

SEQ ID NO: 31709 - DNA, 720 bp, Homo sapiens
gccaggctggtctcgaattcctgacctcaagtgatcctcccaccttggccatctaaagtgctagggttacaggcatgagacaccgtgcccagccaagactatattcttgacattaatgtttcatgtcttgttttcggacctaacttacccccaaaattttcagtaatgcttaaattaacatgtttattctcacttcagctctgttgccaagaagaaccttcagttcatctctaaaagcatttattggatgcttactatatgctgaatgctagagttatgaaaatgaatgacctagtccccacctatcaggaacttaaaaactagtggtgagggattttaaaccaaaacttcaatatagtatagtaaaatgtattatagaggtatgccttgcagttatggaaatcaaggaagagcaccttacctaagttgagggttcaaagaaggcctcttagaagggatgttccctgaacccaagtcttacacagttagcaagaaaaaattgggaagggtatataaacaaaagcagataggtgtgatatttacatggaagtataagcaattctgtgatagagtacaaagtataaaatgaagattggcagatgacattggagatagctatgtgattattatccttataatccatgttaaggaattttactttatcttctaggtcaggagaccatatccagtctactttctaatttgtaaattaaaaaaaaa

SEQ ID NO: 31710 - DNA, 259 bp, Homo sapiens
ttctccatgttgcccaggctggtcttgaactcctgggctccggcaattctcccatctcaacctcccaaagtgctggggattaccagtgtgagccgctgacccagccctctacaaaatacatatttttttaattaggtggtcgcagctgctcacaaggctgaggtgggaggatcagttgagcccagaacttcaaggctacagtcagttatgatcacaccactgcactccagtctggacaacagagtgagacctggtccct

SEQ ID NO: 31711 - DNA, 410 bp, Homo sapiens
caggctgcaaagctggagtgcagtggcctgacctctcagctcactgcaacctctgtatcccctcagcctcctgagtagctaggactacagcacgagccactgccccccgctaatttttttttctttttttatagagacaaggtctcactatgttgcgtaggctggtctcaaactcctgggcgcaagcaattcacccactttgggaggccgaggtgtgcggatcgcttgagctcaggtgtttcagaccagcttgggcaacatggcgaaacgctgtctccacaaaaaaatataaaaaattaactgggcatagtggcacgggtgcggtggggtaagggggggtcgaagctgtagtgagccttgattgtgccactgcattctagcctgggcgacaaagtgagaccctgtattaa

SEQ ID NO: 31712 - DNA, 408 bp, Homo sapiens
aatctcattctcttagctgggcgtgcaacagaccaacagataactcatcctaaacagagaaatgagaaagagtctgtgggtgggcctctgagggccacagaaaaccagacaccccacatgtcggtggattggagaggggcaggccactgccctctccaggaccaagccgggttcttggtccccaccctccctgcactccgcatctcctccccagcagccattctcccctttcccttgtgaacaaaagcctagttttgtgtgggcagcaatatagggtaaataaaaccacctgattctccagccttccttgctgttaggagggactgttggcctagtcctggcccacgagatgagggtggggtctgtggggcagggcttcttgagagccgtcgtttttctaataaaatg

SEQ ID NO: 31713 - DNA, 156 bp, Homo sapiens
agctccttataaaccaagactgaatcttgtgcctgtcattgtgagcgctattctgtaaagggatttttttttctggcataccaaatccagagccataattggacaagtttaattggagtcatttctattcaatacatggatggcaaagtgggtttt

SEQ ID NO: 31714 - DNA, 340 bp, Homo sapiens
ctcaggcatcagatcaccaatgacaaactcaaagtgccagagagcatctacctcaacctgtgcccggcccaacaaagtgaaaagagaaatcagaggttcagaaactcaaggtcaaatagaaagtctctgtaacaaagactagaatctactcttgctattagtttgggattcactcctctgctttctactttctggttatagtataggcattgcaactatggtttacagctctgggtcaaatcaacgaaggttcaagttgtgatgctaatttgtgaccttgaacaagttttttaacctggtatgcacattggtttcctcattagcaaaatcgggatagtaa

SEQ ID NO: 31715 - DNA, 341 bp, Homo sapiens
tccattctttaggcctcttgtaatcatcttttactgtctatcctttggcctcatgctctatcaccaagtctgtcctatttgtttcacatgtttctcatttaactctttcatctgcatttccatcctaattcaggtcttgattccccaggtgtggcttactattcaagcctcctagctgctcctcctcctcctcctcctcctcttcctccccctcctcctcccacccccttttttttgagacagggcctggttctgtcacccaggctggagtgcagtggcatgatggagtgcagtggcatgatcatggcacactgcggcctccacctcctgggctcaagtga

SEQ ID NO: 31716 - DNA, 346 bp, Homo sapiens
gcaccaggtgaactggctgcgtaatccatgtgtctggttgttcattgaatttaagaaacacagtggaggctgggtgcagtggctgacacctataatcccagcaccttgggaggccaaggtgggtggatcacctgaggtcaggagttcaagaccagcctggccaaagtggcaaaaccccgtcgctactaaaaacagaaattagctgggtttggtggcacgtgcctgcagttccagctacttgggaggctgaggcaggagaattgcttgaacctgggaggtggaggttgcagtgagctgagatcacgccactgcaccccagcctggcgacagtgagactccgtctcaa

SEQ ID NO: 31717 - DNA, 503 bp, Homo sapiens
gttacgcaattgccggctctgtcatcttctacagggatgtgaccttacggaaaagtaaggaatctgaagcgtggcagatcactttgaagcttgcccagtttttgcatgttatcatgtaatagtgctaaaactttttgtcctccagctaggcaacataggtatgtaatttagactttgggaatactgtagagctgtgataaaccctgctttaagctacattctgggatcgtaacatgtaatttagaagtcaaaatccacttagaagaaaagaatttttaaagcacggtaaatcagaaccatttttgtgattaatttttattgatctttttaaatttttcataattttatgttctggttctcataagaacaaatacaaataattttaaaccttaaagatgtttaaatctgttaaatattttatttatgtaggatttttattccttaaagtcacatgtggagttttttatttttaacaaggtattagtactattaggtaatactaa

SEQ ID NO: 31718 - DNA, 499 bp, Homo sapiens
agaccacttagaaacaccgcaatcacttctactactcagcagatactgagcagtaggtttcgtgacagagcacctgtcttttgtccagtctgtttactatacattgcgtgctctgggcagtccttatcttcgtgttcaggaacaaagtacacacacccctttccgaaacgaagggcccagggactccgagaagggtgggagccctcacggccaggccacacaatggggagcctctttaccctagtcatcacccacccttgcaggccccactttgccagggtgcgacttctcgggccccttcgcccctcccctgcagcccccaggagcgcagccacagcccggccgggcgccctccctgtctctctctctctttctctctcgagctttcctcctccttcaccgggagccggaaaacccggagcgaaccagcccagcacggcagcgcatgctcagtagcgagcaggttcagttcgctagtaggaagctccagcgctacacc

SEQ ID NO: 31719 - DNA, 1028 bp, Homo sapiens
gagatctttcctcttcacatgtgctcctcctctgatgtgccccaccccagtgcaagggcagcaccttccacccatcacccaagccagagacacagttggcacaatggacttctccctgcctttactccccatctccaagctgtcttcccacacagctcagattcattccaaatggcctatcttttatggaccagtcactcctcacctggtcggtgtagcacgcacggaatttcttggactttggctccgtcttagagcaacccacctctcccctctgcactgctgctggagtcagcttcctagaaccctgatgctatcctctcactttccctagccaggactccctttcccaagccagcctctgccttcctctgccttccttcacgtaggaaatctctatgtgatttccagagattcctggagacaggagaaggtgtgccctgattctgtgggaagcacggaaggaactggtgcaggctgtgtgtgtcacagtgttgggtgacaacgggagcagctcaccagtcttgttctgagcaagaggctgaagattgagggatacattccccatctgtttacctgccagctgtgccttggttcaaggcaaattttatgtagaatataaaatgctattacagaaaaagtgtcataagactttattcaagattttcaatgtcatagtttttggtttcataatgacaaatatattttaaatgttttttaatcaagtgagtcacataataacatatcattaatgtgttatatattttgttatcacatataattacataaacaaattggtcaattgaacaaaataaagaatccagaaatagatttacacatatttggtaaattgatttttgacaaaggtgcgaaggcagttcaatagcaaaataagagtcttttttaacaaatgataccagaataattggatagacatgtgcaaaaaaaattttttttgagaaggagtttagctcttgttgcccaggctgaagttcagtggcgcgattttggctcacggaaacctccgc

SEQ ID NO: 31720 - DNA, 314 bp, Homo sapiens
ataaagtgccgctaaaatcttggtaaaaacaaggactggaccaacaacagccagccaaaaagtggacaggtcattatgatgttttattaactactcattcatctgttaagctggctggagtcaaaccacgcatacatcacatttcggtaaaaatcgcccctccccaacctgacacagcagacaatcaacctggttggacttgtgagccaactggagaactgaagctactgcttaagaaaaatctttttgtactataggattaaatttctgttattctttatcataatgagtaaacttttttgacatctgctaaa

SEQ ID NO: 31721 - DNA, 760 bp, Homo sapiens
tacacatgtggtggctactagttcctggaatagcaaagcaattgctacctccatgccttttcagttgctttagataagacctgttttgcacctgagaaaacagaaagatcagagcagcttttttgtgtgttttgtttacacagtgttgttgtattttcatttgctctagacttcaaggcagatgcaaaagaaaatgaaaaacaacttaggttcagtagagtggtcaagtgatcctactcctttggggaaggatatgccacagactcctggaaggctggagatgttggggctcagaaagcaataccccaaaatagggtgctttgacatgctgaagtgaggcagaagcctcagggtctctctgaccttcctccacacccctcatttctctgtctctcccaaagcacagaatcaagttgttctctggagttccttctatctgccagcccccaaacttttaatgtggaagttacaagagggtaacttccaaagggtaacatccaaaaggttgcaaaataagggaatagaacaaaaaaagaggaagacagaaatgccaaagaaggaaacaatcacttctggtcactcccctgtgttttcattaactgaactcatatcgcgtaaagaaagcctgaattcagtcaacacacctggacagaattttgtcacaaaccattgtctgcccaacagactttgtcccaatccattgtatgttcttcaggcccatcaaattccctaaaaatcatctactacctccctaaaatca

SEQ ID NO: 31722 - DNA, 890 bp, Homo sapiens
caggcgggccatggcggatgtccccggggcacagcgagcggttcctggtgacggcccagagccccgggaccccctggactgttgggcctgcgctgttcttgtaacagcccagaatctgctggtggctgccttcaatcttctcctgctggtgctggtgctagggaccatcttgctacccgctgtcaccatgctgggcttcggcttcctctgccactctcagttcctgcgctcccaggcacccccttgcaccgcgcacctgcgggaccccggtttcacggccctactggtcaccggattcctgctcctcgtgccgctgctcgtgcttgctctggccagctaccgccgcctctgcctgcgcctccgcctagccgattgcctcgtgccctacagccgagccctttatcggcgtcggcgcgccccgcagccgcggcaaatccgggcctcaccagggtcccaggccgttcccacatcaggaaaggtctgggtctaatgaccctcgagtcaagaacaaccctgacggctgccctccctcttattcggcccaaggacttgaagcccggcatcttccgacctgccctgcccccacccctgcctgagcggagtcctagcatccccttgggagcagcagcgtcagtggacccagtgctgagaaaagcccccacatcccggaaaacccactttcctttcacgacccacatctcaatcctgaacatctaggctggaacctgcacacctccccctcagctccgtcgtgaatgggacaacaatctcgtgccctcgttttatggtgcagcttctctagtatttctggggctggggggcggggctggaggggaaggagtgtccacgcatcaataaagatttaacgaactgaacgcgctctgcgaaca

SEQ ID NO: 31723 - DNA, 564 bp, Homo sapiens
caggcgggccatggcggatgtccccggggcacagcgagcggttcctggtgacggcccagagccccgggaccccctggactgttgggcctgcgctgttcttgtaacagcccagaatctgctggtggctgccttcaatcttctcctgctggtgctggtgctagggaccatcttgctacccgctgtcaccatgctgggcttcggcttcctctgccactctcaggacttgaagcccggcatcttccgacctgccctgcccccacccctgcctgagcggagtcctagcatccccttgggagcagcagcgtcagtggacccagtgctgagaaaagcccccacatcccggaaaacccactttcctttcacgacccacatctcaatcctgaacatctaggctggaacctgcacacctccccctcagctccgtcgtgaatgggacaacaatctcgtgccctcgttttatggtgcagcttctctagtatttctggggctggggggcggggctggaggggaaggagtgtccacgcatcaataaagatttaacgaactgaacgcgctctgcgaaca

SEQ ID NO: 31724 - DNA, 410 bp, Homo sapiens
ctaaactcccttctgctggactgggtggctatatcacatctgctggtctggatggctatatcagtcagtgttctccagaaaaacaggactaatgattctctctctgtgtaatttaaggaattggcttactcaatcgtagagtctggctaggcaagtctgaaatctgcagggcaggctggtggaccggaaactcaggctggagctacttctgcagtccgctggcagaattttctgcttcttcctcaaggaaacctcagtttctgctcttaacaccttcgactgactcattaggcccacctaaattattgagggtaatctacttcatttaaaatgcattgattgtagatgttaaccacatccacaaaataccttcacagcaacacctagcatttgattaaacagcctgacac

SEQ ID NO: 31725 - DNA, 376 bp, Homo sapiens
ccccaccccccccaaccacgcacacacccaggcctgtgtgaatatgaaccatcttggaagataaacagagagtgacaagctggggcccctcagccccctccctcagccagccggtcccttccccctgaaagccgaccccctcccccaagcccatctctcttcctgccaagcggctgcctacaggagaggtctgggggcagggcagcgagcccaccagccgcagagcccggccctctgggagcggcccctccaggcccgcccctgcccctgccgtggccagtcttcccgcggggaggaggcaagaggagaggagaccgcagacggtgcaggaccgcagtcctggaaatcgcaaaatcctctagcgagggggcggccg

SEQ ID NO: 31726 - DNA, 2829 bp, Homo sapiens
  misc_feature (2618)..(2618): n is a, c, g, or t
ggagtgtcagtgtgggtcacgtgaggggagcggagagggagggatgggggcggagtccagggcgtgggggggccggtttgttgtggtcgccattttgctggttgcattactgggtaatcggggccctggcttgccgcgtccgccggataccctcagccagtgggcaggtctgagctcgggctccccgagcagtttgagtccccttgcccgctccttcaggtctcagcggcggtggcagccgaggtgcaggatgcaagaaggcgccccccggccgggctcccgctccaggcctcgctcccctgcggccctctgagcccaccatggccgtcccaccgggccatggtcccttctctggcttcccagggccccaggagcacacgcaggtattgcctgatgtgcggctactgcctcggaggctgcccctggccttccgggatgcaacctcagccccgctgcgtaagctctctgtggacctcatcaagacctacaagcacatcaatgaggtatactatgcgaagaagaagcggcgggcccagcaggcgccaccccaggattcgagcaacaagaaggagaagaaggtcctgaaccatggttatgatgacgacaaccatgactacatcgtgcgcagtggcgagcgctggctggagcgctacgaaattgactcgctcattggcaaaggctcctttggccaggtggtgaaagcctatgatcatcagacccaggagcttgtggccatcaagatcatcaagaacaaaaaggctttcctgaaccaggcccagattgagctgcggctgctggagctgatgaaccagcatgacacggagatgaagtactatatagtacacctgaagcggcacttcatgttccggaaccacctgtgcctggtatttgagctgctgtcctacaacctgtacgacctcctgcgcaacacccacttccgcggcgtctcgctgaacctgacccggaagctggcgcagcagctctgcacggcactgctctttctggccacgcctgagctcagcatcattcactgcgacctcaagcccgaaaacatcttgctgtgcaaccccaagcgcagcgccatcaagattgtggacttcggcagctcctgccagcttggccagaggatctaccagtatatccagagccgcttctaccgctcacctgaggtgctcctgggcacaccctacgacctggccattgacatgtggtccctgggctgcatccttgtggagatgcacaccggagagcccctcttcagtggctccaatgaggtcgaccagatgaaccgcattgtggaggtgctgggcatcccaccggccgccatgctggaccaggcgcccaaggctcgcaagtactttgaacggctgcctgggggtggctggaccctacgaaggacgaaagaactcaggaaggattaccagggccccgggacacggcggctgcaggaggtgctgggcgtgcagacgggcgggcccgggggccggcgggcgggggagccgggccacagccccgccgactacctccgcttccaggacctggtgctgcgcatgctggagtatgagcccgccgcccgcatcagccccctgggggctctgcagcacggcttcttccgccgcacggccgacgaggccaccaacacgggcccggcaggcagcagtgcctccacctcgcccgcgcccctcgacacctgcccctcttccagcaccgccagctccatctccagttctggaggctccagtggctcctccagtgacaaccggacctaccgctacagcaaccgatattgtgggggccctgggccccctatcacagactgtgagatgaacagcccccaggtcccaccctcccagccgctgcggccctgggcagggggtgatgtgccccacaagacacatcaagcccctgcctctgcctcgtcactgcctgggaccggggcccagttacccccccagccccgataccttggtcgtcccccatcaccaacctcaccaccacccccggagctgatggatgtgagcctggtgggcggccctgctgactgctccccacctcacccagcgcctgccccccagcacccggctgcctcagccctccggactcggatgactggaggtcgtccacccctcccgcctcctgatgaccctgccactctggggcctcacctgggcctccgtggtgtaccccagagcacagcagccagctcgtgaccctgccccctccctggggcccctcctgaagccataccctcccccatctgggggccctgggctcccatcctcatctctctccttgactggaattgctgctacccagctggggtgggtgaggcctgcactgattggggcctggggcaggggggtcaaggagagggttttggccgctccctccccactaaggactggacccttgggcccctctccccctttttttctatttattgtaccaaagacagtggtggtccggtggagggaagaccccccctcaccccaggaccctaggagggggtgggggcaggtagggggagatggccttgctcctcctcgctgtacccccagtaaagagctttctcacaaaaaaaaaaaaaaaaaaaaagaaaaaaaaaaacaaagaaaaanaagacaaggaagacaaaagcaagacaagcacaaacagccaacaaagcaagacagaggggcgggccaccccaaacaaaacacgccaggggagcgaacccagagttccaccggccccaacgtagttggcaagaaagcaaggtcccgccaaacagaatgcgaaaaataaggacgacaacgaccgagaacaaaaaaaacctgagcggtcgcgaca

SEQ ID NO: 31727 - DNA, 2575 bp, Homo sapiens
ggagtgtcagtgtgggtcacgtgaggggagcggagagggagggatgggggcggagtccagggcgtgggggggccggtttgttgtggtcgccattttgctggttgcattactgggtaatcggggccctggcttgccgcgtccgccggataccctcagccagtgggcaggtctgagctcgggctccccgagcagtttgagtccccttgcccgctccttcaggtctcagcggcggtggcagccgaggtgcaggatgcaagaaggcgccccccggccgggctcccgctccaggcctcgctcccctgcggccctctgagcccaccatggccgtcccaccgggccatggtcccttctctggcttcccagggccccaggagcacacgcaggtattgcctgatgtgcggctactgcctcggaggctgcccctggccttccgggatgcaacctcagccccgctgcgtaagctctctgtggacctcatcaagacctacaagcacatcaatgaggtatactatgcgaagaagaagcggcgggcccagcaggcgccaccccaggattcgagcaacaagaaggagaagaaggtcctgaaccatggttatgatgacgacaaccatgactacatcgtgcgcagtggcgagcgctggctggagcgctacgaaattgactcgctcattggcaaaggctcctttggccaggtggtgaaagcctatgatcatcagacccaggagcttgtggccatcaagatcatcaagaacaaaaaggctttcctgaaccaggcccagattgagctgcggctgctggagctgatgaaccagcatgacacggagatgaagtactatatagtacacctgaagcggcacttcatgttccggaaccacctgtgcctggtatttgagctgctgtcctacaacctgtacgacctcctgcgcaacacccacttccgcggcgtctcgctgaacctgacccggaagctggcgcagcagctctgcacggcactgctctttctggccacgcctgagctcagcatcattcactgcgacctcaagcccgaaaacatcttgctgtgcaaccccaagcgcagcgccatcaagattgtggacttcggcagctcctgccagcttggccagaggatctaccagtatatccagagccgcttctaccgctcacctgaggtgctcctgggcacaccctacgacctggccattgacatgtggtccctgggctgcatccttgtggagatgcacaccggagagcccctcttcagtggctccaatgaggtcgaccagatgaaccgcattgtggaggtgctgggcatcccaccggccgccatgctggaccaggcgcccaaggctcgcaagtactttgaacggctgcctgggggtggctggaccctacgaaggacgaaagaactcaggaaggattaccagggccccgggacacggcggctgcaggaggtgctgggcgtgcagacgggcgggcccgggggccggcgggcgggggagccgggccacagccccgccgactacctccgcttccaggacctggtgctgcgcatgctggagtatgagcccgccgcccgcatcagccccctgggggctctgcagcacggcttcttccgccgcacggccgacgaggccaccaacacgggcccggcaggcagcagtgcctccacctcgcccgcgcccctcgacacctgcccctcttccagcaccgccagctccatctccagttctggaggctccagtggctcctccagtgacaaccggacctaccgctacagcaaccgatattgtgggggccctgggccccctatcacagactgtgagatgaacagcccccaggtcccaccctcccagccgctgcggccctgggcagggggtgatgtgccccacaagacacatcaagcccctgcctctgcctcgtcactgcctgggaccggggcccagttacccccccagccccgataccttggtcgtcccccatcaccaacctcaccaccacccccggagctgatggatgtgagcctggtgggcggccctgctgactgctccccacctcacccagcgcctgccccccagcacccggctgcctcagccctccggactcggatgactggaggtcgtccacccctcccgcctcctgatgaccctgccactctggggcctcacctgggcctccgtggtgtaccccagagcacagcagccagctcgtgaccctgccccctccctggggcccctcctgaagccataccctcccccatctgggggccctgggctcccatcctcatctctctccttgactggaattgctgctacccagctggggtgggtgaggcctgcactgattggggcctggggcaggggggtcaaggagagggttttggccgctccctccccactaaggactggacccttgggcccctctccccctttttttctatttattgtaccaaagacagtggtggtccggtggagggaagaccccccctcaccccaggaccctaggagggggtgggggcaggtagggggagatggccttgctcctcctcgctgtacccccagtaaagagctttctcaca

SEQ ID NO: 31728 - DNA, 2491 bp, Homo sapiens
ggagtgtcagtgtgggtcacgtgaggggagcggagagggagggatgggggcggagtccagggcgtgggggggccggtttgttgtggtcgccattttgctggttgcattactgggtaatcggggccctggcttgccgcgtccgccggataccctcagccagtgggcaggtctgagctcgggctccccgagcagtttgagtccccttgcccgctccttcaggtctcagcggcggtggcagccgaggtgcaggatgcaagaaggcgccccccggccgggctcccgctccaggcctcgctcccctgcggccctctgagcccaccatggccgtcccaccgggccatggtcccttctctggcttcccagggccccaggagcacacgcaggtattgcctgatgtgcggctactgcctcggaggctgcccctggccttccgggatgcaacctcagccccgctgcgtaagctctctgtggacctcatcaagacctacaagcacatcaatgaggtatactatgcgaagaagaagcggcgggcccagcaggcgccaccccaggattcgagcaacaagaaggagaagaaggtcctgaaccatggttatgatgacgacaaccatgactacatcgtgcgcagtggcgagcgctggctggagcgctacgaaattgactcgctcattggcaaaggctcctttggccaggtggtgaaagcctatgatcatcagacccaggagcttgtggccatcaagatcatcaagaacaaaaaggctttcctgaaccaggcccagattgagctgcggctgctggagctgatgaaccagcatgacacggagatgaagtactatatagtacacctgaagcggcacttcatgttccggaaccacctgtgcctggtatttgagctgctgtcctacaacctgtacgacctcctgcgcaacacccacttccgcggcgtctcgctgaacctgacccggaagctggcgcagcagctctgcacggcactgctctttctggccacgcctgagctcagcatcattcactgcgacctcaagcccgaaaacatcttgctgtgcaaccccaagcgcagcgccatcaagattgtggacttcggcagctcctgccagcttggccagaggatctaccagtatatccagagccgcttctaccgctcacctgaggtgctcctgggcacaccctacgacctggccattgacatgtggtccctgggctgcatccttgtggagatgcacaccggagagcccctcttcagtggctccaatgaggtcgaccagatgaaccgcattgtggaggtgctgggcatcccaccggccgccatgctggaccaggcgcccaaggctcgcaagtactttgaacggctgcctgggggtggctggaccctacgaaggacgaaagaactcaggaaggattaccagggccccgggacacggcggctgcaggaggacctggtgctgcgcatgctggagtatgagcccgccgcccgcatcagccccctgggggctctgcagcacggcttcttccgccgcacggccgacgaggccaccaacacgggcccggcaggcagcagtgcctccacctcgcccgcgcccctcgacacctgcccctcttccagcaccgccagctccatctccagttctggaggctccagtggctcctccagtgacaaccggacctaccgctacagcaaccgatattgtgggggccctgggccccctatcacagactgtgagatgaacagcccccaggtcccaccctcccagccgctgcggccctgggcagggggtgatgtgccccacaagacacatcaagcccctgcctctgcctcgtcactgcctgggaccggggcccagttacccccccagccccgataccttggtcgtcccccatcaccaacctcaccaccacccccggagctgatggatgtgagcctggtgggcggccctgctgactgctccccacctcacccagcgcctgccccccagcacccggctgcctcagccctccggactcggatgactggaggtcgtccacccctcccgcctcctgatgaccctgccactctggggcctcacctgggcctccgtggtgtaccccagagcacagcagccagctcgtgaccctgccccctccctggggcccctcctgaagccataccctcccccatctgggggccctgggctcccatcctcatctctctccttgactggaattgctgctacccagctggggtgggtgaggcctgcactgattggggcctggggcaggggggtcaaggagagggttttggccgctccctccccactaaggactggacccttgggcccctctccccctttttttctatttattgtaccaaagacagtggtggtccggtggagggaagaccccccctcaccccaggaccctaggagggggtgggggcaggtagggggagatggccttgctcctcctcgctgtacccccagtaaagagctttctcaca

SEQ ID NO: 31729 - DNA, 2688 bp, Homo sapiens
  misc_feature (2477)..(2477): n is a, c, g, or t
tgctggccgctcgcccaccccactgggggccccaccgcgccccagccccccgtgggccccgcgccagccctgacccgggtctcagcggcggtggcagccgaggtgcaggatgcaagaaggcgccccccggccgggctcccgctccaggcctcgctcccctgcggccctctgagcccaccatggccgtcccaccgggccatggtcccttctctggcttcccagggccccaggagcacacgcaggtattgcctgatgtgcggctactgcctcggaggctgcccctggccttccgggatgcaacctcagccccgctgcgtaagctctctgtggacctcatcaagacctacaagcacatcaatgaggtatactatgcgaagaagaagcggcgggcccagcaggcgccaccccaggattcgagcaacaagaaggagaagaaggtcctgaaccatggttatgatgacgacaaccatgactacatcgtgcgcagtggcgagcgctggctggagcgctacgaaattgactcgctcattggcaaaggctcctttggccaggtggtgaaagcctatgatcatcagacccaggagcttgtggccatcaagatcatcaagaacaaaaaggctttcctgaaccaggcccagattgagctgcggctgctggagctgatgaaccagcatgacacggagatgaagtactatatagtacacctgaagcggcacttcatgttccggaaccacctgtgcctggtatttgagctgctgtcctacaacctgtacgacctcctgcgcaacacccacttccgcggcgtctcgctgaacctgacccggaagctggcgcagcagctctgcacggcactgctctttctggccacgcctgagctcagcatcattcactgcgacctcaagcccgaaaacatcttgctgtgcaaccccaagcgcagcgccatcaagattgtggacttcggcagctcctgccagcttggccagaggatctaccagtatatccagagccgcttctaccgctcacctgaggtgctcctgggcacaccctacgacctggccattgacatgtggtccctgggctgcatccttgtggagatgcacaccggagagcccctcttcagtggctccaatgaggtcgaccagatgaaccgcattgtggaggtgctgggcatcccaccggccgccatgctggaccaggcgcccaaggctcgcaagtactttgaacggctgcctgggggtggctggaccctacgaaggacgaaagaactcaggaaggattaccagggccccgggacacggcggctgcaggaggtgctgggcgtgcagacgggcgggcccgggggccggcgggcgggggagccgggccacagccccgccgactacctccgcttccaggacctggtgctgcgcatgctggagtatgagcccgccgcccgcatcagccccctgggggctctgcagcacggcttcttccgccgcacggccgacgaggccaccaacacgggcccggcaggcagcagtgcctccacctcgcccgcgcccctcgacacctgcccctcttccagcaccgccagctccatctccagttctggaggctccagtggctcctccagtgacaaccggacctaccgctacagcaaccgatattgtgggggccctgggccccctatcacagactgtgagatgaacagcccccaggtcccaccctcccagccgctgcggccctgggcagggggtgatgtgccccacaagacacatcaagcccctgcctctgcctcgtcactgcctgggaccggggcccagttacccccccagccccgataccttggtcgtcccccatcaccaacctcaccaccacccccggagctgatggatgtgagcctggtgggcggccctgctgactgctccccacctcacccagcgcctgccccccagcacccggctgcctcagccctccggactcggatgactggaggtcgtccacccctcccgcctcctgatgaccctgccactctggggcctcacctgggcctccgtggtgtaccccagagcacagcagccagctcgtgaccctgccccctccctggggcccctcctgaagccataccctcccccatctgggggccctgggctcccatcctcatctctctccttgactggaattgctgctacccagctggggtgggtgaggcctgcactgattggggcctggggcaggggggtcaaggagagggttttggccgctccctccccactaaggactggacccttgggcccctctccccctttttttctatttattgtaccaaagacagtggtggtccggtggagggaagaccccccctcaccccaggaccctaggagggggtgggggcaggtagggggagatggccttgctcctcctcgctgtacccccagtaaagagctttctcacaaaaaaaaaaaaaaaaaaaaagaaaaaaaaaaacaaagaaaaanaagacaaggaagacaaaagcaagacaagcacaaacagccaacaaagcaagacagaggggcgggccaccccaaacaaaacacgccaggggagcgaacccagagttccaccggccccaacgtagttggcaagaaagcaaggtcccgccaaacagaatgcgaaaaataaggacgacaacgaccgagaacaaaaaaaacctgagcggtcgcgaca

SEQ ID NO: 31730 - DNA, 2253 bp, Homo sapiens
  misc_feature (2042)..(2042): n is a, c, g, or t
cagctgcgaagtatgcatagtgttcttggtgggtctccttgcctggagggagaagaatggtgcctggctctgccctgctcccacccctttcttcgtgacatgccctgccccaacaggtggtgaaagcctatgatcatcagacccaggagcttgtggccatcaagatcatcaagaacaaaaaggctttcctgaaccaggcccagattgagctgcggctgctggagctgatgaaccagcatgacacggagatgaagtactatatagtacacctgaagcggcacttcatgttccggaaccacctgtgcctggtatttgagctgctgtcctacaacctgtacgacctcctgcgcaacacccacttccgcggcgtctcgctgaacctgacccggaagctggcgcagcagctctgcacggcactgctctttctggccacgcctgagctcagcatcattcactgcgacctcaagcccgaaaacatcttgctgtgcaaccccaagcgcagcgccatcaagattgtggacttcggcagctcctgccagcttggccagaggatctaccagtatatccagagccgcttctaccgctcacctgaggtgctcctgggcacaccctacgacctggccattgacatgtggtccctgggctgcatccttgtggagatgcacaccggagagcccctcttcagtggctccaatgaggtcgaccagatgaaccgcattgtggaggtgctgggcatcccaccggccgccatgctggaccaggcgcccaaggctcgcaagtactttgaacggctgcctgggggtggctggaccctacgaaggacgaaagaactcaggaaggattaccagggccccgggacacggcggctgcaggaggtgctgggcgtgcagacgggcgggcccgggggccggcgggcgggggagccgggccacagccccgccgactacctccgcttccaggacctggtgctgcgcatgctggagtatgagcccgccgcccgcatcagccccctgggggctctgcagcacggcttcttccgccgcacggccgacgaggccaccaacacgggcccggcaggcagcagtgcctccacctcgcccgcgcccctcgacacctgcccctcttccagcaccgccagctccatctccagttctggaggctccagtggctcctccagtgacaaccggacctaccgctacagcaaccgatattgtgggggccctgggccccctatcacagactgtgagatgaacagcccccaggtcccaccctcccagccgctgcggccctgggcagggggtgatgtgccccacaagacacatcaagcccctgcctctgcctcgtcactgcctgggaccggggcccagttacccccccagccccgataccttggtcgtcccccatcaccaacctcaccaccacccccggagctgatggatgtgagcctggtgggcggccctgctgactgctccccacctcacccagcgcctgccccccagcacccggctgcctcagccctccggactcggatgactggaggtcgtccacccctcccgcctcctgatgaccctgccactctggggcctcacctgggcctccgtggtgtaccccagagcacagcagccagctcgtgaccctgccccctccctggggcccctcctgaagccataccctcccccatctgggggccctgggctcccatcctcatctctctccttgactggaattgctgctacccagctggggtgggtgaggcctgcactgattggggcctggggcaggggggtcaaggagagggttttggccgctccctccccactaaggactggacccttgggcccctctccccctttttttctatttattgtaccaaagacagtggtggtccggtggagggaagaccccccctcaccccaggaccctaggagggggtgggggcaggtagggggagatggccttgctcctcctcgctgtacccccagtaaagagctttctcacaaaaaaaaaaaaaaaaaaaaagaaaaaaaaaaacaaagaaaaanaagacaaggaagacaaaagcaagacaagcacaaacagccaacaaagcaagacagaggggcgggccaccccaaacaaaacacgccaggggagcgaacccagagttccaccggccccaacgtagttggcaagaaagcaaggtcccgccaaacagaatgcgaaaaataaggacgacaacgaccgagaacaaaaaaaacctgagcggtcgcgaca

SEQ ID NO: 31731 - DNA, 2455 bp, Homo sapiens
ggagtgtcagtgtgggtcacgtgaggggagcggagagggagggatgggggcggagtccagggcgtgggggggccggtttgttgtggtcgccattttgctggttgcattactgggtaatcggggccctggcttgccgcgtccgccggataccctcagccagtgggcaggtctgagctcgggctccccgagcagtttgagtccccttgcccgctccttcaggtctcagcggcggtggcagccgaggtgcaggatgcaagaaggcgccccccggccgggctcccgctccaggcctcgctcccctgcggccctctgagcccaccatggccgtcccaccgggccatggtcccttctctggcttcccagggccccaggagcacacgcaggtattgcctgatgtgcggctactgcctcggaggctgcccctggccttccgggatgcaacctcagccccgctgcgtaagctctctgtggacctcatcaagacctacaagcacatcaatgaggtatactatgcgaagaagaagcggcgggcccagcaggcgccaccccaggattcgagcaacaagaaggagaagaaggtcctgaaccatggttatgatgacgacaaccatgactacatcgtgcgcagtggcgagcgctggctggagcgctacgaaattgactcgctcattggcaaaggctcctttggccaggtggtgaaagcctatgatcatcagacccaggagcttgtggccatcaagatcatcaagaacaaaaaggctttcctgaaccaggcccagattgagctgcggctgctggagctgatgaaccagcatgacacggagatgaagtactatatagtacacctgaagcggcacttcatgttccggaaccacctgtgcctggtatttgagctgctgtcctacaacctgtacgacctcctgcgcaacacccacttccgcggcgtctcgctgaacctgacccggaagctggcgcagcagctctgcacggcactgctctttctggccacgcctgagctcagcatcattcactgcgacctcaagcccgaaaacatcttgctgtgcaaccccaagcgcagcgccatcaagattgtggacttcggcagctcctgccagcttggccagaggatctaccagtatatccagagccgcttctaccgctcacctgaggtgctcctgggcacaccctacgacctggccattgacatgtggtccctgggctgcatccttgtggagatgcacaccggagagcccctcttcagtggctccaatgaggtcgaccagatgaaccgcattgtggaggtgctgggcatcccaccggccgccatgctggaccaggcgcccaaggctcgcaagtactttgaacggctgcctgggggtggctggaccctacgaaggacgaaagaactcaggaaggacctggtgctgcgcatgctggagtatgagcccgccgcccgcatcagccccctgggggctctgcagcacggcttcttccgccgcacggccgacgaggccaccaacacgggcccggcaggcagcagtgcctccacctcgcccgcgcccctcgacacctgcccctcttccagcaccgccagctccatctccagttctggaggctccagtggctcctccagtgacaaccggacctaccgctacagcaaccgatattgtgggggccctgggccccctatcacagactgtgagatgaacagcccccaggtcccaccctcccagccgctgcggccctgggcagggggtgatgtgccccacaagacacatcaagcccctgcctctgcctcgtcactgcctgggaccggggcccagttacccccccagccccgataccttggtcgtcccccatcaccaacctcaccaccacccccggagctgatggatgtgagcctggtgggcggccctgctgactgctccccacctcacccagcgcctgccccccagcacccggctgcctcagccctccggactcggatgactggaggtcgtccacccctcccgcctcctgatgaccctgccactctggggcctcacctgggcctccgtggtgtaccccagagcacagcagccagctcgtgaccctgccccctccctggggcccctcctgaagccataccctcccccatctgggggccctgggctcccatcctcatctctctccttgactggaattgctgctacccagctggggtgggtgaggcctgcactgattggggcctggggcaggggggtcaaggagagggttttggccgctccctccccactaaggactggacccttgggcccctctccccctttttttctatttattgtaccaaagacagtggtggtccggtggagggaagaccccccctcaccccaggaccctaggagggggtgggggcaggtagggggagatggccttgctcctcctcgctgtacccccagtaaagagctttctcaca

SEQ ID NO: 31732 - DNA, 2648 bp, Homo sapiens
  misc_feature (2437)..(2437): n is a, c, g, or t
cgccttccggtctcagcaggcccaggagggcctcctgggtctcagcggcggtggcagccgaggtgcaggatgcaagaaggcgccccccggccgggctcccgctccaggcctcgctcccctgcggccctctgagcccaccatggccgtcccaccgggccatggtcccttctctggcttcccagggccccaggagcacacgcaggtattgcctgatgtgcggctactgcctcggaggctgcccctggccttccgggatgcaacctcagccccgctgcgtaagctctctgtggacctcatcaagacctacaagcacatcaatgaggtatactatgcgaagaagaagcggcgggcccagcaggcgccaccccaggattcgagcaacaagaaggagaagaaggtcctgaaccatggttatgatgacgacaaccatgactacatcgtgcgcagtggcgagcgctggctggagcgctacgaaattgactcgctcattggcaaaggctcctttggccaggtggtgaaagcctatgatcatcagacccaggagcttgtggccatcaagatcatcaagaacaaaaaggctttcctgaaccaggcccagattgagctgcggctgctggagctgatgaaccagcatgacacggagatgaagtactatatagtacacctgaagcggcacttcatgttccggaaccacctgtgcctggtatttgagctgctgtcctacaacctgtacgacctcctgcgcaacacccacttccgcggcgtctcgctgaacctgacccggaagctggcgcagcagctctgcacggcactgctctttctggccacgcctgagctcagcatcattcactgcgacctcaagcccgaaaacatcttgctgtgcaaccccaagcgcagcgccatcaagattgtggacttcggcagctcctgccagcttggccagaggatctaccagtatatccagagccgcttctaccgctcacctgaggtgctcctgggcacaccctacgacctggccattgacatgtggtccctgggctgcatccttgtggagatgcacaccggagagcccctcttcagtggctccaatgaggtcgaccagatgaaccgcattgtggaggtgctgggcatcccaccggccgccatgctggaccaggcgcccaaggctcgcaagtactttgaacggctgcctgggggtggctggaccctacgaaggacgaaagaactcaggaaggattaccagggccccgggacacggcggctgcaggaggtgctgggcgtgcagacgggcgggcccgggggccggcgggcgggggagccgggccacagccccgccgactacctccgcttccaggacctggtgctgcgcatgctggagtatgagcccgccgcccgcatcagccccctgggggctctgcagcacggcttcttccgccgcacggccgacgaggccaccaacacgggcccggcaggcagcagtgcctccacctcgcccgcgcccctcgacacctgcccctcttccagcaccgccagctccatctccagttctggaggctccagtggctcctccagtgacaaccggacctaccgctacagcaaccgatattgtgggggccctgggccccctatcacagactgtgagatgaacagcccccaggtcccaccctcccagccgctgcggccctgggcagggggtgatgtgccccacaagacacatcaagcccctgcctctgcctcgtcactgcctgggaccggggcccagttacccccccagccccgataccttggtcgtcccccatcaccaacctcaccaccacccccggagctgatggatgtgagcctggtgggcggccctgctgactgctccccacctcacccagcgcctgccccccagcacccggctgcctcagccctccggactcggatgactggaggtcgtccacccctcccgcctcctgatgaccctgccactctggggcctcacctgggcctccgtggtgtaccccagagcacagcagccagctcgtgaccctgccccctccctggggcccctcctgaagccataccctcccccatctgggggccctgggctcccatcctcatctctctccttgactggaattgctgctacccagctggggtgggtgaggcctgcactgattggggcctggggcaggggggtcaaggagagggttttggccgctccctccccactaaggactggacccttgggcccctctccccctttttttctatttattgtaccaaagacagtggtggtccggtggagggaagaccccccctcaccccaggaccctaggagggggtgggggcaggtagggggagatggccttgctcctcctcgctgtacccccagtaaagagctttctcacaaaaaaaaaaaaaaaaaaaaagaaaaaaaaaaacaaagaaaaanaagacaaggaagacaaaagcaagacaagcacaaacagccaacaaagcaagacagaggggcgggccaccccaaacaaaacacgccaggggagcgaacccagagttccaccggccccaacgtagttggcaagaaagcaaggtcccgccaaacagaatgcgaaaaataaggacgacaacgaccgagaacaaaaaaaacctgagcggtcgcgaca

SEQ ID NO: 31733 - DNA, 2404 bp, Homo sapiens
ggagtgtcagtgtgggtcacgtgaggggagcggagagggagggatgggggcggagtccagggcgtgggggggccggtttgttgtggtcgccattttgctggttgcattactgggtaatcggggccctggcttgccgcgtccgccggataccctcagccagtgggcaggtctgagctcgggctccccgagcagtttgagtccccttgcccgctccttcaggtctcagcggcggtggcagccgaggtgcaggatgcaagaaggcgccccccggccgggctcccgctccaggcctcgctcccctgcggccctctgagcccaccatggccgtcccaccgggccatggtcccttctctggcttcccagggccccaggagcacacgcaggtattgcctgatgtgcggctactgcctcggaggctgcccctggccttccgggatgcaacctcagccccgctgcgtaagctctctgtggacctcatcaagacctacaagcacatcaatgaggtatactatgcgaagaagaagcggcgggcccagcaggcgccaccccaggattcgagcaacaagaaggagaagaaggtcctgaaccatggttatgatgacgacaaccatgactacatcgtgcgcagtggcgagcgctggctggagcgctacgaaattgactcgctcattggcaaaggctcctttggccaggtggtgaaagcctatgatcatcagacccaggagcttgtggccatcaagatcatcaagaacaaaaaggctttcctgaaccaggcccagattgagctgcggctgctggagctgatgaaccagcatgacacggagatgaagtactatatagtacacctgaagcggcacttcatgttccggaaccacctgtgcctggtatttgagctgctgtcctacaacctgtacgacctcctgcgcaacacccacttccgcggcgtctcgctgaacctgacccggaagctggcgcagcagctctgcacggcactgctctttctggccacgcctgagctcagcatcattcactgcgacctcaagcccgaaaacatcttgctgtgcaaccccaagcgcagcgccatcaagattgtggacttcggcagctcctgccagcttggccagaggatctaccagtatatccagagccgcttctaccgctcacctgaggtgctcctgggcacaccctacgacctggccattgacatgtggtccctgggctgcatccttgtggagatgcacaccggagagcccctcttcagtggctccaatgaggtcgaccagatgaaccgcattgtggaggtgctgggcatcccaccggccgccatgctggaccaggcgcccaaggctcgcaagtactttgaacggctgcctgggggtggctggaccctacgaaggacgaaagaactcaggaaggattaccagggccccgggacacggcggctgcaggaggtgctgggcgtgcagacgggcgggcccgggggccggcgggcgggggagccgggccacagccccgccgactacctccgcttccaggacctggtgctgcgcatgctggagtatgagcccgccgcccgcatcagccccctgggggctctgcagcacggcttcttccgccgcacggccgacgaggccaccaacacgggcccggcaggcagcagtgcctccacctcgcccgcgcccctcgacacctgcccctcttccagcaccgccagctccatctccagttctggaggctccagtggctcctccagtgacaaccggacctaccgctacagcaaccgatattgtgggggccctgggccccctatcacagactgtgagatgaacagcccccaggtcccaccctcccagccgctgcggccctgggcagggggtgatgtgccccacaagacacatcaagcccctgcctctgcctcgtcactgcctgggaccggggcccagttacccccccagccccgataccttggtcgtcccccatcaccaacctcaccaccacccccggagctgatggatgtgagcctggtgggcggccctgctgactgctccccacctcacccagcgcctgccccccagcacccggctgcctcagccctccggactcggatgactggaggtcgtccacccctcccgcctcctgatgaccctgccactctggggcctcacctgggcctccgtggtgtaccccagagcacagcagccagctcgtgaccctgccccctccctggggcccctcctgaagccatactctccccctttttttctatttattgtaccaaagacagtggtggtccggtggagggaagaccccccctcaccccaggaccctaggagggggtgggggcaggtagggggagatggccttgctcctcctcgctgtacccccagtaaagagctttctcaca

SEQ ID NO: 31734 - DNA, 4635 bp, Homo sapiens
gatgtggagacctaataataacctcagcaaagagaaaactgaatggcatgtggagaaaagcagcggaaagttacaggctgctatggcatctgtcattgtgcgtccatcttctagtacaaaaactgatagtatgccagcaatgcagttagcttctaaagatcgagttagtgaaagatcttcagctggggcacataaaacagattgcctcaaactagcagaagccggagaaactggaagaatcattttgccaaatgtgaattcagacagtgttcacacaaaatctgaaaaaaactttcaggctgtctcacagggcagtgttcccagttcagtcatgtctgctgtaaatacgatgtgtaataccaaaacggatgtaatcacatctgctgccgatactaccagtgtttccagctggggtggttcagaagtaatttcctctttatcaaataccattttggcctctacatcatcagaatgtgtatcttcaaaaagtgtcagtcagccagtggctcaaaaacaagaatgcaaggtcagcaccacagcaccagttacattagccagtagtaagacaggaagtgttgttcaacccagttctgggttctcaggcacaactgattttatccatttaaaaaagcacaaggcagcattggctgcagctcagtataaaagtagtaatgccagtgagactgaacctaatgctataaaaaatcagacactttcagcctcccttcctctggatagcactgtaatctgtagtacaattaacaaagcaaactctgtaggaaatgggcaagcttcccagacaagtcaaccaaactaccatactaaactgaaaaaggcctggctcaccagacactcagaagaagataaaaatactaataaaatggaaaattcagggaattctgtatcagaaattattaagccatgttctgtcaacttaatagcctctacatctagtgatatacaaaatagtgtagatagtaagatcatagttgataaatatgtaaaagatgataaagtcaacaggagaaaagccaaaagaacttatgaatctggctctgaaagtggagactcagatgaaagtgaaagcaagtcagagcaaaggactaaaagacaacctaagccaacttacaaaaagaagcaaaatgatttgcaaaagagaaaaggtgaaatagaagaagatttgaaacccaatggagttctcagcaggagtgccaaagaaagaagtaaactgaagttgcaaagcaacagtaatactggcattcctcgttcagtattgaaagattggcgtaaagtcaagaagctgaagcaaactggggaatcctttttacaggatgactcctgctgtgagatagggcctaatttacaaaagtgtcgagaatgtagacttattcgcagtaaaaaaggagaagaaccagctcactcaccagtattttgtagattttactactttagacggttgtcatttagtaaaaacggagtagttagaatagatggtttctcttctcctgaccaatatgatgatgaagctatgagtttgtggacacatgaaaattttgaagatgatgaactagatatagagacttctaaatatatcttggatataataggtgataagttctgtcaattagtaacatctgaaaaaacagctttgtcctgggtgaaaaaggatgccaaaattgcctggaaaagagcagtgagaggagtccgggagatgtgtgatgcatgtgaagcaacattgtttaacattcactgggtctgccaaaaatgtggatttgtggtctgcttagattgttacaaggcaaaggaaaggaagagttctagagataaagaactatatgcttggatgaagtgtgtgaagggacagcctcatgatcacaaacatttaatgccaacccaaattatacctggttctgttttgacagatcttctagatgccatgcacactcttagggaaaaatatggtattaaatcccattgtcattgtactaacaaacagaatttacaagttggaaattttcctacaatgaatggtgtatctcaagttttacagaatgttcttaatcacagtaataaaatttctctgtgcatgcctgagtctcagcagcaaaatactcctccgaagtctgagaaaaatggtggcagcagcccagagagtgatgtaggcacagataacaagttaactcctccagaatcccagtcaccactgcactggttagcagatcttgcagagcaaaaagccagagaggaaaaaaaagaaaacaaagaacttacccttgaaaaccaaattaaagaagaaagagaacaagacaactctgaatctccaaatggcagaacatcacctcttgtgtcccagaataatgaacaaggctcaaccttacgggatttgctgactacaacagctggaaagctacgtgtggggtctacagatgctggcattgcctttgccccagtatattcaatgggagccccaagtagcaaaagtggacggactatgcctaacattcttgatgacataattgcttcagttgttgaaaacaaaattccaccaagtaaaacctccaagataaatgtaaaaccagagcttaaagaagagcctgaagaaagcataatatctgcagtggaaaataataaattatacagtgatataccacattcttggatctgtgagaagcatattttatggcttaaggattataagaatagcagtaattggaagcttttcaaagaatgttggaaacaaggacagcctgcagtggtttctggtgtgcataagaaaatgaacattagcctatggaaggcggaatcaattagtcttgattttggagaccaccaagctgatctcctgaactgcaaagatagcatcatttcaaatgccaatgttaaggaattctgggatggttttgaagaagtttcaaaacggcagaaaaacaagagtggagaaacagttgttttaaaattgaaagactggccttcaggagaagacttcaagactatgatgccagcaagatacgaagatcttttaaaaagtctgccattgccagaatattgtaatccagaaggaaaattcaatttggcctctcatttgccaggattttttgtacgtcctgatctaggacccaggttgtgcagtgcctatggtgtagttgctgctaaagatcatgatataggaacaacaaatctccatattgaagtttctgatgttgtaaatatactagtttatgttggcatagcaaaaggaaatggcattctctcaaaagcaggaattctcaagaaatttgaggaagaagattggatgacattttaaggaaaagattgaaggactcaagtgaaatacctggtgctctgtggcatatttatgctgggaaagatgttgacaagataagggaatttcttcaaaagatttcaaaagaacaaggccttgaagttctaccagaacatgatccaatacgtgaccaaagttggtatgtgaacaaaaagctccgtcaaaggctgcttgaagaatatggagtcagaacctgtactcttattcagttccttggtgatgctattgttttgccagcgggagcacttcatcaggttcagaattttcacagctgtattcaggtaactgaagattttgtgtctccagaacatcttgtagagtcatttcatttaacacaggaactgagacttttgaaggaagaaatcaattatgatgataaactacaggttaaaaatattttgtatcatgcagtcaaagaaatggtgagagccttgaagatacacgaggatgaagtagaggatatggaagaaaattaagtgtgatccagtttgatatttttaggttgttgaactgggattacttaaccttgaatgatgatatgtatgcacactgactttaagcttcataaaaccatcagtgccaagaaattctctttgtagtaattacttgttactgacaccacagcagtatagcatatgtcacagctcctgtgattcaatgttataaaacaagcagaattttaaaagcagcactatatagctgttttgtattatagtgtatatgatgtttgtgaaaatgccagatttaaaatgatgtatttatttttggtaaaaaataaaaaattctatgctatattgttgatcaagtgtaaatgtgaccttgtacagtttactaaaattactgatatttttcactacattgagacagttactgtgagaataggacacaaacaccagctattgcctgcatctgggaaattgctgaatcgcacagcagtcatgtcataatcagaaaattactgccaaataattgtaaaatttgtaaagtataaagtatataaagtagatactaaatacagacacttcaatattttgttgaagctattgactgtacaattaaacattttcaaaaggtgtaatttatttaaaattgtctcattttggtaaaatttatgtgaacttttaaagctaaatattaaacttaatatgctatgtaaatatatacatatatacatttaatgatgtatttttttaaaacattggcttgcttttgttaaagtgcaagtgttacatatggctttgtacattaaagttgaaaggggttttacattttccattaaaaggactttatcaaaaattgcacaaattccagag

SEQ ID NO: 31735 - DNA, 1315 bp, Homo sapiens
  misc_feature (10)..(10): n is a, c, g, or t
caataaaatngaaatttaactgaacaggatttaccatttccttacttaaatggagtgtctattttaattcatatttcagatttcaaaagaacaaggccttgaagttctaccagaacatgatccaatacgtgaccaaagttggtatgtgaacaaaaagctccgtcaaaggctgcttgaagaatatggagtcagaacctgtactcttattcagttccttggtgatgctattgttttgccagcgggagcacttcatcaggttcagaattttcacagctgtattcaggtaactgaagattttgtgtctccagaacatcttgtagagtcatttcatttaacacaggaactgagacttttgaaggaagaaatcaattatgatgataaactacaggttaaaaatattttgtatcatgcagtcaaagaaatggtgagagccttgaagatacacgaggatgaagtagaggatatggaagaaaattaagtgtgatccagtttgatatttttaggttgttgaactgggattacttaaccttgaatgatgatatgtatgcacactgactttaagcttcataaaaccatcagtgccaagaaattctctttgtagtaattacttgttactgacaccacagcagtatagcatatgtcacagctcctgtgattcaatgttataaaacaagcagaattttaaaagcagcactatatagctgttttgtattatagtgtatatgatgtttgtgaaaatgccagatttaaaatgatgtatttatttttggtaaaaaataaaaaattctatgctatattgttgatcaagtgtaaatgtgaccttgtacagtttactaaaattactgatatttttcactacattgagacagttactgtgagaataggacacaaacaccagctattgcctgcatctgggaaattgctgaatcgcacagcagtcatgtcataatcagaaaattactgccaaataattgtaaaatttgtaaagtataaagtatataaagtagatactaaatacagacacttcaatattttgttgaagctattgactgtacaattaaacattttcaaaaggtgtaatttatttaaaattgtctcattttggtaaaatttatgtgaacttttaaagctaaatattaaacttaatatgctatgtaaatatatacatatatacatttaatgatgtatttttttaaaacattggcttgcttttgttaaagtgcaagtgttacatatggctttgtacattaaagttgaaaggggttttacattttccattaaaaggactttatcaaaaattgcacaaattccagag

SEQ ID NO: 31736 - DNA, 1388 bp, Homo sapiens
gtatttcacggtttttcttttggggataggttcagaattttcacagctgtattcaggtaactgaagattttgtgtctccagaacatcttgtagagtcatttcatttaacacaggaactgagacttttgaaggaagaaatcaattatgatgataaactacaggtaagagttgggtgttctaggtcctgttcttcaggctttttatattcagaaatatgatacatgtataacagcttaggcagtcattgcctagttggtcacattagggtgacaaccaaagattaacaccaacatgtatttaattgtatgatttatagtgtcccttttggcttaacactttcaaacatttttcttatatttggctttcctagttccctattatttttttaaatctggaagttgtcattttttaattaatttctgtcgaactgaagtgattagaaatatcaacatctctttcaggttaaaaatattttgtatcatgcagtcaaagaaatggtgagagccttgaagatacacgaggatgaagtagaggatatggaagaaaattaagtgtgatccagtttgatatttttaggttgttgaactgggattacttaaccttgaatgatgatatgtatgcacactgactttaagcttcataaaaccatcagtgccaagaaattctctttgtagtaattacttgttactgacaccacagcagtatagcatatgtcacagctcctgtgattcaatgttataaaacaagcagaattttaaaagcagcactatatagctgttttgtattatagtgtatatgatgtttgtgaaaatgccagatttaaaatgatgtatttatttttggtaaaaaataaaaaattctatgctatattgttgatcaagtgtaaatgtgaccttgtacagtttactaaaattactgatatttttcactacattgagacagttactgtgagaataggacacaaacaccagctattgcctgcatctgggaaattgctgaatcgcacagcagtcatgtcataatcagaaaattactgccaaataattgtaaaatttgtaaagtataaagtatataaagtagatactaaatacagacacttcaatattttgttgaagctattgactgtacaattaaacattttcaaaaggtgtaatttatttaaaattgtctcattttggtaaaatttatgtgaacttttaaagctaaatattaaacttaatatgctatgtaaatatatacatatatacatttaatgatgtatttttttaaaacattggcttgcttttgttaaagtgcaagtgttacatatggctttgtacattaaagttgaaaggggttttacattttccattaaaaggactttatcaaaaattgcacaaattccagag

SEQ ID NO: 31737 - DNA, 4663 bp, Homo sapiens
gatgtggagacctaataataacctcagcaaagagaaaactgaatggcatgtggagaaaagcagcggaaagttacaggctgctatggcatctgtcattgtgcgtccatcttctagtacaaaaactgatagtatgccagcaatgcagttagcttctaaagatcgagttagtgaaagatcttcagctggggcacataaaacagattgcctcaaactagcagaagccggagaaactggaagaatcattttgccaaatgtgaattcagacagtgttcacacaaaatctgaaaaaaactttcaggctgtctcacagggcagtgttcccagttcagtcatgtctgctgtaaatacgatgtgtaataccaaaacggatgtaatcacatctgctgccgatactaccagtgtttccagctggggtggttcagaagtaatttcctctttatcaaataccattttggcctctacatcatcagaatgtgtatcttcaaaaagtgtcagtcagccagtggctcaaaaacaagaatgcaaggtcagcaccacagcaccagttacattagccagtagtaagacaggaagtgttgttcaacccagttctgggttctcaggcacaactgattttatccatttaaaaaagcacaaggcagcattggctgcagctcagtataaaagtagtaatgccagtgagactgaacctaatgctataaaaaatcagacactttcagcctcccttcctctggatagcactgtaatctgtagtacaattaacaaagcaaactctgtaggaaatgggcaagcttcccagacaagtcaaccaaactaccatactaaactgaaaaaggcctggctcaccagacactcagaagaagataaaaatactaataaaatggaaaattcagggaattctgtatcagaaattattaagccatgttctgtcaacttaatagcctctacatctagtgatatacaaaatagtgtagatagtaagatcatagttgataaatatgtaaaagatgataaagtcaacaggagaaaagccaaaagaacttatgaatctggctctgaaagtggagactcagatgaaagtgaaagcaagtcagagcaaaggactaaaagacaacctaagccaacttacaaaaagaagcaaaatgatttgcaaaagagaaaaggtgaaatagaagaagatttgaaacccaatggagttctcagcaggagtgccaaagaaagaagtaaactgaagttgcaaagcaacagtaatactggcattcctcgttcagtattgaaagattggcgtaaagtcaagaagctgaagcaaactggggaatcctttttacaggatgactcctgctgtgagatagggcctaatttacaaaagtgtcgagaatgtagacttattcgcagtaaaaaaggagaagaaccagctcactcaccagtattttgtagattttactactttagacggttgtcatttagtaaaaacggagtagttagaatagatggtttctcttctcctgaccaatatgatgatgaagctatgagtttgtggacacatgaaaattttgaagatgatgaactagatatagagacttctaaatatatcttggatataataggtgataagttctgtcaattagtaacatctgaaaaaacagctttgtcctgggtgaaaaaggatgccaaaattgcctggaaaagagcagtgagaggagtccgggagatgtgtgatgcatgtgaagcaacattgtttaacattcactgggtctgccaaaaatgtggatttgtggtctgcttagattgttacaaggcaaaggaaaggaagagttctagagataaagaactatatgcttggatgaagtgtgtgaagggacagcctcatgatcacaaacatttaatgccaacccaaattatacctggttctgttttgacagatcttctagatgccatgcacactcttagggaaaaatatggtattaaatcccattgtcattgtactaacaaacagaatttacaagttggaaattttcctacaatgaatggtgtatctcaagttttacagaatgttcttaatcacagtaataaaatttctctgtgcatgcctgagtctcagcagcaaaatactcctccgaagtctgagaaaaatggtggcagcagcccagagagtgatgtaggcacagataacaagttaactcctccagaatcccagtcaccactgcactggttagcagatcttgcagagcaaaaagccagagaggaaaaaaaagaaaacaaagaacttacccttgaaaaccaaattaaagaagaaagagaacaagacaactctgaatctccaaatggcagaacatcacctcttgtgtcccagaataatgaacaaggctcaaccttacgggatttgctgactacaacagctggaaagctacgtgtggggtctacagatgctggcattgcctttgccccagtatattcaatgggagccccaagtagcaaaagtggacggactatgcctaacattcttgatgacataattgcttcagttgttgaaaacaaaattccaccaagtaaaacctccaagataaatgtaaaaccagagcttaaagaagagcctgaagaaagcataatatctgcagtggaaaataataaattatacagtgatataccacattcttggatctgtgagaagcatattttatggcttaaggattataagaatagcagtaattggaagcttttcaaagaatgttggaaacaaggacagcctgcagtggtttctggtgtgcataagaaaatgaacattagcctatggaaggcggaatcaattagtcttgattttggagaccaccaagctgatctcctgaactgcaaagatagcatcatttcaaatgccaatgttaaggaattctgggatggttttgaagaagtttcaaaacggcagaaaaacaagagtggagaaacagttgttttaaaattgaaagactggccttcaggagaagacttcaagactatgatgccagcaagatacgaagatcttttaaaaagtctgccattgccagaatattgtaatccagaaggaaaattcaatttggcctctcatttgccaggattttttgtacgtcctgatctaggacccaggttgtgcagtgcctatggtgtagttgctgctaaagatcatgatataggaacaacaaatctccatattgaagtttctgatgttgtaaatatactagtttatgttggcatagcaaaaggaaatggcattctctcaaaagcaggaattctcaagaaatttgaggaagaagattggatgacattttaaggaaaagattgaaggactcaagtgaaatacctggtgctctgtggcatatttatgctgggaaagatgttgacaagataagggaatttcttcaaaagatttcaaaagaacaaggccttgaagttctaccagaacatgatccaatacgtgaccaaagttggtatgtgaacaaaaagctccgtcaaaggctgcttgaagaatatggagtcagaacctgtactcttattcagttccttggtgatgctattgttttgccagcgggagcacttcatcaggttcagaattttcacagctgtattcaggtaactgaagattttgtgtctccagaacatcttgtagagtcatttcatttaacacaggaactgagacttttgaaggaagaaatcaattatgatgataaactacagtgattagaaatatcaacatctctttcaggttaaaaatattttgtatcatgcagtcaaagaaatggtgagagccttgaagatacacgaggatgaagtagaggatatggaagaaaattaagtgtgatccagtttgatatttttaggttgttgaactgggattacttaaccttgaatgatgatatgtatgcacactgactttaagcttcataaaaccatcagtgccaagaaattctctttgtagtaattacttgttactgacaccacagcagtatagcatatgtcacagctcctgtgattcaatgttataaaacaagcagaattttaaaagcagcactatatagctgttttgtattatagtgtatatgatgtttgtgaaaatgccagatttaaaatgatgtatttatttttggtaaaaaataaaaaattctatgctatattgttgatcaagtgtaaatgtgaccttgtacagtttactaaaattactgatatttttcactacattgagacagttactgtgagaataggacacaaacaccagctattgcctgcatctgggaaattgctgaatcgcacagcagtcatgtcataatcagaaaattactgccaaataattgtaaaatttgtaaagtataaagtatataaagtagatactaaatacagacacttcaatattttgttgaagctattgactgtacaattaaacattttcaaaaggtgtaatttatttaaaattgtctcattttggtaaaatttatgtgaacttttaaagctaaatattaaacttaatatgctatgtaaatatatacatatatacatttaatgatgtatttttttaaaacattggcttgcttttgttaaagtgcaagtgttacatatggctttgtacattaaagttgaaaggggttttacattttccattaaaaggactttatcaaaaattgcacaaattccagag

SEQ ID NO: 31738 - DNA, 450 bp, Homo sapiens
atggtctggagaagataactttaagtgatcaagtagttgctgcaataaacattattgtgggaataaagaataaaggcttttgcattgatttgatttctactaagtgtactggaggatacggaagaaggaaaagatgagttcatggctttaaatcctaatccacaacctgggtagggatccaggaaacttctataattgtcctggaaaacacagacacagagaaatatctcctgtagctgcagggttaaaatttctgaaaaccaagcttgaagtctgatcctgtgggcggctgaacttacaaatgcagcattgtggatgcatctcaaaaacatgatggagagcaaaacttccagatacaaaaaggatatacggtctaattgcatttttgaaaagatgaaaaaattaaaactaaccttacaagttttgatggcataactattaaaaaaataa

SEQ ID NO: 31739 - DNA, 264 bp, Homo sapiens
tacccctcatggcacccagtctcattacatagttgtgtccaagaaaaccactgagacctggacacaacctctcttaagagccagtcttgcctcttggctatttaaagtacactgagatatggaaatcttgactgatgaatgcttgattgaattggagaggaattattggattcttgcatggaggacaaggtggccagccacactaggggtagcacaagatgtgttaggaacgtaacttacccatttgttgatttaattgacttt

SEQ ID NO: 31740 - DNA, 1528 bp, Homo sapiens
gctgggctgggctcggcacggggcggggcggagggtggggagcggaaagcaggacgcacggctcccgcggcccgctggctgcccttcccgccagcgcaggtgtgggacgggcggcggactaggcacagagctgcgggagcaggcacagggagtgtggagcctggcggcgggacggcgggatccggtgggagccggagtcccgccgaggggggctggaggtggaggggcccggcgaggccgcgatgaagccgagcggcgaggaccaggcggcgctggcggccggcccctgggaggagtgcttccaggcggccgtgcagctggcgctgcgggcaggacagatcatcagaaaagcccttactgaggaaaaacgtgtctcaacaaaaacatcagctgcagatcttgtgacagaaacagatcaccttgtggaagatttaattatttctgagttgcgagagaggtttccttcacacaggttcattgcagaagaggccgcggcttctggggccaagtgtgtgctcacccacagcccgacgtggatcatcgaccccatcgacggcacctgcaattttgtgcacagattcccgactgtggcggttagcattggatttgctgttcgacaagagcttgaattcggagtgatttaccactgcacagaggagcggctgtacacgggccggcggggtcggggcgccttctgcaatggccagcggctccgggtctccggggagacagatctctcaaaggccttggttctgacagaaattggccccaaacgtgaccctgcgaccctgaagctgttcctgagtaacatggagcggctgctgcatgccaaggcgcatggggtccgagtgattggaagctccacattggcactctgccacctggcctcaggggccgcggatgcctattaccagtttggcctgcactgctgggatctggcggctgccacagtcatcatcagagaagcaggcggcatcgtgatagacacttcgggtggacccctcgacctcatggcttgcagagtggttgcggccagcacccgggagatggcgatgctcatagctcaggccttacagacgattaactatgggcgggatgatgagaagtgactgcggctgaggcaaagctgctcccaaggcctccctgggctgctgtgggctcctggggaggtggccctcgtggcccacgctccatgccagtggctcacgctctgctcctggctaccccagagggagttgtcacgctacagtgagtggctggccttttaaatcgacgtctctctcaccaggatttggtgtttagctgtttctctctttaatctcacgtagcctttttcaggttagtacgtgttcttctgtcagggccaaaactcaaatctcctgtgaaatacgtattgataatccaatcttgatttttccccccagaatataaatctcaggtaataaggctttagaactgctgataaagcggatcgttctcaggccctccccccggagtacttcagaatgcaataaatcaaaataatggc

SEQ ID NO: 31741 - DNA, 1270 bp, Homo sapiens
gctgggctgggctcggcacggggcggggcggagggtggggagcggaaagcaggacgcacggctcccgcggcccgctggctgcccttcccgccagcgcaggtgtgggacgggcggcggactaggcacagagctgcgggagcaggcacagggagtgtggagcctggcggcgggacggcgggatccggtgggagccggagtcccgccgaggggggctggaggtggaggggcccggcgaggccgcgatgaagccgagcggcgaggaccaggcggcgctggcggccggcccctgggaggagtgcttccaggcggccgtgcagctggcgctgcgggcaggacagatcatcagaaaagcccttactgaggaaaaacgtgtctcaacaaaaacatcagctgcagatcttgtgacagaaacagatcaccttgtggaagatttaattatttctgagttgcgagagaggtttccttcacacaggttcattgcagaagaggccgcggcttctggggccaagtgtgtgctcacccacagcccgacgtggatcatcgaccccatcgacggcacctgcaattttgtgcacagattcccgactgtggcggttagcattggatttgctgttcgacaagagcttgaattcggagtgatttaccactgcacagaggagcggctgtacacgggccggcggggtcggggcgccttctgcaatggccagcggctccgggtctccggggagacagagatggagtctcaccatcttgcccaggctggtctggaactcatggcctcagatctcttcaaagggccttgggttcttgaccggcaacttgtgggccaaaaacgttgacccgtgcagacccttgaaggctgttccatgagtgacattggagcgggttgctgcattgccaaggccgcagtggggtccgagtggattggaagctcccctttggccttcttgccagcttggctcagggtgcccggtgtattctatttacccgttgtgctgaactgctggaatctggcggctgcccagagtcctccattcgaaaaaagcgggccgactcggtgattaagaccttcgggtgttgcccccttgaccatggtgcttccacggtcgtgtgggacacaccccggaaaagggagagccacaaagagagcgtgacacgaacattggggggaggatgaaaatacgtgtgtcatgaatcacacacgcctcgtgagttgactcacaagtgtcacgtactccacaactatgcctctgcacgcacgatcatcaat

SEQ ID NO: 31742 - DNA, 1213 bp, Homo sapiens
atgaagccgagcgggcaggacagatcatcagaaaagcccttactgaggaaaaacgtgtctcaacaaaaacatcagctgcagatcttgtgacagaaacagatcaccttgtggaagatttaattatttctgagttgcgagagaggtttccttcacacaggttcattgcagaagaggccgcggcttctggggccaagtgtgtgctcacccacagcccgacgtggatcatcgaccccatcgacggcacctgcaattttgtgcacagattcccgactgtggcggttagcattggatttgctgttcgacaagagcttgaattcggagtgatttaccactgcacagaggagcggctgtacacgggccggcggggtcggggcgccttctgcaatggccagcggctccgggtctccggggagacagatctctcaaaggccttggttctgacagaaattggccccaaacgtgaccctgcgaccctgaagctgttcctgagtaacatggagcggctgctgcatgccaaggcgcatggggtccgagtgattggaagctccacattggcactctgccacctggcctcaggggccgcggatgcctattaccagtttggcctgcactgctgggatctggcggctgccacagtcatcatcagagaagcaggcggcatcgtgatagacacttcgggtggacccctcgacctcatggcttgcagagtggttgcggccagcacccgggagatggcgatgctcatagctcaggccttacagacgattaactatgggcgggatgatgagaagtgactgcggctgaggcaaagctgctcccaaggcctccctgggctgctgtgggctcctggggaggtggccctcgtggcccacgctccatgccagtggctcacgctctgctcctggctaccccagagggagttgtcacgctacagtgagtggctggccttttaaatcgacgtctctctcaccaggatttggtgtttagctgtttctctctttaatctcacgtagcctttttcaggttagtacgtgttcttctgtcagggccaaaactcaaatctcctgtgaaatacgtattgataatccaatcttgatttttccccccagaatataaatctcaggtaataaggctttagaactgctgataaagcggatcgttctcaggccctccccccggagtacttcagaatgcaataaatcaaaataatggc

SEQ ID NO: 31743 - DNA, 1218 bp, Homo sapiens
gaagtaaggatatcgtcgaccagcgcccatcatcagaaaagcccttactgaggaaaaacgtgtctcaacaaaaacatcagctgcagatcttgtgacagaaacagatcaccttgtggaagatttaattatttctgagttgcgagagaggtttccttcacacaggttcattgcagaagaggccgcggcttctggggccaagtgtgtgctcacccacagcccgacgtggatcatcgaccccatcgacggcacctgcaattttgtgcacagattcccgactgtggcggttagcattggatttgctgttcgacaagagcttgaattcggagtgatttaccactgcacagaggagcggctgtacacgggccggcggggtcggggcgccttctgcaatggccagcggctccgggtctccggggagacagatctctcaaaggccttggttctgacagaaattggccccaaacgtgaccctgcgaccctgaagctgttcctgagtaacatggagcggctgctgcatgccaaggcgcatggggtccgagtgattggaagctccacattggcactctgccacctggcctcaggggccgcggatgcctattaccagtttggcctgcactgctgggatctggcggctgccacagtcatcatcagagaagcaggcggcatcgtgatagacacttcgggtggacccctcgacctcatggcttgcagagtggttgcggccagcacccgggagatggcgatgctcatagctcaggccttacagacgattaactatgggcgggatgatgagaagtgactgcggctgaggcaaagctgctcccaaggcctccctgggctgctgtgggctcctggggaggtggccctcgtggcccacgctccatgccagtggctcacgctctgctcctggctaccccagagggagttgtcacgctacagtgagtggctggccttttaaatcgacgtctctctcaccaggatttggtgtttagctgtttctctctttaatctcacgtagcctttttcaggttagtacgtgttcttctgtcagggccaaaactcaaatctcctgtgaaatacgtattgataatccaatcttgatttttccccccagaatataaatctcaggtaataaggctttagaactgctgataaagcggatcgttctcaggccctccccccggagtacttcagaatgcaataaatcaaaataatggc

SEQ ID NO: 31744 - DNA, 1374 bp, Homo sapiens
agaggagttggagcccgctctgcgcgctgcgggacggggcacggcggagcagggttgggtccgcctcgagcggggagggtgatgctgcaccacaggggcggggctggaggtaaagcgcggagcggagagggaccaggctcggcactgatttgtgttcagggctagcccagaggggcggggccagatcatcagaaaagcccttactgaggaaaaacgtgtctcaacaaaaacatcagctgcagatcttgtgacagaaacagatcaccttgtggaagatttaattatttctgagttgcgagagaggtttccttcacacaggttcattgcagaagaggccgcggcttctggggccaagtgtgtgctcacccacagcccgacgtggatcatcgaccccatcgacggcacctgcaattttgtgcacagattcccgactgtggcggttagcattggatttgctgttcgacaagagcttgaattcggagtgatttaccactgcacagaggagcggctgtacacgggccggcggggtcggggcgccttctgcaatggccagcggctccgggtctccggggagacagatctctcaaaggccttggttctgacagaaattggccccaaacgtgaccctgcgaccctgaagctgttcctgagtaacatggagcggctgctgcatgccaaggcgcatggggtccgagtgattggaagctccacattggcactctgccacctggcctcaggggccgcggatgcctattaccagtttggcctgcactgctgggatctggcggctgccacagtcatcatcagagaagcaggcggcatcgtgatagacacttcgggtggacccctcgacctcatggcttgcagagtggttgcggccagcacccgggagatggcgatgctcatagctcaggccttacagacgattaactatgggcgggatgatgagaagtgactgcggctgaggcaaagctgctcccaaggcctccctgggctgctgtgggctcctggggaggtggccctcgtggcccacgctccatgccagtggctcacgctctgctcctggctaccccagagggagttgtcacgctacagtgagtggctggccttttaaatcgacgtctctctcaccaggatttggtgtttagctgtttctctctttaatctcacgtagcctttttcaggttagtacgtgttcttctgtcagggccaaaactcaaatctcctgtgaaatacgtattgataatccaatcttgatttttccccccagaatataaatctcaggtaataaggctttagaactgctgataaagcggatcgttctcaggccctccccccggagtacttcagaatgcaataaatcaaaataatggc

SEQ ID NO: 31745 - DNA, 1482 bp, Homo sapiens
gctgggctgggctcggcacggggcggggcggagggtggggagcggaaagcaggacgcacggctcccgcggcccgctggctgcccttcccgccagcgcaggtgtgggacgggcggcggactaggcacagagctgcgggagcaggcacagggagtgtggagcctggcggcgggacggcgggatccggtgggagccggagtcccgccgaggggggctggaggtggaggggcccggcgaggccgcgatgaagccgagcggcgaggaccaggcggcgctggcggccggcccctgggaggagtgcttccaggcggccgtgcagctggcgctgcgggcaggacagatcatcagaaaagcccttactgaggaaaaacgtgtctcaacaaaaacatcagctgcagatcttgtgacagaaacagatcaccttgtggaagatttaattatttctgagttgcgagagaggtttccttcacacaggttcattgcagaagaggccgcggcttctggggccaagtgtgtgctcacccacagcccgacgtggatcatcgaccccatcgacggcacctgcaattttgtgcacagcttgaattcggagtgatttaccactgcacagaggagcggctgtacacgggccggcggggtcggggcgccttctgcaatggccagcggctccgggtctccggggagacagatctctcaaaggccttggttctgacagaaattggccccaaacgtgaccctgcgaccctgaagctgttcctgagtaacatggagcggctgctgcatgccaaggcgcatggggtccgagtgattggaagctccacattggcactctgccacctggcctcaggggccgcggatgcctattaccagtttggcctgcactgctgggatctggcggctgccacagtcatcatcagagaagcaggcggcatcgtgatagacacttcgggtggacccctcgacctcatggcttgcagagtggttgcggccagcacccgggagatggcgatgctcatagctcaggccttacagacgattaactatgggcgggatgatgagaagtgactgcggctgaggcaaagctgctcccaaggcctccctgggctgctgtgggctcctggggaggtggccctcgtggcccacgctccatgccagtggctcacgctctgctcctggctaccccagagggagttgtcacgctacagtgagtggctggccttttaaatcgacgtctctctcaccaggatttggtgtttagctgtttctctctttaatctcacgtagcctttttcaggttagtacgtgttcttctgtcagggccaaaactcaaatctcctgtgaaatacgtattgataatccaatcttgatttttccccccagaatataaatctcaggtaataaggctttagaactgctgataaagcggatcgttctcaggccctccccccggagtacttcagaatgcaataaatcaaaataatggc

SEQ ID NO: 31746 - DNA, 936 bp, Homo sapiens
cagcatctcaggtgctcagtagctaggtcagctgggagctgtcatggcacaaggcatttgcgtctggcggaggctgtttggttggtggctccaggccctatattcagcctccagagctttggcagaagtgctgtgcttcatttttcactagggaaaatgcccagccggggtacctcgctgaagtcggcttgcacaccacagaaaaggctccactcccgcctgcatctgtcctcccttccctctccccagggtccgagtgattggaagctccacattggcactctgccacctggcctcaggggccgcggatgcctattaccagtttggcctgcactgctgggatctggcggctgccacagtcatcatcagagaagcaggcggcatcgtgatagacacttcgggtggacccctcgacctcatggcttgcagagtggttgcggccagcacccgggagatggcgatgctcatagctcaggccttacagacgattaactatgggcgggatgatgagaagtgactgcggctgaggcaaagctgctcccaaggcctccctgggctgctgtgggctcctggggaggtggccctcgtggcccacgctccatgccagtggctcacgctctgctcctggctaccccagagggagttgtcacgctacagtgagtggctggccttttaaatcgacgtctctctcaccaggatttggtgtttagctgtttctctctttaatctcacgtagcctttttcaggttagtacgtgttcttctgtcagggccaaaactcaaatctcctgtgaaatacgtattgataatccaatcttgatttttccccccagaatataaatctcaggtaataaggctttagaactgctgataaagcggatcgttctcaggccctccccccggagtacttcagaatgcaataaatcaaaataatggc

SEQ ID NO: 31747 - DNA, 702 bp, Homo sapiens
attagaggatccctctgggctctatcagggaagctccacattggcactctgccacctggcctcaggggccgcggatgcctattaccagtttggcctgcactgctgggatctggcggctgccacagtcatcatcagagaagcaggcggcatcgtgatagacacttcgggtggacccctcgacctcatggcttgcagagtggttgcggccagcacccgggagatggcgatgctcatagctcaggccttacagacgattaactatgggcgggatgatgagaagtgactgcggctgaggcaaagctgctcccaaggcctccctgggctgctgtgggctcctggggaggtggccctcgtggcccacgctccatgccagtggctcacgctctgctcctggctaccccagagggagttgtcacgctacagtgagtggctggccttttaaatcgacgtctctctcaccaggatttggtgtttagctgtttctctctttaatctcacgtagcctttttcaggttagtacgtgttcttctgtcagggccaaaactcaaatctcctgtgaaatacgtattgataatccaatcttgatttttccccccagaatataaatctcaggtaataaggctttagaactgctgataaagcggatcgttctcaggccctccccccggagtacttcagaatgcaataaatcaaaataatggc

SEQ ID NO: 31748 - DNA, 354 bp, Homo sapiens
gtgatccttgttccctagcctcccaaagtgctggcattacaggcacgatccactgtgcccggtccatccttagttttcaacatagatatcaaaaaagcattcagcatgaaccagtcgaaagatgaccttactctgagaaagaaaggctcacgttggaagcctgtactccttagttagaaccaagacttgatttttctggtgacaggaaattctttttattgcagatctctcaaaggccttggttctgacagaaattggccccaaacgtgaccctgcgaccctgaagctgttcctgagtaacatggagcggctgctgcatgccaaggcgcatgggtaggaggttcagttcgggga

SEQ ID NO: 31749 - DNA, 311 bp, Homo sapiens
agtgtaggaaggtccttctgagcctgcggggagccgcacagcacacaggctcccgagagctgccgctcttgttccagagagtaaacctttctattttcctttgcagattcccgactgtggcggttagcattggatttgctgttcgacaagaggtgcgggtgtggcccaggtccccagggcccctccctgggctccctctggccatccttcctttctggcttcagcctctgtgcgcctggtttgctgtttgccctgtgccttaatcatgactggcaaatccaagcctgtgggtttcaaatccgagaaaataa

SEQ ID NO: 31750 - DNA, 404 bp, Homo sapiens
ttagatctagtcttttctttgatcctgagaatgcctttggaaggtgtaaacagcggccagctccacagggaccagcctgcagaaggttcattgcagaagaggccgcggcttctggggccaagtgtgtgctcacccacagcccgacgtggatcatcgaccccatcgacggcacctgcaattttgtgcacagcggggtcgcagtggctcgcagtgtggggcggctgctgggtgccgaggctgcgtggggtccgagtgatcggaaggtccacaattggtgactctggcgagctggccgtcaggggccgcggggtgcctatgtagccacgttttgtggcctgtgggctgcggtgggatctgggctggctgccggcaagtcagtctactcatgcagaaggcacgggggc

SEQ ID NO: 31751 - DNA, 1490 bp, Homo sapiens
cagtgtgtttggactgggcgtgtgtgactaagtgcacatgatgcttgcgtggatgcatgtgcacatgggatgttgtttgacgccttggctggctgtggactgtgctgtggatcctggtggtgagcctggaagtccctgccgattgtgtggtggcttggagtgttggacgtggtgccctgtgctgattggccggcgagtagagagccagagctggctgagtgaccatgtgcggcgctggcggccggcccctgggaggagtgcttccaggcggccgtgcagctggcgctgcgggcaggacagatcatcagaaaagcccttactgaggaaaaacgtgtctcaacaaaaacatcagctgcagatcttgtgacagaaacagatcaccttgtggaagatttaattatttctgagttgcgagagaggtttccttcacacaggttcattgcagaagaggccgcggcttctggggccaagtgtgtgctcacccacagcccgacgtggatcatcgaccccatcgacggcacctgcaattttgtgcacagattcccgactgtggcggttagcattggatttgctgttcgacaagagcttgaattcggagtgatttaccactgcacagaggagcggctgtacacgggccggcggggtcggggcgccttctgcaatggccagcggctccgggtctccggggagacagatctctcaaaggccttggttctgacagaaattggccccaaacgtgaccctgcgaccctgaagctgttcctgagtaacatggagcggctgctgcatgccaaggcgcatggggtccgagtgattggaagctccacattggcactctgccacctggcctcaggggccgcggatgcctattaccagtttggcctgcactgctgggatctggcggctgccacagtcatcatcagagaagcaggcggcatcgtgatagacacttcgggtggacccctcgacctcatggcttgcagagtggttgcggccagcacccgggagatggcgatgctcatagctcaggccttacagacgattaactatgggcgggatgatgagaagtgactgcggctgaggcaaagctgctcccaaggcctccctgggctgctgtgggctcctggggaggtggccctcgtggcccacgctccatgccagtggctcacgctctgctcctggctaccccagagggagttgtcacgctacagtgagtggctggccttttaaatcgacgtctctctcaccaggatttggtgtttagctgtttctctctttaatctcacgtagcctttttcaggttagtacgtgttcttctgtcagggccaaaactcaaatctcctgtgaaatacgtattgataatccaatcttgatttttccccccagaatataaatctcaggtaataaggctttagaactgctgataaagcggatcgttctcaggccctccccccggagtacttcagaatgcaataaatcaaaataatggc

SEQ ID NO: 31752 - DNA, 1563 bp, Homo sapiens
gctgggctgggctcggcacggggcggggcggagggtggggagcggaaagcaggacgcacggctcccgcggcccgctggctgcccttcccgccagcgcaggtgtgggacgggcggcggactaggcacagagctgcgggagcaggcacagggagtgtggagcctggcggcgggacggcgggatccggtgggagccggagtcccgccgaggggggctggaggtggaggggcccggcgaggccgcgatgaagccgagcggcgaggaccaggcggcgctggcggccggcccctgggaggagtgcttccaggcggccgtgcagctggcgctgcgggcaggacagatcatcagaaaagcccttactgaggaaaaacgtgtctcaacaaaaacatcagctgcagatcttgtgacagaaacagatcaccttgtggaagatttaattatttctgagttgcgagagaggtttccttcacacaggttcattgcagaagaggccgcggcttctggggccaagtgtgtgctcacccacagcccgacgtggatcatcgaccccatcgacggcacctgcaattttgtgcacagattcccgactgtggcggttagcattggatttgctgttcgacaagagcttgaattcggagtgatttaccactgcacagaggagcggctgtacacgggccggcggggtcggggcgccttctgcaatggccagcggctccgggtctccggggagacagatctctcaaaggccttggttctgacagaaattggccccaaacgtgaccctgcgaccctgaagctgttcctgagtaacatggagcggctgctgcatgccaaggcgcatggggtccgagtgattggaagctccacattggcactctgccacctggcctcaggggccgcggatgcctattaccagtttggcctgcactgctgggatctggcggctgccacagtcatcatcagagaagcaggcggcatcgtgatagacacttcgggtggacccctcgacctcatggcttgcagagtggttgcggccagcacccgggagatggcgatgctcatagctcaggccttacagacgattaactatgggcgggatgatgagaagtgactgcggctgaggcaaagctgctcccaaggcctccctgggctgctgtgggctcctggggaggtggccctcgtggcccacgctccatgccagtggctcacgctctgctcctggctaccccagagggagttgtcacgctacagtgagtggctggccttttaaatcgacgtctctctcaccaggatttggtgtttagctgtttctctctttaatctcacgtagcctttttcaggttagtacgtgttcttctgtcagggccaaaactcaaatctcctgtgaaatacgtattgataatccaatcttgatttttccccccagaatataaatctcaggtaataaggctttagaactgctgataaagcggatcgttctcaggccctccccccggagtacttcagaatgcaataaatcaaaataatggcctgtgtgtatctgtttcctctataagcatgtcgcc

SEQ ID NO: 31753 - DNA, 1548 bp, Homo sapiens
gctgggctgggctcggcacggggcggggcggagggtggggagcggaaagcaggacgcacggctcccgcggcccgctggctgcccttcccgccagcgcaggtgtgggacgggcggcggactaggcacagagctgcgggagcaggcacagggagtgtggagcctggcggcgggacggcgggatccggtgggagccggagtcccgccgaggggggctggaggtggaggggcccggcgaggccgcgatgaagccgagcggcgaggaccaggcggcgctggcggccggcccctgggaggagtgcttccaggcggccgtgcagctggcgctgcgggcaggacagatcatcagaaaagcccttactgaggaaaaacgtgtctcaacaaaaacatcagctgcagatcttgtgacagaaacagatcaccttgtggaagatttaattatttctgagttgcgagagaggtttccttcacacaggttcattgcagaagaggccgcggcttctggggccaagtgtgtgctcacccacagcccgacgtggatcatcgaccccatcgacggcacctgcaattttgtgcacagattcccgactgtggcggttagcattggatttgctgttcgacaagagcttgaattcggagtgatttaccactgcacagaggagcggctgtacacgggccggcggggtcggggcgccttctgcaatggccagcggctccgggtctccggggagacagatctctcaaaggccttggttctgacagaaattggccccaaacgtgaccctgcgaccctgaagctgttcctgagtaacatggagcggctgctgcatgccaaggcgcatggggtccgagtgattggaagctccacattggcactctgccacctggcctcaggggccgcggatgcctattaccagtttggcctgcactgctgggatctggcggctgccacagtcatcatcagagaagcaggcggcatcgtgatagacacttcgggtggacccctcgacctcatggcttgcagagtggttgcggccagcacccgggagatggcgatgctcatagctcaggccttacagacgattaactatgggcgggatgatgagaagtgactgcggctgaggcaaagctgctcccaaggcctccctgggctgctgtgggctcctggggaggtggccctcgtggcccacgctccatgccagtggctcacgctctgctcctggctaccccagagggagttgtcacgctacagtgagtggctggccttttaaatcgacgtctctctcaccaggatttggtgtttagctgtttctctctttaatctcacgtagcctttttcaggttagtacgtgttcttctgtcagggccaaaactcaaatctcctgtgaaatacgtattgataatccaatcttgatttttccccccagaatataaatctcaggtaataaggctttagaactgctgataaagcggatcgttctcaggccctccataacggacttcagagcatacaatgccgccccgcggttcggctgtgtgtgtgtggggggg

SEQ ID NO: 31754 - DNA, 1393 bp, Homo sapiens
gctgggctgggctcggcacggggcggggcggagggtggggagcggaaagcaggacgcacggctcccgcggcccgctggctgcccttcccgccagcgcaggtgtgggacgggcggcggactaggcacagagctgcgggagcaggcacagggagtgtggagcctggcggcgggacggcgggatccggtgggagccggagtcccgccgaggggggctggaggtggaggggcccggcgaggccgcgatgaagccgagcggcgaggaccaggcggcgctggcggccggcccctgggaggagtgcttccaggcggccgtgcagctggcgctgcgggcaggacagatcatcagaaaagcccttactgaggaaaaacgtgtctcaacaaaaacatcagctgcagatcttgtgacagaaacagatcaccttgtggaagatttaattatttctgagttgcgagagaggtttccttcacacaggttcattgcagaagaggccgcggcttctggggccaagtgtgtgctcacccacagcccgacgtggatcatcgaccccatcgacggcacctgcaattttgtgcacagattcccgactgtggcggttagcattggatttgctgttcgacaagagcttgaattcggagtgatttaccactgcacagaggagcggctgtacacgggccggcggggtcggggcgccttctgcaatggccagcggctccgggtctccggggagacagatctctcaaaggccttggttctgacagaaattggccccaaacgtgaccctgcgaccctgaagctgttcctgagtaacatggagcggctgctgcatgccaaggcgcatggggtccgagtgattggaagctccacattggcactctgccacctggcctcaggggccgcggatgcctattaccagtttggcctgcactgctgggatctggcggctgccacagtcatcatcagagaagcaggcggcatcgtgatagacacttcgggtggacccctcgacctcatggcttgcagagtggttgcggccagcacccgggagatggcgatgctcatagctcaggccttacagacgattaactatggccttttaaatcgacgtctctctcaccaggatttggtgtttagctgtttctctctttaatctcacgtagcctttttcaggttagtacgtgttcttctgtcagggccaaaactcaaatctcctgtgaaatacgtattgataatccaatcttgatttttccccccagaatataaatctcaggtaataaggctttagaactgctgataaagcggatcgttctcaggccctccccccggagtacttcagaatgcaataaatcaaaataatggcctgtgtgtatctgtttcctctataagcatgtcgcc

SEQ ID NO: 31755 - DNA, 541 bp, Homo sapiens
tgaagttcaagaacaggcaaaaaagtccagacaatgtgttcccgttggtatagtatatatgtatactatatacgtatatcatgtatatgctgtatacgtatatctcgtatatgctgtatacgtatatctcgtatatgctgtatacgtatatcgtatatgctgtatacgtatatctcgtatatgctgtatatgtatattgtatatactgtatacatgtatatgctgtatatgtatatactgtatatgtatagtatatatatgcagggtatagtgatggaggagatgtaaaaggggcttctagggactggttatgttctgtttgttgaactgaatgctgtttacgtggttgggttcgttaagaaaattctttgcatagtgtgtggtgacgcacacctgtaatcccagcactcagtgaggcagaggcaggagggtcacttgagcccaggaattcgagaccagcctgggcaacatagtgaggcccccatctccacaaaaaggaaaaaaagggtaacgtgacattttttagccagcgctggatcca

SEQ ID NO: 31756 - DNA, 404 bp, Homo sapiens
acatttgagacatatacataaaataacaatgcctcttccttctttaagctatttcatatgactttatatgtaatattaaatcttggctatctgaggaacatgtctaaagattataggtgattttacgtgtaaagatattcattgaatattaactacatgctagcacaaaggcaatactttttatatttgcccattgatgggtgtgtgtgtatagagagattttataaatatcccaaatgaaagcatgcttttgtatgtgccatagaaccttgcaccttgcaacaagaaatagctcctagatatgagatgtaagaaaaaaatccatgatttaaagaaattattcaaaataatttcaactgacaaccctaataataaaagatgtgaatgaaaaaaaaaatttaagc

SEQ ID NO: 31757 - DNA, 401 bp, Homo sapiens
tttttgaaaccaggaggcagcatcttggacaattctgcagatgtgcttgatgagttagggacaaaaatggcccttctctgcacccctccttccctccctctataagggctcccatcgggggttgcttctccctccactgcctcccgggccctcccctcccttcttcagtggtcagctgagacccccacccactgcttgcttttgtactcttggcctttggacatactgacaggggcctttatgagaccccaatcaagacccccatgtcacaggtacctagtagggacaccagacctataaaaatatttgctacaaagtgaaatgattaacaaaaatgtgtgcactttgtgaaggggacaattgtttcaaaaactccaattagcacacacaggattttggat

SEQ ID NO: 31758 - DNA, 414 bp, Homo sapiens
tgccatactttttcatgtataagagttcttttttgttctgtgaacttttttaaaaaactaaaacatggtcttcatttcatggtatattctctggatttttaaaaaatttgttttcttttctctttactgaaggatctctttcctctaggctgccttcccgtttctgtgtgaggctctcctcagatggcctgcccatgtttaagagtgggggacgctgtagggatgggcactgccttctgtgagctgaacctttccttgttggggccttctgaccttagtgctgcgggttggtcctcccgggctattgtcacaagactctccctggtccctgcaggaaggggaggcttggctgcctgcatcctggagcccagtgagcgagggctgtagcctaatcagtaacctgattgtcccagg

SEQ ID NO: 31759 - DNA, 724 bp, Homo sapiens
agataaagcagacattaaaataaacagcatcactgaaggtatatagggccactatataatgtaaaaggaaaaattcaccaggaagttgctaaactcttacgtatttaacaacctagcctcaagacatttaagaattgcatgtaaacagcaaaccttaggggagatttaatacacctctgtgagtaattgatggccaagtttgtaaaaaattagtaaggataaaggagagcttgaataacaaaatactttttatataatggacatatatagaaaccatgcagtcagccgggcacgatagctcacgcctgtaatcccagcactttgggaggccgagacaggcagatcacaaggtcaggagttcaagaccagcctggccaacatagtgaaaccccgtctctactaaaaatacaaaaattagccaggcatggtggcgtgtgcctgtagtcctatctactcgggaggctgaggcaggagaatcacttgaacccaggaggcagaggttgtggtgagtcaagattgcgccactgcactccagcctcggcaacagagtgagactccatctcggagaaaaaaaacaaaacaaaaccatgcagtcataattcaagaattcttaatatttccaagcataaatggaaaatttatacaaactgaccaaggattattccaagagcacgtttcagtaaataccaaatattaatatcacatagattctgttctctgacca

SEQ ID NO: 31760 - DNA, 372 bp, Homo sapiens
cttttgttctctgaaatgacacccacagtctattcctctatagttcatatttttgatcctgcagatgcccaaatgtagagtgcagatcccctccaacaaacaccttaataactgagcagagtacaggggaagactagacgtttccttttatcatcatttaaggagttttccttatctgggtgaataacccaatacagccagactttcaagtgtatagtctgtgtctatgacaagacaaaacaaaagaaaagaaaacactggattgtaaacagatcaatccaatgttttctgttaccttaactaccagatcagattgctcacaaagtcaatctgatcaaatgttaagctattttgaaaacccaaatcaaccaa

SEQ ID NO: 31761 - DNA, 391 bp, Homo sapiens
tctgtgacccaggatgaacctcactgcaatctccacctcctgggttaaagcgattcttttgcctcagcctcccaagtagcatgagccaccacgcccggttaatttttgaatttttagtagagatggggtttcactgtgttggccaagctggtctcaaactcctgacctcaagtgatccgccctctctcagcctcccaaagtacagggattacaggcgtaacgccaccgtgcccggccttgctaactactttttgtctttcagtctttctggttatacgttgaaagttactttgaggaaacatttgatcttgcagactgggcagccttctggttgcatcctcttagaacaggggtccccaacccttgtactggtctgcagcctgttaggaac

SEQ ID NO: 31762 - DNA, 882 bp, Homo sapiens
cttacacataaagaagagtatatagtgtataattccatttatgtgaaattccaggaaagacaaatggaatccgtagttacagaaaacatcagtggcctcctggagctgggaatggggattgtctagaagcggcaccgaagaggatgaggggtgatgattaatagctgtatacatttgtcaaaacttcttaaaactgtacactttattgtatatagattgtacctcattaaaatttaccctgtgcaagcattggccatgtcagtaaactgcagcacctgttcttcttcacgttttttgtttttatttttgtttggatggcaggtaatcattcacctgtaaacaagcagggtgtaattttggaggtaccactagtctttagttctattccagctgtagggagggctggatagggtcagaagtaatgggattctttgctgctttcctctactacaggctgtttgggtcttctttggaagatgaagctttggctcttaaatccttattcctgggcaggatagctccagtttctttcagagaccgaaatattttcacctcccttccccactatcccagaaaaacatacttaatgttttagagaacactttgtttaactaatgaatctatcgttatttctcctgatagttctacttttggccacaaattgtttgatgctcaagtttgtctttagaacacagcagtttctcattatctgaggtattcgattagtgatacaaattagtttaaaactccaacaaaatatagtcataatgatattcagagctcccccacctaacttttggtgttggttatgctgtctggaatataaggctaattgggatagggtgtaatgatatatcactttgcgtcacttactagttagaa

SEQ ID NO: 31763 - DNA, 573 bp, Homo sapiens
  misc_feature (73)..(73): n is a, c, g, or t
  misc_feature (81)..(81): n is a, c, g, or t
ggagatgagggtgatagtgcccagctctgggctgctgctgtgagatcaagctgtgcaaacacaatggtcctgncctttggnaaaagcagaacaaacttgctagggcataaagcatcctccattctgcctggctgtccatcctctcaacagccccatgaagaaggggctctccccattttatggacaagaagacagactcagctgggtcaagtggcttgcccaggatcacacaggtcagctgtggaagacccagggcccctggcttcagtctttgggtccagctgtctcctccaggcagtgctgccagtgtccaggcatatggcttggcaaagtgggagaacctctgcttggggtctcgattggagaaaggaatggcttcctctcccctgatgtgagccgtcccagggccatgttgccgtaaggggtgcacagcctgtccactagcccagctgcggaagcacagctgtgtcccacgtgcagtgcctcagaaggagaggaagctttaggtgggggcccaagacccagattctgacatcagctctgccactgagaacagcgtgacctcaggcaagg

SEQ ID NO: 31764 - DNA, 565 bp, Homo sapiens
ttagcctaaggtgattggaatctgtctacaaattagttaagcctgacgttgatcattggacattcatccccgtttgtcaggcttaaattcaagtgctttggatgctgaatcaaattactgtggtagaaagaggtttaattttttccctaagaaaaatcttatctatggataagtagaaaccattctctgacaaccttgtaataattttgacagggaatgtaactgctgtgttctgcttttggttaaaggctaaagtacatattaggaaaatttgaggctgggcgcagtggctcacacctgtaatcccagcactttgtgaggccgacgcaggtggatcacttgaggtcagaatttgagaccagcctggccaacacagttaagccccatctctactaaaaatacaaaaattagccaggcatggtggcgggcacctgtaatcccagctacttggcaggatgaggcaggggaatcgcttgaacctgggaggcagaggttgcagtgagccattgcactccagcctgggcaacagagtgagaccctgtttcaaaacaaaacaaaacaaaac

SEQ ID NO: 31765 - DNA, 618 bp, Homo sapiens
atgcacacagggcacaaatggcctggagtggagacagcctctgtgaaggtagcaatagggctggggttcaaaatagccccaaattacttcatgtccaagagcacggacttgagtgcctatggagcctacggcatcctctcctcccatagctcctccatcggaagggctgcaggtagtgcccattcagaagtcggcagttgacaggtctgtgccaggctgctggatgaggtcacttattgcaaaaaaccttattatctttcattggcaagcacctggctcccaatcttaaaaggaggatttgtgaggcaggcattcagacactgcacagattgggcagaaaaagtccggatggaaagaataagcaggacactgagataggaaagagaaaaggaggaacagtgaaccagtgcccaatcacagtcctgtttctaagacactctagtatgggcctttccctgttaaagataaattacttatagaacatgtcatgcccctgatccagagtggagctttaatactctttgcctgcagttagaaataataagatttctccgaagtctctgggtctaaatccccaccagcgtgattaaacctttacatccttctaaaatagaggca

SEQ ID NO: 31766 - DNA, 401 bp, Homo sapiens
ctctttttgttattttttaatagagacacggtctggctatgttgttcagactggtttcgaactctggcctcaagtggtcctcccatcttggcttcccaaagtgctgggattacagatgtgagccaccatggctggccttaatactgttttatgagttctgaattgaataatttttaagtgaatgtcctaaaattctatgacaatccttttaacacaactggaagagtttttgttggcttacttggtttgtctgcatgtttccttctgtcatcccccactcctaggacccatatggaacattctctcttaattaactcttttattgaagtataatatacttagaggaaaaatgtccaaatcattttcacaagtgaacatacttgcgaaattagcacccagac

SEQ ID NO: 31767 - DNA, 1983 bp, Homo sapiens
agcggggtgcgcggggcggcgcgcggcgtgcaggtcgcagctgtggctcgggtgctggcaggtgctggcgggactggcggggatcgccgtggactgcctcaggggcgccgcagcccgctcggcccgagggcccgcctaaccgcgccgcccgcgcccgctcctcctcggcccgcgcccggagcgcgggggccgccggcgctgggtactcggcggccaccggggatcggggctgagcggtcggttcccgcccccgtgccgccgccgccgccttccggccgaccgcccggcttggccgctgctgccgcgtctggcccccgggtccccgccgctgggggcgcgggcggggtcgggggttgccgggcgccgccccccgtgcgcctggagtccacatcccgggcccggcggccggcgagcatggaggagaagtacctgcccgagctgatggcggagaaggactccctggacccctccttcacgcacgccctgcgcctggtgaaccaagaaatagaaaagtttcaaaaaggagaaggcaaggatgaagaaaagtacatcgatgtggtgattaataagaacatgaagctgggacagaaagtgttaattcccgtaaaacagttccctaagttcaactttgtggggaaacttttgggtccacgtggcaattctctgaagcgtttacaagaagaaaccttgacaaaaatgtccatccttgggaaaggttccatgagagacaaggccaaggaagaagagttgaggaaaagtggagaagcgaagtacttccatctcaatgatgatctccatgttctcattgaagtgtttgccccacctgcagaagcttatgccaggatgggacatgctttggaagaaatcaaaaagttcctcatccctgattataatgatgagatcaggcaagcacagctccaggagttaacatatttgaatggtggttcagaaaatgcagatgttccagtggttcgagggaaacccaccttgcgtacaagaggtgtaccagccccagcaataaccaggggaaggggaggagttacagcccggccagttggagttgtagtaccacgagggacgccaactcccagaggagtcctgtccacccgagggccagtgagtcggggaagaggacttctcactcccagagcaagaggagtccccccaactgggtacagacctccaccgccacccccgacacaagagacttatggagaatatgactatgatgatggatatggcactgcttatgatgaacagagttatgattcctatgataacagctatagcaccccagcccaaagtggtgctgattactatgattacggacatggactcagtgaggagacttatgattcctacgggcaagaagagtggactaactcaagacacaaggcaccttcagcgaggacagcaaagggcgtctacagagaccagccatatggcagatactgattgtactgtctgatgttgtgaaatagccaatctccaccagtcctgtatactgttcaaagtaatttttttctatgaacaatccctttttaaataaatcaaaatgcttaaaatctgaatggatggaacttaaaactactttgttgaaacatcaacctgggcagaaaaaaagaaaaaaagacatgtaaaattttgttatttccagtctgtatatgaaaaaataggtcatcaaaaggaaaaaaaataactttgattaactagtgttaaacaaaaaataggtttactaaatatgttaatctattcttttaacataagcctcacctttcattttaaaggtttccatagaatttagttattttatctttcagccatatgctagtttttttttctcttgccaacatgcgtaaaaagggaagccaattacaagtgcaaataatgtggtattcttttgtaactcaagtcttgaaatgttctgtagtgttaagcaaagtctcctcttgcttgatactaaataaacttttgaaaaaaaaa

SEQ ID NO: 31768 - DNA, 1900 bp, Homo sapiens
agcggggtgcgcggggcggcgcgcggcgtgcaggtcgcagctgtggctcgggtgctggcaggtgctggcgggactggcggggatcgccgtggactgcctcaggggcgccgcagcccgctcggcccgagggcccgcctaaccgcgccgcccgcgcccgctcctcctcggcccgcgcccggagcgcgggggccgccggcgctgggtactcggcggccaccggggatcggggctgagcggtcggttcccgcccccgtgccgccgccgccgccttccggccgaccgcccggcttggccgctgctgccgcgtctggcccccgggtccccgccgctgggggcgcgggcggggtcgggggttgccgggcgccgccccccgtgcgcctggagtccacatcccgggcccggcggccggcgagcatggaggagaagtacctgcccgagctgatggcggagaaggactccctggacccctccttcacgcacgccctgcgcctggtgaaccaagaaatagaaaagtttcaaaaaggagaaggcaaggatgaagaaaagtacatcgatgtggtgattaataagaacatgaagctgggacagaaagtgttaattcccgtaaaacagttccctaagttcaactttgtggggaaacttttgggtccacgtggcaattctctgaagcgtttacaagaagaaaccttgacaaaaatgtccatccttgggaaaggttccatgagagacaaggccaaggaagaagagttgaggaaaagtggagaagcgaagtacttccatctcaatgatgatctccatgttctcattgaagtgtttgccccacctgcagaagcttatgccaggatgggacatgctttggaagaaatcaaaaagttcctcatccctgattataatgatgagatcaggcaagcacagctccaggagttaacatatttgaatggtggttcagaaaatgcagatgttccagtggttcgagggaaacccaccttgcgtacaagaggtgtaccagccccagcaataaccaggggaaggggaggagttacagcccggccagttggagttgtagtaccacgagggacgccaactcccagaggagtcctgtccacccgagggccagtgagtcggggaagaggacttctcactcccagagcaagaggagtccccccaactgggtacagacctccaccgccacccccgacacaagagacttatggagaatattggtgctgattactatgattacggacatggactcagtgaggagacttatgattcctacgggcaagaagagtggactaactcaagacacaaggcaccttcagcgaggacagcaaagggcgtctacagagaccagccatatggcagatactgattgtactgtctgatgttgtgaaatagccaatctccaccagtcctgtatactgttcaaagtaatttttttctatgaacaatccctttttaaataaatcaaaatgcttaaaatctgaatggatggaacttaaaactactttgttgaaacatcaacctgggcagaaaaaaagaaaaaaagacatgtaaaattttgttatttccagtctgtatatgaaaaaataggtcatcaaaaggaaaaaaaataactttgattaactagtgttaaacaaaaaataggtttactaaatatgttaatctattcttttaacataagcctcacctttcattttaaaggtttccatagaatttagttattttatctttcagccatatgctagtttttttttctcttgccaacatgcgtaaaaagggaagccaattacaagtgcaaataatgtggtattcttttgtaactcaagtcttgaaatgttctgtagtgttaagcaaagtctcctcttgcttgatactaaataaacttttgaaaaaaaaa

SEQ ID NO: 31769 - DNA, 1604 bp, Homo sapiens
gtccagtgaagagggttggagactgctcaagatcgacaaggagtaccttgctaaaaatggccacagaggaggaggagggtcctcctcctcctccttcacgcacgccctgcgcctggtgaaccaaaatagaaaagtttcaaaaaggagaaggcaaggatgaagaaaagtacatcgatgtggtgattaataagaacatgaagctgggacagaaagtgttaattcccgtaaaacagttccctaagttcaactttgtggggaaacttttgggtccacgtggcaattctctgaagcgtttacaagaagaaaccttgacaaaaatgtccatccttgggaaaggttccatgagagacaaggccaaggaagaagagttgaggaaaagtggagaagcgaagtacttccatctcaatgatgatctccatgttctcattgaagtgtttgccccacctgcagaagcttatgccaggatgggacatgctttggaagaaatcaaaaagttcctcatccctgattataatgatgagatcaggcaagcacagctccaggagttaacatatttgaatggtggttcagaaaatgcagatgttccagtggttcgagggaaacccaccttgcgtacaagaggtgtaccagccccagcaataaccaggggaaggggaggagttacagcccggccagttggagttgtagtaccacgagggacgccaactcccagaggagtcctgtccacccgagggccagtgagtcggggaagaggacttctcactcccagagcaagaggagtccccccaactgggtacagacctccaccgccacccccgacacaagagacttatggagaatatgactatgatgatggatatggcactgcttatgatgaacagagttatgattcctatgataacagctatagcaccccagcccaaagtggtgctgattactatgattacggacatggactcagtgaggagacttatgattcctacgggcaagaagagtggactaactcaagacacaaggcaccttcagcgaggacagcaaagggcgtctacagagaccagccatatggcagatactgattgtactgtctgatgttgtgaaatagccaatctccaccagtcctgtatactgttcaaagtaatttttttctatgaacaatccctttttaaataaatcaaaatgcttaaaatctgaatggatggaacttaaaactactttgttgaaacatcaacctgggcagaaaaaaagaaaaaaagacatgtaaaattttgttatttccagtctgtatatgaaaaaataggtcatcaaaaggaaaaaaaataactttgattaactagtgttaaacaaaaaataggtttactaaatatgttaatctattcttttaacataagcctcacctttcattttaaaggtttccatagaatttagttattttatctttcagccatatgctagtttttttttctcttgccaacatgcgtaaaaagggaagccaattacaagtgcaaataatgtggtattcttttgtaactcaagtcttgaaatgttctgtagtgttaagcaaagtctcctcttgcttgatactaaataaacttttgaaaaaaaaa

SEQ ID NO: 31770 - DNA, 1679 bp, Homo sapiens
ggcggttgggggccgggtggaaacgcgggggcccagggggcccctccgtgccctctgctgtcagcggacgcggcggagacggaggcccgggtggcccccggggtcgtttgcacggggacctgggaggctgtgggacacctaggggaagaccctgatgtgaattttggggacttggaaggagaaggctggggcgcatggaaatagaaaagtttcaaaaaggagaaggcaaggatgaagaaaagtacatcgatgtggtgattaataagaacatgaagctgggacagaaagtgttaattcccgtaaaacagttccctaagttcaactttgtggggaaacttttgggtccacgtggcaattctctgaagcgtttacaagaagaaaccttgacaaaaatgtccatccttgggaaaggttccatgagagacaaggccaaggaagaagagttgaggaaaagtggagaagcgaagtacttccatctcaatgatgatctccatgttctcattgaagtgtttgccccacctgcagaagcttatgccaggatgggacatgctttggaagaaatcaaaaagttcctcatccctgattataatgatgagatcaggcaagcacagctccaggagttaacatatttgaatggtggttcagaaaatgcagatgttccagtggttcgagggaaacccaccttgcgtacaagaggtgtaccagccccagcaataaccaggggaaggggaggagttacagcccggccagttggagttgtagtaccacgagggacgccaactcccagaggagtcctgtccacccgagggccagtgagtcggggaagaggacttctcactcccagagcaagaggagtccccccaactgggtacagacctccaccgccacccccgacacaagagacttatggagaatatgactatgatgatggatatggcactgcttatgatgaacagagttatgattcctatgataacagctatagcaccccagcccaaagtggtgctgattactatgattacggacatggactcagtgaggagacttatgattcctacgggcaagaagagtggactaactcaagacacaaggcaccttcagcgaggacagcaaagggcgtctacagagaccagccatatggcagatactgattgtactgtctgatgttgtgaaatagccaatctccaccagtcctgtatactgttcaaagtaatttttttctatgaacaatccctttttaaataaatcaaaatgcttaaaatctgaatggatggaacttaaaactactttgttgaaacatcaacctgggcagaaaaaaagaaaaaaagacatgtaaaattttgttatttccagtctgtatatgaaaaaataggtcatcaaaaggaaaaaaaataactttgattaactagtgttaaacaaaaaataggtttactaaatatgttaatctattcttttaacataagcctcacctttcattttaaaggtttccatagaatttagttattttatctttcagccatatgctagtttttttttctcttgccaacatgcgtaaaaagggaagccaattacaagtgcaaataatgtggtattcttttgtaactcaagtcttgaaatgttctgtagtgttaagcaaagtctcctcttgcttgatactaaataaacttttgaaaaaaaaa

SEQ ID NO: 31771 - DNA, 1696 bp, Homo sapiens
agcggggtgcgcggggcggcgcgcggcgtgcaggtcgcagctgtggctcgggtgctggcaggtgctggcgggactggcggggatcgccgtggactgcctcaggggcgccgcagcccgctcggcccgagggcccgcctaaccgcgccgcccgcgcccgctcctccccccgtgcgcctggagtccacatcccgggcccggcggccggcgagcatggaggagaagtacctgcccgagctgatggcggagaaggactccctggacccctccttcacgcacgccctgcgcctggtgaaccaagaaatagaaaagtttcaaaaaggagaaggcaaggatgaagaaaagtacatcgatgtggtgattaataagaacatgaagctgggacagaaagtgttaattcccgtaaaacagttccctaagttcaactttgtggggaaacttttgggtccacgtggcaattctctgaagcgtttacaagaagaaaccttgacaaaaatgtccatccttgggaaaggttccatgagagacaaggccaaggaagaagagttgaggaaaagtggagaagcgaagtacttccatctcaatgatgatctccatgttctcattgaagtgtttgccccacctgcagaagcttatgccaggatgggacatgctttggaagaaatcaaaaagttcctcatccctgattataatgatgagatcaggcaagcacagctccaggagttaacatatttgaatggtggttcagaaaatgcagatgttccagtggttcgagggaaacccaccttgcgtacaagaggtgtaccagccccagcaataaccaggggaaggggaggagttacagcccggccagttggagttgtagtaccacgagggacgccaactcccagaggagtcctgtccacccgagggccagtgagtcggggaagaggacttctcactcccagagcaagaggagtccccccaactgggtacagacctccaccgccacccccgacacaagagacttatggagaatattggtgctgattactatgattacggacatggactcagtgaggagacttatgattcctacgggcaagaagagtggactaactcaagacacaaggcaccttcagcgaggacagcaaagggcgtctacagagaccagccatatggcagatactgattgtactgtctgatgttgtgaaatagccaatctccaccagtcctgtatactgttcaaagtaatttttttctatgaacaatccctttttaaataaatcaaaatgcttaaaatctgaatggatggaacttaaaactactttgttgaaacatcaacctgggcagaaaaaaagaaaaaaagacatgtaaaattttgttatttccagtctgtatatgaaaaaataggtcatcaaaaggaaaaaaaataactttgattaactagtgttaaacaaaaaataggtttactaaatatgttaatctattcttttaacataagcctcacctttcattttaaaggtttccatagaatttagttattttatctttcagccatatgctagtttttttttctcttgccaacatgcgtaaaaagggaagccaattacaagtgcaaataatgtggtattcttttgtaactcaagtcttgaaatgttctgtagtgttaagcaaagtctcctcttgcttgatactaaataaacttttgaaaaaaaaa

SEQ ID NO: 31772 - DNA, 303 bp, Homo sapiens
cacggagacattaccacacggacacaccgtcacatggacacactggcacattcacatggacggacacacagacatacggagaaatccacacggacacaccaccacactatcacagggacacacagacacacggagacatcacatggacacaccaccacactatcacagggacacacagacacacaagagacatcactacactgtcacatggacacaccatcacaggaacacacaaacacactgccacatggacactgccacacacagacacaccgccacactgtcacatggacacacctccac

SEQ ID NO: 31773 - DNA, 759 bp, Homo sapiens
acacttattaatagtctttaaaaattttacctgtggaccaggttgaatttagtaatcctgggttagtttttagtgttatgggttagaacccagctgccaggtgctgttactcatcatgtagcacattgtcctggaagccagctgatttttcaatactgagttaattgacctggttctttgtagaaccatttgtggttagtaaggaaatatgcaaaatcacttgagatcaaataaagatcctctatcccataccatacgagccaacctcaataatttattttggctgcaatattttctgtgcaccagaaagtcttccttgatatttcgtcttcagttgttacagttagctttactctgcgtaaatgcactttagttttaatttatggtgtgaaccatttttgtggtcttatttctctaacacattatatgcccatataacaaattttcccagagatgcaaaaaaaaaaaaatcaaaatctccctcacaaattgaaaccagtgtgagtaaacaaaaatcaacagtatgctgtcatcatttgtttatactgaactataatgtttattataaagagaacgagatgtagcactcccctccctccactgtggttctttgctgccccacatgagctacctgctctttaatttttgaacattgggatgaatgaaatgttcagttgtgagaaaagctagttgtgccaaataagaatgaagtaactcttccaagattccccccaaacacttttaaattccatgttcatt

SEQ ID NO: 31774 - DNA, 386 bp, Homo sapiens
tttgagacagagtctggctctaccgcccaggctgaagtgcaatggcgcgatctcggctcactgcaagctccgcctcccgggttcacgccattctcctgcctcagcctcccgagtagctgagatggtaggatttgcttgagcccaggggttcaaggctgcaatgagccatgatagcaccactgcactccagcctgggcaacagtgagaacttgtctcataaaataaaataataaaatagattagccaggatgctctctgggaccaatgatcatcctatatcaaaccagcctaaacaaaaaagtgtttttggtaactggaatggatccaacaggaagaatgagcttatggaaccagagcaccttgaaaaacttgacagcccaggagtg

SEQ ID NO: 31775 - DNA, 348 bp, Homo sapiens
gaggtgctgaaaggtgttaagtaatattcccaaggacactcaactaggaaatatgagaaccaggttctgaatgcagacaatttgattccaaaactgcattcaactgcaaagctgtctcgtgaactgcacttagcagataagtggtggtactcaagccagaagtcaggtctgatctttcggttccatcattccatactgcctgttcctctgtcttctcaatgaataatgattgtcaagccactctaagtttttttagatatgtatttgctcattttggaaattacagaaaattacaaagaaaaatctataatctagccatctagaaataactatgcttatgattttaat

SEQ ID NO: 31776 - DNA, 330 bp, Homo sapiens
tgttttttttttgagacagagcttcactctgtcccccaagggtagagtgcagcaagtgtggcggtgcaatcatagcccactgcagcctggactcctcgcctcaagcaatccttccacctcagccttctgagtagttgagattataggcgtcaagccactgtgccccactacatcttggtcttttctgtatcttagttacatgcttgccttctcacccacaaaacacatcaggagtaaaaagcaaaaaaatcagtcaacaacacgacatatacacataaataagacatcttctcttttggatggttaggaagatctttaaagacactcaaa

SEQ ID NO: 31777 - DNA, 841 bp, Homo sapiens
catcctgcaccctcagaattcattctcagatcagcttcccagatttttgccaatatcaattaaaaaaattttttagccaaccatgtactgtgagtaagccaatatcaattagcaaaatctttaagtttcttttggtgattcagtatcttccccctggagttttttgatgattcagtaccctcctagatttggcccctggggcctgcggggatgtgacttgtcatttaattctggagaaaatgaggggtagggcttataaggagactccttcggggcagggtcattacagggtgtgttacatagggaaatgctagctgctggctagctctcgctcttgaaaggctcttcctccctcaactgaaatggggaagggggaaccccggccgactgaggtcctgacatctttagcacatggcttcttaggtcacccagggcatccaggttaccagcttgggaaacaggagatgtaggttggaggaagaggctacagcccaccctggaaataactgccatccgtcccacccatatggttaggctttgtgtccccacccagatctcatctcgaattacaatccccacgggttgagggatggaccaggtggaggtacttgcatcctgggggcagtttcccccatgctgtgctcgtgacagtgagtgagttctcacgagatctgatggttttaaagcgtggcagttcctctttctcgtgcttacatcctcgtaactatcctgtggagaaggtgtctgctttcccctacctccatggttgtaagtttcctgaagcctccccagccgtgtggaactgtgagtcaattaaacttctttataagttaaaaagtct

SEQ ID NO: 31778 - DNA, 398 bp, Homo sapiens
  misc_feature (47)..(47): n is a, c, g, or t
cagtgagccgagatcgcgccactgcactccagcctgggcggcagagngagactttgtctcaaaaaaaaaaaaaaagaaaaaaacagtttaccattctatcagaaaatgttgaccaccctcatatttttggtaaactgcagtaatttttccttaatactttttgcaagcttttgcatgcataagctccagtatcacacttaattttgcttgcttgctctctgaagggagttcggatgaccgttacagcaaagtggattttgcgtccaaagtgataagccaaatatcaggattttcccagtttctccgtaggactgatgtttagaggaaagccttccctgactcaaatatgtttctccatataaaaaggggaaagtaaaatgggttttctttctggtggt

SEQ ID NO: 31779 - DNA, 388 bp, Homo sapiens
agggcaggaaggtttggagcatgggaggagtaccaggattcagggggcacttgattcttggccgtagacgtccagccaccaagaagcctggctgcctttaccatgcgggtcattctcagggtgggagggttaagaaagctctagcttcgatttattctgtacttgaaaattctcttgcccaaataagtgcctttaaaaagtgaagttgctctgctctcctttcagactcctctaacataattttcttgtttagctgtaaggtaaagaaaactgcattataagaaaccacatttatggccgggctgggtaatcccagcactttgggagtctgaggcaatctgcatgaactcaggagtttgagaccagcctgggcaacatggcaaaaccc

SEQ ID NO: 31780 - DNA, 505 bp, Homo sapiens
ctattatgaatcatgcaactatgtatattattatacaggtcttttgtggacacatctccattatttttgggtaaatatttaggaatggaatgttggtcagctgtaggctccattttacaagaaactgccaaactgtcttccattctacacttttgtttgcaatgtatgaaagttctggttgcttcctatcctaatcaacatttggtgtgggactacaggaacatgccactacacctgattgattaaagaaaattttttgtagagacagggttttgctctattgcccaggctggtcttgaattcctggcctcaagtgatcctcccgcctcagccactcaaagctctgggattacaggtgtgagtcgccacgcccggccaaaatttattaattggtagttggcaattgttgatggaaaagaaaaagcaggttacaagcaatgtactttttgatgtctttggtattatcacaggcaaataaattatatatgtatatatattatgtata

SEQ ID NO: 31781 - DNA, 613 bp, Homo sapiens
ttccagtctgcgtggctttttattcctttttttgtgtgtcttagtatgatgactaaaatttctgtgttgaataagagcggcaggaactgacactgttaccttgtccccagtgtcagctggaaaacattctgtttttcactattaagtatgatgacagctataggttttgtgtacatattctctatcaagttgaaagagtttgacagctgggcctgcagtcactagaaatgctgtggtgctttattggaacaagctatgtatcaagaattgtgattttctgcaggcgttgctggaggaattttgacaaaggtagaagaatcaaataatggattattggttcatttgaaagatgacatatcctgtgtccttttgccatctggggctcccctctgctgatggagtatttgagaacctctatgaaggagccctggagagtgaaagttcccccagatttctgtgctcattaaacctgtagaactcttgaaaatgtgcaaggtgaagtaacaattttgatcaaacaaagctgtcagtttctgtcttgagattacagaagtaactctacaaggccaacatcccaagcacaggaaagaccagccactagggccgcagaccc

SEQ ID NO: 31782 - DNA, 428 bp, Homo sapiens
catggtgggaattcctgcctcaagtcttccatcagcttcctggcaggttggatttgatgctcctggctcatggtgggaattcctgcctcaagtcttccatcagcttcctggcaggttggatttgatgctcctggctcatggtgggaattcctgcctcaagtcctccatcagtttcccagcaagttggatttgatgagtcccaattcatctcccctcccaggaggacactgtctgcttatacagctggttctagtgttaacttatttcattgattttgtgtaccccattgtggagttaatcatccctgtgctccagaactcctcctagaatcaatgactaatgggaagattttcttctacctggttatccttccaaaaacttacgtgctaatctaagtggaaattctctaggaggaggaggaatgcgcg

SEQ ID NO: 31783 - DNA, 1379 bp, Homo sapiens
ccatgagtctatcgaaaattaggtctcagaccagaacagatcaaaatatttagtgctctctagggaaaaagcttttgagataaagtggaatttcttatttctaagaagtaggaaaagagtgttttgtttggtctctacaaattatagttatttggtttcagcctgaacaatcaccacaagcaaatactggcagaaagagtctctacaggagtggtcaaaaaagtcagttttcatttccttccaagccctagtttggctgatccatccacagaaaagcagaacaaaaggcaagggattactgcacccttaagcatccaagtggctcattcggctcgggggttatttttagcaatctggctcacactgagggcttcctgctctattcagcaaatgtgcaaatggatgctgcaggaccgtaacagtagacattgatgaagatgttgctatgaggacagattcatcaaaaatgactgacgtggagtctggggtcgccaattttgcatcttcagcaagggcaggccgccggaatgccttaccagacatccagagttcagctgccacagacggaacctcagatttgcccctcaaactggaggctctctccgtgaaggaagatgcaaaagagaaagatgaaaaaacaacacaagaccaattggaaaagcctcaaaatgaagaaaaatgaaggctcataatctatcaagagtgctgaatttctgcatgttgaaagacttagtggttctgttttcttgagacatttaatctggtggtaactgtggtaacattgcagccctaagcagcatgtgtatattagataattgtgttgtgatgctactcactttgattgcaatgatgatgtccaaggtaagctattaaaaggcaggttacttccaaatcgcactgaaggaaaaggttaagaataatacatgatcacagaaatgcataccactgtctgtaaacccaacaaaattcactgttctcttttggatttatttagcctgatgtatttttaattcaatttttatggtgatgggcaaatcattcttggtaaatgtaaatcaaacatgattgatttaaaacttcatggaatttgtagaaaattatggacatttttggtgagaaagaacaatagtcaaaactcacatggatagagtgtgtttgttttttgccaaaaatgccccagactttttcccaaacctcaaaaacgtcttggaaaaattgtaaaagtttgataacagaaacatctttaggatatttttgtctgacgtattttgcttctagtatgtgcctactgtgatttttttcatgtggaaaatgcaaaatttgtaacaaaatggttatatggaacatgcctattaaacgaattttactatcttccctaa

SEQ ID NO: 31784 - DNA, 771 bp, Homo sapiens
gcgagtagctgggactacaggcgcccgccacctcgcctggctaattttttgtatttttggtagagacggggtttcaccgtgttagccaggatggtcttgatctcctgacctcgtgatccgcccgcctcggcctcccaaagtgctgggattacaggcgtgagccaccgcgccccggcagcaaaggtttttctttcgtttaaagatgacacactctgaaattaatttgattttgagatttgagaacttggacatacatacttcctatggaagattcaatgccatccccatcaagctaccaatgactttcttcacagaattggaaaaaactactttaaagttcatatggaaccaataaagagcctgcattgccaagtcaatcctaagccaaaagaacaaagctggaggcatcacactacctgacttcaaactatactacaaggctacagtaaccaaaacagcatggtactggtaccaaaacagagatgtagaccaatggaacagaattttttgtagttttttaaaaaatcacacattttgcagccttcgtgtatttgtataaatatctgtttacacattgctttgttttctggtattatttcttgttaattccttaaggaaacattgtagactcttatatatgccttgtatattcttgttcagtgaatgaataacttaagaacagaaatatgtcatgtagatatataaatttctgagaaataatctagtcctatctccaaattactgaagacaaagaaacagaaacttggagag

SEQ ID NO: 31785 - DNA, 691 bp, Homo sapiens
gagactgcgcatgcgcgtcactagacgacacggctgtcttctttcctggagaatttctcaaggactgctggctggaaacttaacggctaatgtggatctgaccgtagtttgccaaattaagaaaacgtttttaccctgttgaagatttgctttaacttcaaaagtgatgacaagaaagtatggacaccccttcaggaccaacctgataagtcactgggtttttgtaatctcgcaatattgaaatcaagagacatcacagaacacagcagcaaagagacggggtttcaccgtgttagccaggatggtcttgatctcctgacctcgtgatccgcccgcctcggcctcccaaagtgctgggattacaggcgtgagccaccgcgccccggcagcaaaggagttaggacctttgggaagtgaatgagatcagtgctcttataaattggctccagagagctccttcgtccctttcaccatgtgaggacacagctagaagacaccatctgtgaaccagaaagtgagtccttatcagacactgaatctgctggcaccttgacttcttagccttcagaaatgtgagaattaaatttctgttgtttataagatacacaatttatgatatgttgttataacagcccaaacatatatgatgtattgaaatcttctatgaaaaattgtgtgattttcctcaatt

SEQ ID NO: 31786 - DNA, 1399 bp, Homo sapiens
agaaaaaagctaccgtggcacgtgccccggggagtgatgcggtggcccggtttgcacggagagcgggacaccgcctggggagccgcgctcgtagcctgggggcgggacgcggcggccgctccctccgcccccgagtagctgccaccgcctggctgcgccccagcccagtagctcagacgcggccgcatcccggtggactgtagaggcggcagcgagctagagcccgagtcgcagctccgggccgcagagcgctgggcgagcgcgagcgccagggcaccggcagggcaggcagctgcgcgcggctggagtcatgctatactgaaaagacacttcatcaagataactctgggagaagcagaaaaccctgtgccagggacaggaaagataggagaaagaaagtttatcagaattttttaaacctgtctcagaaataacaacatattttaatcagagatttatgttgctatgaggacagattcatcaaaaatgactgacgtggagtctggggtcgccaattttgcatcttcagcaagggcaggccgccggaatgccttaccagacatccagagttcagctgccacagacggaacctcagatttgcccctcaaactggaggctctctccgtgaaggaagatgcaaaagagaaagatgaaaaaacaacacaagaccaattggaaaagcctcaaaatgaagaaaaatgaaggctcataatctatcaagagtgctgaatttctgcatgttgaaagacttagtggttctgttttcttgagacatttaatctggtggtaactgtggtaacattgcagccctaagcagcatgtgtatattagataattgtgttgtgatgctactcactttgattgcaatgatgatgtccaaggtaagctattaaaaggcaggttacttccaaatcgcactgaaggaaaaggttaagaataatacatgatcacagaaatgcataccactgtctgtaaacccaacaaaattcactgttctcttttggatttatttagcctgatgtatttttaattcaatttttatggtgatgggcaaatcattcttggtaaatgtaaatcaaacatgattgatttaaaacttcatggaatttgtagaaaattatggacatttttggtgagaaagaacaatagtcaaaactcacatggatagagtgtgtttgttttttgccaaaaatgccccagactttttcccaaacctcaaaaacgtcttggaaaaattgtaaaagtttgataacagaaacatctttaggatatttttgtctgacgtattttgcttctagtatgtgcctactgtgatttttttcatgtggaaaatgcaaaatttgtaacaaaatggttatatggaacatgcctattaaacgaattttactatcttccctaa

SEQ ID NO: 31787 - DNA, 1118 bp, Homo sapiens
gagacgcggcgcatcccggtggacgagtcatgctatactgaaaagacacttcatcaagataactctgggagaagcagaaaaccctgtgccagggacaggaaagataggagaaagaaagtttatcagaattttttaaacctgtctcagaaataacaacatattttaatcagagatttatgttgctatgaggacagattcatcaaaaatgactgacgtggagtctggggtcgccaattttgcatcttcagcaagggcaggccgccggaatgccttaccagacatccagagttcagctgccacagacggaacctcagatttgcccctcaaactggaggctctctccgtgaaggaagatgcaaaagagaaagatgaaaaaacaacacaagaccaattggaaaagcctcaaaatgaagaaaaatgaaggctcataatctatcaagagtgctgaatttctgcatgttgaaagacttagtggttctgttttcttgagacatttaatctggtggtaactgtggtaacattgcagccctaagcagcatgtgtatattagataattgtgttgtgatgctactcactttgattgcaatgatgatgtccaaggtaagctattaaaaggcaggttacttccaaatcgcactgaaggaaaaggttaagaataatacatgatcacagaaatgcataccactgtctgtaaacccaacaaaattcactgttctcttttggatttatttagcctgatgtatttttaattcaatttttatggtgatgggcaaatcattcttggtaaatgtaaatcaaacatgattgatttaaaacttcatggaatttgtagaaaattatggacatttttggtgagaaagaacaatagtcaaaactcacatggatagagtgtgtttgttttttgccaaaaatgccccagactttttcccaaacctcaaaaacgtcttggaaaaattgtaaaagtttgataacagaaacatctttaggatatttttgtctgacgtattttgcttctagtatgtgcctactgtgatttttttcatgtggaaaatgcaaaatttgtaacaaaatggttatatggaacatgcctattaaacgaattttactatcttccctaa

SEQ ID NO: 31788 - DNA, 1397 bp, Homo sapiens
gagactgcgcatgcgcgtcactagacgacacggctgtcttctttcctggagaatttctcaaggactgctggctggaaacttaacggctaatgtggatctgaccgtagtttgccaaattaagaaaacgtttttaccctgttgaagatttgctttaacttcaaaagtgatgacaagaaagtatggacaccccttcaggaccaacctgataagtcactggtttttctttcgtttaaagatgacacactctgaaattaatttgattttgagatttgagaacttggacatacatacttcctatggaaggagtcatgctatactgaaaagacacttcatcaagataactctgggagaagcagaaaaccctgtgccagggacaggaaagataggagaaagaaagtttatcagaattttttaaacctgtctcagaaataacaacatattttaatcagagatttatgttgctatgaggacagattcatcaaaaatgactgacgtggagtctggggtcgccaattttgcatcttcagcaagggcaggccgccggaatgccttaccagacatccagagttcagctgccacagacggaacctcagatttgcccctcaaactggaggctctctccgtgaaggaagatgcaaaagagaaagatgaaaaaacaacacaagaccaattggaaaagcctcaaaatgaagaaaaatgaaggctcataatctatcaagagtgctgaatttctgcatgttgaaagacttagtggttctgttttcttgagacatttaatctggtggtaactgtggtaacattgcagccctaagcagcatgtgtatattagataattgtgttgtgatgctactcactttgattgcaatgatgatgtccaaggtaagctattaaaaggcaggttacttccaaatcgcactgaaggaaaaggttaagaataatacatgatcacagaaatgcataccactgtctgtaaacccaacaaaattcactgttctcttttggatttatttagcctgatgtatttttaattcaatttttatggtgatgggcaaatcattcttggtaaatgtaaatcaaacatgattgatttaaaacttcatggaatttgtagaaaattatggacatttttggtgagaaagaacaatagtcaaaactcacatggatagagtgtgtttgttttttgccaaaaatgccccagactttttcccaaacctcaaaaacgtcttggaaaaattgtaaaagtttgataacagaaacatctttaggatatttttgtctgacgtattttgcttctagtatgtgcctactgtgatttttttcatgtggaaaatgcaaaatttgtaacaaaatggttatatggaacatgcctattaaacgaattttactatcttccctaa

SEQ ID NO: 31789 - DNA, 1591 bp, Homo sapiens
gagactgcgcatgcgcgtcactagacgacacggctgtcttctttcctggagaatttctcaaggactgctggctggaaacttaacggctaatgtggatctgaccgtagtttgccaaattaagaaaacgtttttaccctgttgaagatttgctttaacttcaaaagtgatgacaagaaagtatggacaccccttcaggaccaacctgataagtcactgatggagtctcactctgttgcccaggctggagtccagtggtgcgatctcggctcactgcaagctctgcctcccaggtttttctttcgtttaaagatgacacactctgaaattaatttgattttgagatttgagaacttggacatacatacttcctatggaagagtctcactctgttgcttaggctagagtacagtggtgctatctcaactcactgcaacctccacctcctgagttcaagcgattctcctgcctcagactctctggagtagctgcaattataggagtcatgctatactgaaaagacacttcatcaagataactctgggagaagcagaaaaccctgtgccagggacaggaaagataggagaaagaaagtttatcagaattttttaaacctgtctcagaaataacaacatattttaatcagagatttatgttgctatgaggacagattcatcaaaaatgactgacgtggagtctggggtcgccaattttgcatcttcagcaagggcaggccgccggaatgccttaccagacatccagagttcagctgccacagacggaacctcagatttgcccctcaaactggaggctctctccgtgaaggaagatgcaaaagagaaagatgaaaaaacaacacaagaccaattggaaaagcctcaaaatgaagaaaaatgaaggctcataatctatcaagagtgctgaatttctgcatgttgaaagacttagtggttctgttttcttgagacatttaatctggtggtaactgtggtaacattgcagccctaagcagcatgtgtatattagataattgtgttgtgatgctactcactttgattgcaatgatgatgtccaaggtaagctattaaaaggcaggttacttccaaatcgcactgaaggaaaaggttaagaataatacatgatcacagaaatgcataccactgtctgtaaacccaacaaaattcactgttctcttttggatttatttagcctgatgtatttttaattcaatttttatggtgatgggcaaatcattcttggtaaatgtaaatcaaacatgattgatttaaaacttcatggaatttgtagaaaattatggacatttttggtgagaaagaacaatagtcaaaactcacatggatagagtgtgtttgttttttgccaaaaatgccccagactttttcccaaacctcaaaaacgtcttggaaaaattgtaaaagtttgataacagaaacatctttaggatatttttgtctgacgtattttgcttctagtatgtgcctactgtgatttttttcatgtggaaaatgcaaaatttgtaacaaaatggttatatggaacatgcctattaaacgaattttactatcttccctaa

SEQ ID NO: 31790 - DNA, 1157 bp, Homo sapiens
cctatgcgaggagggaggagtgggacttgggaagtcgggggagactgacccagggaagatgtggagtcatgctatactgaaaagacacttcatcaagataactctgggagaagcagaaaaccctgtgccagggacaggaaagataggagaaagaaagtttatcagaattttttaaacctgtctcagaaataacaacatattttaatcagagatttatgttgctatgaggacagattcatcaaaaatgactgacgtggagtctggggtcgccaattttgcatcttcagcaagggcaggccgccggaatgccttaccagacatccagagttcagctgccacagacggaacctcagatttgcccctcaaactggaggctctctccgtgaaggaagatgcaaaagagaaagatgaaaaaacaacacaagaccaattggaaaagcctcaaaatgaagaaaaatgaaggctcataatctatcaagagtgctgaatttctgcatgttgaaagacttagtggttctgttttcttgagacatttaatctggtggtaactgtggtaacattgcagccctaagcagcatgtgtatattagataattgtgttgtgatgctactcactttgattgcaatgatgatgtccaaggtaagctattaaaaggcaggttacttccaaatcgcactgaaggaaaaggttaagaataatacatgatcacagaaatgcataccactgtctgtaaacccaacaaaattcactgttctcttttggatttatttagcctgatgtatttttaattcaatttttatggtgatgggcaaatcattcttggtaaatgtaaatcaaacatgattgatttaaaacttcatggaatttgtagaaaattatggacatttttggtgagaaagaacaatagtcaaaactcacatggatagagtgtgtttgttttttgccaaaaatgccccagactttttcccaaacctcaaaaacgtcttggaaaaattgtaaaagtttgataacagaaacatctttaggatatttttgtctgacgtattttgcttctagtatgtgcctactgtgatttttttcatgtggaaaatgcaaaatttgtaacaaaatggttatatggaacatgcctattaaacgaattttactatcttccctaa

SEQ ID NO: 31791 - DNA, 1458 bp, Homo sapiens
gagactgcgcatgcgcgtcactagacgacacggctgtcttctttcctggagaatttctcaaggactgctggctggaaacttaacggctaatgtggatctgaccgtagtttgccaaattaagaaaacgtttttaccctgttgaagatttgctttaacttcaaaagtgatgacaagaaagtatggacaccccttcaggaccaacctgataagtcactggtttttctttcgtttaaagatgacacactctgaaattaatttgattttgagatttgagaacttggacatacatacttcctatggaaggagtcatgctatactgaaaagacacttcatcaagataactctgggagaagcagaaaaccctgtgccagggacaggaaagataggagaaagaaagtttatcagaattttttaaacctgtctcagaaataacaacatattttaatcagagatttgctgaagcttcagagatcacctgccaaacacaggctgaacctgacagcatgtcacaccaggatgttgctatgaggacagattcatcaaaaatgactgacgtggagtctggggtcgccaattttgcatcttcagcaagggcaggccgccggaatgccttaccagacatccagagttcagctgccacagacggaacctcagatttgcccctcaaactggaggctctctccgtgaaggaagatgcaaaagagaaagatgaaaaaacaacacaagaccaattggaaaagcctcaaaatgaagaaaaatgaaggctcataatctatcaagagtgctgaatttctgcatgttgaaagacttagtggttctgttttcttgagacatttaatctggtggtaactgtggtaacattgcagccctaagcagcatgtgtatattagataattgtgttgtgatgctactcactttgattgcaatgatgatgtccaaggtaagctattaaaaggcaggttacttccaaatcgcactgaaggaaaaggttaagaataatacatgatcacagaaatgcataccactgtctgtaaacccaacaaaattcactgttctcttttggatttatttagcctgatgtatttttaattcaatttttatggtgatgggcaaatcattcttggtaaatgtaaatcaaacatgattgatttaaaacttcatggaatttgtagaaaattatggacatttttggtgagaaagaacaatagtcaaaactcacatggatagagtgtgtttgttttttgccaaaaatgccccagactttttcccaaacctcaaaaacgtcttggaaaaattgtaaaagtttgataacagaaacatctttaggatatttttgtctgacgtattttgcttctagtatgtgcctactgtgatttttttcatgtggaaaatgcaaaatttgtaacaaaatggttatatggaacatgcctattaaacgaattttactatcttccctaa

SEQ ID NO: 31792 - DNA, 1504 bp, Homo sapiens
ccatgagtctatcgaaaattaggtctcagaccagaacagatcaaaatatttagtgctctctagggaaaaagcttttgagataaagtggaatttcttatttctaagaagtaggaaaagagtgttttgtttggtctctacaaattatagttatttggtttcagcctgaacaatcaccacaagcaaatactggcagaaagagtctctacaggagtggtcaaaaaagtcagttttcatttccttccaagccctagtttggctgatccatccacagaaaagcagaacaaaaggcaagggattactgcacccttaagcatccaagtggctcattcggctcgggggttatttttagcaatctggctcacactgagggcttcctgctctattcagcaaatgtgcaaatggatgctgcaggaccgtaacagtagacattgatgaaggttgtgatcaatgattagactctcaagcctgttgtgtttttgatctagccatgcctttcaaccactgtggtgaacatttagctctgaataggctcatcttcttcatatgcacattctatttgtagatgttgctatgaggacagattcatcaaaaatgactgacgtggagtctggggtcgccaattttgcatcttcagcaagggcaggccgccggaatgccttaccagacatccagagttcagctgccacagacggaacctcagatttgcccctcaaactggaggctctctccgtgaaggaagatgcaaaagagaaagatgaaaaaacaacacaagaccaattggaaaagcctcaaaatgaagaaaaatgaaggctcataatctatcaagagtgctgaatttctgcatgttgaaagacttagtggttctgttttcttgagacatttaatctggtggtaactgtggtaacattgcagccctaagcagcatgtgtatattagataattgtgttgtgatgctactcactttgattgcaatgatgatgtccaaggtaagctattaaaaggcaggttacttccaaatcgcactgaaggaaaaggttaagaataatacatgatcacagaaatgcataccactgtctgtaaacccaacaaaattcactgttctcttttggatttatttagcctgatgtatttttaattcaatttttatggtgatgggcaaatcattcttggtaaatgtaaatcaaacatgattgatttaaaacttcatggaatttgtagaaaattatggacatttttggtgagaaagaacaatagtcaaaactcacatggatagagtgtgtttgttttttgccaaaaatgccccagactttttcccaaacctcaaaaacgtcttggaaaaattgtaaaagtttgataacagaaacatctttaggatatttttgtctgacgtattttgcttctagtatgtgcctactgtgatttttttcatgtggaaaatgcaaaatttgtaacaaaatggttatatggaacatgcctattaaacgaattttactatcttccctaa

SEQ ID NO: 31793 - DNA, 1562 bp, Homo sapiens
agaaaaaagctaccgtggcacgtgccccggggagtgatgcggtggcccggtttgcacggagagcgggacaccgcctggggagccgcgctcgtagcctgggggcgggacgcggcggccgctccctccgcccccgagtagctgccaccgcctggctgcgccccagcccagtagctcagacgcggccgcatcccggtggactgtagaggcggcagcgagctagagcccgagtcgcagctccgggccgcagagcgctgggcgagcgcgagcgccagggcaccggcagggcaggcagctgcgcgcggctggagtcatgctatactgaaaagacacttcatcaagataactctgggagaagcagaaaaccctgtgccagggacaggaaagataggagaaagaaagtttatcagaattttttaaacctgtctcagaaataacaacatattttaatcagagatttcacctgtgccacaggccaccatggatctgcacctcgatgcccttcggagtcatgagagtgcaagcaatagcagctcaggaagcagcagcagaggagaccagaaaggtcactacctttgcatgaacaacaatggcaaccaggataccatgcttggttctccatgatgttgctatgaggacagattcatcaaaaatgactgacgtggagtctggggtcgccaattttgcatcttcagcaagggcaggccgccggaatgccttaccagacatccagagttcagctgccacagacggaacctcagatttgcccctcaaactggaggctctctccgtgaaggaagatgcaaaagagaaagatgaaaaaacaacacaagaccaattggaaaagcctcaaaatgaagaaaaatgaaggctcataatctatcaagagtgctgaatttctgcatgttgaaagacttagtggttctgttttcttgagacatttaatctggtggtaactgtggtaacattgcagccctaagcagcatgtgtatattagataattgtgttgtgatgctactcactttgattgcaatgatgatgtccaaggtaagctattaaaaggcaggttacttccaaatcgcactgaaggaaaaggttaagaataatacatgatcacagaaatgcataccactgtctgtaaacccaacaaaattcactgttctcttttggatttatttagcctgatgtatttttaattcaatttttatggtgatgggcaaatcattcttggtaaatgtaaatcaaacatgattgatttaaaacttcatggaatttgtagaaaattatggacatttttggtgagaaagaacaatagtcaaaactcacatggatagagtgtgtttgttttttgccaaaaatgccccagactttttcccaaacctcaaaaacgtcttggaaaaattgtaaaagtttgataacagaaacatctttaggatatttttgtctgacgtattttgcttctagtatgtgcctactgtgatttttttcatgtggaaaatgcaaaatttgtaacaaaatggttatatggaacatgcctattaaacgaattttactatcttccctaa

SEQ ID NO: 31794 - DNA, 1735 bp, Homo sapiens
  misc_feature (1418)..(1418): n is a, c, g, or t
agaaaaaagctaccgtggcacgtgccccggggagtgatgcggtggcccggtttgcacggagagcgggacaccgcctggggagccgcgctcgtagcctgggggcgggacgcggcggccgctccctccgcccccgagtagctgccaccgcctggctgcgccccagcccagtagctcagacgcggccgcatcccggtggactgtagaggcggcagcgagctagagcccgagtcgcagctccgggccgcagagcgctgggcgagcgcgagcgccagggcaccggcagggcaggcagctgcgcgcggctggagtcatgctatactgaaaagacacttcatcaagataactctgggagaagcagaaaaccctgtgccagggacaggaaagataggagaaagaaagtttatcagaattttttaaacctgtctcagaaataacaacatattttaatcagagatttatgttgctatgaggacagattcatcaaaaatgactgacgtggagtctggggtcgccaattttgcatcttcagcaagggcaggccgccggaatgccttaccagacatccagagttcagctgccacagacggaacctcagatttgcccctcaaactggaggctctctccgtgaaggaagatgcaaaagagaaagatgaaaaaacaacacaagaccaattggaaaagcctcaaaatgaagaaaaatgaaggctcataatctatcaagagtgctgaatttctgcatgttgaaagacttagtggttctgttttcttgagacatttaatctggtggtaactgtggtaacattgcagccctaagcagcatgtgtatattagataattgtgttgtgatgctactcactttgattgcaatgatgatgtccaaggtaagctattaaaaggcaggttacttccaaatcgcactgaaggaaaaggttaagaataatacatgatcacagaaatgcataccactgtctgtaaacccaacaaaattcactgttctcttttggatttatttagcctgatgtatttttaattcaatttttatggtgatgggcaaatcattcttggtaaatgtaaatcaaacatgattgatttaaaacttcatggaatttgtagaaaattatggacatttttggtgagaaagaacaatagtcaaaactcacatggatagagtgtgtttgttttttgccaaaaatgccccagactttttcccaaacctcaaaaacgtcttggaaaaattgtaaaagtttgataacagaaacatctttaggatatttttgtctgacgtattttgcttctagtatgtgcctactgtgatttttttcatgtggaaaatgcaaaatttgtaacaaaatggttatatggaacatgcctattaaacgaattttactatcttccctaaaaaaaaaaaaaaaaaaaanaaaaaaaaactgttgttgggccgcgccttgggacctctgaaaagagtttttagaaacccaattcgttgtggggccgcgggggccccattggtgttagggaccctgtggccaaagcgtgtcccagaaggaaacccggggccacagcaagaagggttggggagtttctcccccaattaaaaaaaccccgcggggagcaaccccaagctgtgttctcgacccaattcccgaaatgagagttcagaagggccataagggggttcttatccaggggatgtcacaagagagcccaatttaaattagcggattagtgggagacc

SEQ ID NO: 31795 - DNA, 1451 bp, Homo sapiens
ccatgagtctatcgaaaattaggtctcagaccagaacagatcaaaatatttagtgctctctagggaaaaagcttttgagataaagtggaatttcttatttctaagaagtaggaaaagagtgttttgtttggtctctacaaattatagttatttggtttcagcctgaacaatcaccacaagcaaatactggcagaaagagtctctacaggagtggtcaaaaaagtcagttttcatttccttccaagccctagtttggctgatccatccacagaaaagcagaacaaaaggcaagggattactgcacccttaagcatccaagtggctcattcggctcgggggttatttttagcaatctggctcacactgagggcttcctgctctattcagcaaatgtgcaaatggatgctgcaggaccgtaacagtagacattgatgaaggttgtgatcaatgattagactctcaagcctgttgtgtttttgatctagccatgcctttcaaccactgtggtgaacatttagctctgaataggctcatcttcttcatatgcacattctatttgtagatgttgctatgaggacagattcatcaaaaatgactgacgtggagtctggggtcgccaattttgcatcttcagcaagggcaggccgccggaatgccttaccagacatccagagttcagctgccacagacggaacctcagatttgcccctcaaactggaggctctctccgtgaaggaagatgcaaaagagaaagatgaaaaaacaacacaagaccaattggaaaagcctcaaaatgaagaaaaatgaaggctcataatctatcaagagtgctgaatttctgcatgttgaaagacttagtggttctgttttcttgagacatttaatctggtggtaactgtggtaacattgcagccctaagcagcatgtgtatattagataattgtgttgtgatgctactcactttgattgcaatgatgatgtccaaggtaagctatatgatcacagaaatgcataccactgtctgtaaacccaacaaaattcactgttctcttttggatttatttagcctgatgtatttttaattcaatttttatggtgatgggcaaatcattcttggtaaatgtaaatcaaacatgattgatttaaaacttcatggaatttgtagaaaattatggacatttttggtgagaaagaacaatagtcaaaactcacatggatagagtgtgtttgttttttgccaaaaatgccccagactttttcccaaacctcaaaaacgtcttggaaaaattgtaaaagtttgataacagaaacatctttaggatatttttgtctgacgtattttgcttctagtatgtgcctactgtgatttttttcatgtggaaaatgcaaaatttgtaacaaaatggttatatggaacatgcctattaaacgaattttactatcttccctaa

SEQ ID NO: 31796 - DNA, 705 bp, Homo sapiens
tatactgaaaagacacttcatcaagataactctgggagaagcagaaaaccctgtgccagggacaggaaagataggagtaagtatatttttgttccattgatcttggaacatatggaataatatattgaagatgttcctaaaaatatatttgttgctataaagccagatgacagcaaagaaaatgtaaggtgggatatcttcattttagaaaacaatgtagtttaatataagattgatagaatatattgttaatttctaattaatagcaaacgatacatactgggaccttgagatacacattttcaactcatatctgccagggataagtgagcttggtttgatatttccactcttagctgtgcctacttaaatggttcttatagaggcagctagcccatcagaatagtattttgaaatttatagcctttaaaatagaagagaaattcatactgcctatcaggtcttataaactgactgcttttcttattactactctcctcagagaccatagtaatagaattataatcagtacctacaattaaatattcttgatgacactaataggtgaacataaacctcaagttaatacttgtttgagagacaggtttttgtgtgctggtatctcacagatatctgtcctatctatctatctatctatctatctatctatctatctatctatccatctatctatgacagatatct

SEQ ID NO: 31797 - DNA, 513 bp, Homo sapiens
ctttccaatattttccgaatttttaaaaagaaatccctttgaactgtcaaagcatgatgctatggtctgaatatctgtgtcccccctgcaaatctacatgttgaaacttaatcaccaatgttactgtgttaggagttaggacctttgggaagtgaatgagatcagtgctcttataaattggctccagagagctccttcgtccctttcaccatgtgaggacacagctagaagacaccatctgtgaaccagaaagtgagtccttatcagacactgaatctgctggcaccttgacttcttagccttcagaaatgtgagaattaaatttctgttgtttataagatacacaatttatgatatgttgttataacagcccaaacatatatgatgtattgaaatcttctatgaaaaattgtgtgattttcctcaatttcttcatgtttctaacagattttattttattatgcatatctgaagctgtgcttttcagcatataaatgtttattgttctataac

SEQ ID NO: 31798 - DNA, 169 bp, Homo sapiens
gacagtcaccaggctagacatggtgatcagagagctctagcctgagctctggtaagcaggaatgaagtactgactggttaaggcactgttttctcattgcatttacaggctgaagcttcagagatcacctgccaaacacaggctgaacctgacagcatgtcacaccagg

SEQ ID NO: 31799 - DNA, 344 bp, Homo sapiens
atttttggtgagaaagaacaatagtcaaaactcacatggatagagtgtgtttgttttttgccaaaaatgccccagactttttcccaaacctcaaaaacgtcttggaaaaattgtaaaagtttgataacagaaacatctttaggatatttttgtctgacgtattttgcttctagtatgtgcctactgtgatttttttcatgtggaaaatgcaaaatttgtaacaaaatggttatatggaacatgcctattaaacgaattttactatcttccctaactttggtctgtgtatgtgtgtgtgttttactttaatatgaattatacaaaatactagttgttttacactc

SEQ ID NO: 31800 - DNA, 1332 bp, Homo sapiens
agaaaaaagctaccgtggcacgtgccccggggagtgatgcggtggcccggtttgcacggagagcgggacaccgcctggggagccgcgctcgtagcctgggggcgggacgcggcggccgctccctccgcccccgagtagctgccaccgcctggctgcgccccagcccagtagctcagacgcggccgcatcccggtggactgtagaggcggcagcgagctagagcccgagtcgcagctccgggccgcagagcgctgggcgagcgcgagcgccagggcaccggcagggcaggcagctgcgcgcggctggagtcatgctatactgaaaagacacttcatcaagataactctgggagaagcagaaaaccctgtgccagggacaggaaagataggaatgttgctatgaggacagattcatcaaaaatgactgacgtggagtctggggtcgccaattttgcatcttcagcaagggcaggccgccggaatgccttaccagacatccagagttcagctgccacagacggaacctcagatttgcccctcaaactggaggctctctccgtgaaggaagatgcaaaagagaaagatgaaaaaacaacacaagaccaattggaaaagcctcaaaatgaagaaaaatgaaggctcataatctatcaagagtgctgaatttctgcatgttgaaagacttagtggttctgttttcttgagacatttaatctggtggtaactgtggtaacattgcagccctaagcagcatgtgtatattagataattgtgttgtgatgctactcactttgattgcaatgatgatgtccaaggtaagctattaaaaggcaggttacttccaaatcgcactgaaggaaaaggttaagaataatacatgatcacagaaatgcataccactgtctgtaaacccaacaaaattcactgttctcttttggatttatttagcctgatgtatttttaattcaatttttatggtgatgggcaaatcattcttggtaaatgtaaatcaaacatgattgatttaaaacttcatggaatttgtagaaaattatggacatttttggtgagaaagaacaatagtcaaaactcacatggatagagtgtgtttgttttttgccaaaaatgccccagactttttcccaaacctcaaaaacgtcttggaaaaattgtaaaagtttgataacagaaacatctttaggatatttttgtctgacgtattttgcttctagtatgtgcctactgtgatttttttcatgtggaaaatgcaaaatttgtaacaaaatggttatatggaacatgcctattaaacgaattttactatcttccctaa

SEQ ID NO: 31801 - DNA, 2880 bp, Homo sapiens
gtcgaccctctctcaccacccatccaggagttttatattctcctgtaaaataagcatgttgtgagaagttccctgaggaaatttgaagacaagtgtatgagagctctggagccccatccccctgccctgagcatagtcgccaaaaggactttccacttagtttacttcatgcttgcttttgagcctgcggcaaaaaattctaccttctgagtgactgtgggtggagggagggcctgagatgacatcaaatcacagtctttcctcctcccctcaggaagtaaagtccactagcaggagggcctaaatcgtctgagccctccttggctcttacaatgctcacttgttttcacaatgcagcaaaatgaaatgccttagaaaaagagtaacattccagaaaacggtgtaatttatttttcttccttaattgccccatctgtggaggatttctttgctgaacaccacatcaaagggatcttctgcatttaaaatagaagaggcatcatgctgaagagggaggggaaggtccaaccttacactaaaaccctggatggaggatggggatggatgattgtgattcattttttcctggtgaatgtgtttgtgatggggatgaccaagacttttgcaattttctttgtggtctttcaagaagagtttgaaggcacctcagagcaaattggttggattggatccatcatgtcatctcttcgtttttgtgcaggtcccctggttgctattatttgtgacatacttggagagaaaactacctccattcttggggctttcgttgttactggtggatatctgatcagcagctgggccacaagtattccttttctttgtgtgactatgggacttctacccggtttgggttctgctttcttataccaagtggctgctgtggtaactaccaaatacttcaaaaaacgattggctctttctacagctattgcccgttctgggatgggactgacttttcttttggcaccctttacaaaattcctgatagatctgtatgactggacaggagcccttatattatttggagctatcgcattgaatttggtgccttctagtatgctcttaagacccatccatatcaaaagtgagaacaattctggtattaaagataaaggcagcagtttgtctgcacatggtccagaggcacatgcaacagaaacacactgccatgagacagaagagtctaccatcaaggacagtactacgcagaaggctggactacctagcaaaaatttaacagtctcacaaaatcaaagtgaagagttctacaatgggcctaacaggaacagactgttattaaagagtgatgaagaaagtgataaggttatttcgtggagctgcaaacaactgtttgacatttctctctttagaaatcctttcttctacatatttacttggtcttttctcctcagtcagttagcatacttcatccctacctttcacctggtagccagagccaaaacactggggattgacatcatggatgcctcttaccttgtttctgtagcaggtatccttgagacggtcagtcagattatttctggatgggttgctgatcaaaactggattaagaagtatcattaccacaagtcttacctcatcctctgcggcatcactaacctgcttgctcctttagccaccacatttccactacttatgacctacaccatctgctttgccatctttgctggtggttacctggcattgatactgcctgtactggttgatctgtgtaggaattctacagtaaacaggtttttgggacttgccagtttctttgctgggatggctgtcctttctggaccacctatagcaggctggttatatgattatacccagacatacaatggctctttctacttctctggcatatgctatctcctctcttcagtttcctttttttttgtaccattggccgaaagatggaaaaacagtctgacctgaaagaaagaagactgcaatcaagtgagagctaaacaaaagaaaacctaaactaatgtcattggaaacaaaagcttgaaagaaacacatcgcatctacatttgtaacatgagaaggaaaacaatttttttttttttttttttgagacggagtctcgctctttcgcccaggctggagtgcagtggcgcaatctcggctcactgtaatctccgcctcctgggttcaagggattctcctgcctcagcctcccaagtagctgggactacaggcacacgccaccacacccagctaattttttgtatttttagtagaggcggggtttcaccatgttagccaggatggtctccatctcctgacctcgtgatccgcccgccttgtcctccaaagtgctgggattacaggcatgagccactgggcgcggccagataagtttttaaggttccttcttgctttagcattctgagaaatgtctaattggtagtaagacaagagtaatagcaacctgtattgttagtatttaaccaaataggctaaaattttaatcaggtaccttatgtattaaatagaaatcggaatgtaccataataaatccaaactctcaattacgccatggtaattcagtcactaaaatatgtaaagatagaaaattttttaatttaaagaagtgtgaaacatagccattgattgatcagaattctggaatctgaatattaaaaccttacttagtgactggaatggtatatgctccctccaaaagtttatctttgtttattgattaaaggtaatccttactttctttgtattacttaggttcttaattaaaggtaatccttactttctttgtattacttaggttcttaaatttctatgataaacatgtattgctaaataataaaaagtatataaaaattgctttaa

SEQ ID NO: 31802 - DNA, 697 bp, Homo sapiens
gatatttgggaacacgtgctcatgcactatggaaaatatacttactgtgtcacatacgagggactacagcgtgggaaaatgatagtctatacaatcatgaaattggtggggtgagaggattaacaagtatagaccttgagtccatatgaaaaggaagtgaagacgtgattacaggggatgatgtcactggggagtggcaaggatagacgtgatatcggttccttcttgctttagcattctgagaaatgtctaattggtagtaagacaagagtaatagcaacctgtattgttagtatttaaccaaataggctaaaattttaatcaggtaccttatgtattaaatagaaatcggaatgtaccataataaatccaaactctcaattacgccatggtaattcagtcactaaaatatgtaaagatagaaaattttttaatttaaagaagtgtgaaacatagccattgattgatcagaattctggaatctgaatattaaaaccttacttagtgactggaatggtatatgctccctccaaaagtttatctttgtttattgattaaaggtaatccttactttctttgtattacttaggttcttaattaaaggtaatccttactttctttgtattacttaggttcttaaatttctatgataaacatgtattgctaaataataaaaagtatataaaaattgctttaa

SEQ ID NO: 31803 - DNA, 2747 bp, Homo sapiens
gtcgaccctctctcaccacccatccaggagttttatattctcctgtaaaataagcatgttgtgagaagttccctgaggaaatttgaagacaagtgtatgagagctctggagccccatccccctgccctgagcatagtcgccaaaaggactttccacttagtttacttcatgcttgcttttgagcctgcggcaaaaaattctaccttctgagtgactgtgggtggagggagggcctgagatgacatcaaatcacagtctttcctcctcccctcaggaagtaaagtccactagcaggagggcctaaatcgtctgagccctccttggctcttacaatgctcacttgttttcacaatgcagcaaaatgaaatgccttagaaaaagagtaacattccagaaaacggtgtaatttatttttcttccttaattgccccatctgtggaggatttctttgctgaacaccacatcaaagggatcttctgcatttaaaatagaagaggcatcatgctgaagagggaggggaaggtccaaccttacactaaaaccctggatggaggatggggatggatgattgtgattcattttttcctggtcccctggttgctattatttgtgacatacttggagagaaaactacctccattcttggggctttcgttgttactggtggatatctgatcagcagctgggccacaagtattccttttctttgtgtgactatgggacttctacccggtttgggttctgctttcttataccaagtggctgctgtggtaactaccaaatacttcaaaaaacgattggctctttctacagctattgcccgttctgggatgggactgacttttcttttggcaccctttacaaaattcctgatagatctgtatgactggacaggagcccttatattatttggagctatcgcattgaatttggtgccttctagtatgctcttaagacccatccatatcaaaagtgagaacaattctggtattaaagataaaggcagcagtttgtctgcacatggtccagaggcacatgcaacagaaacacactgccatgagacagaagagtctaccatcaaggacagtactacgcagaaggctggactacctagcaaaaatttaacagtctcacaaaatcaaagtgaagagttctacaatgggcctaacaggaacagactgttattaaagagtgatgaagaaagtgataaggttatttcgtggagctgcaaacaactgtttgacatttctctctttagaaatcctttcttctacatatttacttggtcttttctcctcagtcagttagcatacttcatccctacctttcacctggtagccagagccaaaacactggggattgacatcatggatgcctcttaccttgtttctgtagcaggtatccttgagacggtcagtcagattatttctggatgggttgctgatcaaaactggattaagaagtatcattaccacaagtcttacctcatcctctgcggcatcactaacctgcttgctcctttagccaccacatttccactacttatgacctacaccatctgctttgccatctttgctggtggttacctggcattgatactgcctgtactggttgatctgtgtaggaattctacagtaaacaggtttttgggacttgccagtttctttgctgggatggctgtcctttctggaccacctatagcaggctggttatatgattatacccagacatacaatggctctttctacttctctggcatatgctatctcctctcttcagtttcctttttttttgtaccattggccgaaagatggaaaaacagtctgacctgaaagaaagaagactgcaatcaagtgagagctaaacaaaagaaaacctaaactaatgtcattggaaacaaaagcttgaaagaaacacatcgcatctacatttgtaacatgagaaggaaaacaatttttttttttttttttttgagacggagtctcgctctttcgcccaggctggagtgcagtggcgcaatctcggctcactgtaatctccgcctcctgggttcaagggattctcctgcctcagcctcccaagtagctgggactacaggcacacgccaccacacccagctaattttttgtatttttagtagaggcggggtttcaccatgttagccaggatggtctccatctcctgacctcgtgatccgcccgccttgtcctccaaagtgctgggattacaggcatgagccactgggcgcggccagataagtttttaaggttccttcttgctttagcattctgagaaatgtctaattggtagtaagacaagagtaatagcaacctgtattgttagtatttaaccaaataggctaaaattttaatcaggtaccttatgtattaaatagaaatcggaatgtaccataataaatccaaactctcaattacgccatggtaattcagtcactaaaatatgtaaagatagaaaattttttaatttaaagaagtgtgaaacatagccattgattgatcagaattctggaatctgaatattaaaaccttacttagtgactggaatggtatatgctccctccaaaagtttatctttgtttattgattaaaggtaatccttactttctttgtattacttaggttcttaattaaaggtaatccttactttctttgtattacttaggttcttaaatttctatgataaacatgtattgctaaataataaaaagtatataaaaattgctttaa

SEQ ID NO: 31804 - DNA, 2603 bp, Homo sapiens
gtcgaccctctctcaccacccatccaggagttttatattctcctgtaaaataagcatgttgtgagaagttccctgaggaaatttgaagacaagtgtatgagagctctggagccccatccccctgccctgagcatagtcgccaaaaggactttccacttagtttacttcatgcttgcttttgagcctgcggcaaaaaattctaccttctgagtgactgtgggtggagggagggcctgagatgacatcaaatcacagtctttcctcctcccctcaggaagtaaagtccactagcaggagggcctaaatcgtctgagccctccttggctcttacaatgctcacttgttttcacaatgcagcaaaatgaaatgccttagaaaaagagtaacattccagaaaacggtgtaatttatttttcttccttaattgccccatctgtggaggatttctttgctgaacaccacatcaaagggatcttctgcatttaaaatagaagaggcatcatgctgaagagggaggggaaggtccaaccttacactaaaaccctggatggaggatggggatggatgattgtgattcattttttcctggtttgggttctgctttcttataccaagtggctgctgtggtaactaccaaatacttcaaaaaacgattggctctttctacagctattgcccgttctgggatgggactgacttttcttttggcaccctttacaaaattcctgatagatctgtatgactggacaggagcccttatattatttggagctatcgcattgaatttggtgccttctagtatgctcttaagacccatccatatcaaaagtgagaacaattctggtattaaagataaaggcagcagtttgtctgcacatggtccagaggcacatgcaacagaaacacactgccatgagacagaagagtctaccatcaaggacagtactacgcagaaggctggactacctagcaaaaatttaacagtctcacaaaatcaaagtgaagagttctacaatgggcctaacaggaacagactgttattaaagagtgatgaagaaagtgataaggttatttcgtggagctgcaaacaactgtttgacatttctctctttagaaatcctttcttctacatatttacttggtcttttctcctcagtcagttagcatacttcatccctacctttcacctggtagccagagccaaaacactggggattgacatcatggatgcctcttaccttgtttctgtagcaggtatccttgagacggtcagtcagattatttctggatgggttgctgatcaaaactggattaagaagtatcattaccacaagtcttacctcatcctctgcggcatcactaacctgcttgctcctttagccaccacatttccactacttatgacctacaccatctgctttgccatctttgctggtggttacctggcattgatactgcctgtactggttgatctgtgtaggaattctacagtaaacaggtttttgggacttgccagtttctttgctgggatggctgtcctttctggaccacctatagcaggctggttatatgattatacccagacatacaatggctctttctacttctctggcatatgctatctcctctcttcagtttcctttttttttgtaccattggccgaaagatggaaaaacagtctgacctgaaagaaagaagactgcaatcaagtgagagctaaacaaaagaaaacctaaactaatgtcattggaaacaaaagcttgaaagaaacacatcgcatctacatttgtaacatgagaaggaaaacaatttttttttttttttttttgagacggagtctcgctctttcgcccaggctggagtgcagtggcgcaatctcggctcactgtaatctccgcctcctgggttcaagggattctcctgcctcagcctcccaagtagctgggactacaggcacacgccaccacacccagctaattttttgtatttttagtagaggcggggtttcaccatgttagccaggatggtctccatctcctgacctcgtgatccgcccgccttgtcctccaaagtgctgggattacaggcatgagccactgggcgcggccagataagtttttaaggttccttcttgctttagcattctgagaaatgtctaattggtagtaagacaagagtaatagcaacctgtattgttagtatttaaccaaataggctaaaattttaatcaggtaccttatgtattaaatagaaatcggaatgtaccataataaatccaaactctcaattacgccatggtaattcagtcactaaaatatgtaaagatagaaaattttttaatttaaagaagtgtgaaacatagccattgattgatcagaattctggaatctgaatattaaaaccttacttagtgactggaatggtatatgctccctccaaaagtttatctttgtttattgattaaaggtaatccttactttctttgtattacttaggttcttaattaaaggtaatccttactttctttgtattacttaggttcttaaatttctatgataaacatgtattgctaaataataaaaagtatataaaaattgctttaa

SEQ ID NO: 31805 - DNA, 1955 bp, Homo sapiens
tagaggatcccagcggggaacaatcactttggatatggatgggactgacttttcttttggcaccctttacaaaattcctgatagatctgtatgactggacaggagcccttatattatttggagctatcgcattgaatttggtgccttctagtatgctcttaagacccatccatatcaaaagtgagaacaattctggtattaaagataaaggcagcagtttgtctgcacatggtccagaggcacatgcaacagaaacacactgccatgagacagaagagtctaccatcaaggacagtactacgcagaaggctggactacctagcaaaaatttaacagtctcacaaaatcaaagtgaagagttctacaatgggcctaacaggaacagactgttattaaagagtgatgaagaaagtgataaggttatttcgtggagctgcaaacaactgtttgacatttctctctttagaaatcctttcttctacatatttacttggtcttttctcctcagtcagttagcatacttcatccctacctttcacctggtagccagagccaaaacactggggattgacatcatggatgcctcttaccttgtttctgtagcaggtatccttgagacggtcagtcagattatttctggatgggttgctgatcaaaactggattaagaagtatcattaccacaagtcttacctcatcctctgcggcatcactaacctgcttgctcctttagccaccacatttccactacttatgacctacaccatctgctttgccatctttgctggtggttacctggcattgatactgcctgtactggttgatctgtgtaggaattctacagtaaacaggtttttgggacttgccagtttctttgctgggatggctgtcctttctggaccacctatagcaggctggttatatgattatacccagacatacaatggctctttctacttctctggcatatgctatctcctctcttcagtttcctttttttttgtaccattggccgaaagatggaaaaacagtctgacctgaaagaaagaagactgcaatcaagtgagagctaaacaaaagaaaacctaaactaatgtcattggaaacaaaagcttgaaagaaacacatcgcatctacatttgtaacatgagaaggaaaacaatttttttttttttttttttgagacggagtctcgctctttcgcccaggctggagtgcagtggcgcaatctcggctcactgtaatctccgcctcctgggttcaagggattctcctgcctcagcctcccaagtagctgggactacaggcacacgccaccacacccagctaattttttgtatttttagtagaggcggggtttcaccatgttagccaggatggtctccatctcctgacctcgtgatccgcccgccttgtcctccaaagtgctgggattacaggcatgagccactgggcgcggccagataagtttttaaggttccttcttgctttagcattctgagaaatgtctaattggtagtaagacaagagtaatagcaacctgtattgttagtatttaaccaaataggctaaaattttaatcaggtaccttatgtattaaatagaaatcggaatgtaccataataaatccaaactctcaattacgccatggtaattcagtcactaaaatatgtaaagatagaaaattttttaatttaaagaagtgtgaaacatagccattgattgatcagaattctggaatctgaatattaaaaccttacttagtgactggaatggtatatgctccctccaaaagtttatctttgtttattgattaaaggtaatccttactttctttgtattacttaggttcttaattaaaggtaatccttactttctttgtattacttaggttcttaaatttctatgataaacatgtattgctaaataataaaaagtatataaaaattgctttaa

SEQ ID NO: 31806 - DNA, 2243 bp, Homo sapiens
gtcgaccctctctcaccacccatccaggagttttatattctcctgtaaaataagcatgttgtgagaagttccctgaggaaatttgaagacaagtgtatgagagctctggagccccatccccctgccctgagcatagtcgccaaaaggactttccacttagtttacttcatgcttgcttttgagcctgcggcaaaaaattctaccttctgagtgactgtgggtggagggagggcctgagatgacatcaaatcacagtctttcctcctcccctcaggaagtaaagtccactagcaggagggcctaaatcgtctgagccctccttggctcttacaatgctcacttgttttcacaatgcagcaaaatgaaatgccttagaaaaagagtaacattccagaaaacggtgtaatttatttttcttccttaattgccccatctgtggaggatttctttgctgaacaccacatcaaagggatcttctgcatttaaaatagaagaggcatcatgctgaagagggaggggaaggtccaaccttacactaaaaccctggatggaggatggggatggatgattgtgattcattttttcctggtcccctggttgctattatttgtgacatacttggagagaaaactacctccattcttggggctttcgttgttactggtggatatctgatcagcagctgggccacaagtattccttttctttgtgtgactatgggacttctacccggtttgggttctgctttcttataccaagtggctgctgtggtaactaccaaatacttcaaaaaacgattggctctttctacagctattgcccgttctgggatgggactgacttttcttttggcaccctttacaaaattcctgatagatctgtatgactggacaggtatccttgagacggtcagtcagattatttctggatgggttgctgatcaaaactggattaagaagtatcattaccacaagtcttacctcatcctctgcggcatcactaacctgcttgctcctttagccaccacatttccactacttatgacctacaccatctgctttgccatctttgctggtggttacctggcattgatactgcctgtactggttgatctgtgtaggaattctacagtaaacaggtttttgggacttgccagtttctttgctgggatggctgtcctttctggaccacctatagcaggctggttatatgattatacccagacatacaatggctctttctacttctctggcatatgctatctcctctcttcagtttcctttttttttgtaccattggccgaaagatggaaaaacagtctgacctgaaagaaagaagactgcaatcaagtgagagctaaacaaaagaaaacctaaactaatgtcattggaaacaaaagcttgaaagaaacacatcgcatctacatttgtaacatgagaaggaaaacaatttttttttttttttttttgagacggagtctcgctctttcgcccaggctggagtgcagtggcgcaatctcggctcactgtaatctccgcctcctgggttcaagggattctcctgcctcagcctcccaagtagctgggactacaggcacacgccaccacacccagctaattttttgtatttttagtagaggcggggtttcaccatgttagccaggatggtctccatctcctgacctcgtgatccgcccgccttgtcctccaaagtgctgggattacaggcatgagccactgggcgcggccagataagtttttaaggttccttcttgctttagcattctgagaaatgtctaattggtagtaagacaagagtaatagcaacctgtattgttagtatttaaccaaataggctaaaattttaatcaggtaccttatgtattaaatagaaatcggaatgtaccataataaatccaaactctcaattacgccatggtaattcagtcactaaaatatgtaaagatagaaaattttttaatttaaagaagtgtgaaacatagccattgattgatcagaattctggaatctgaatattaaaaccttacttagtgactggaatggtatatgctccctccaaaagtttatctttgtttattgattaaaggtaatccttactttctttgtattacttaggttcttaattaaaggtaatccttactttctttgtattacttaggttcttaaatttctatgataaacatgtattgctaaataataaaaagtatataaaaattgctttaa

SEQ ID NO: 31807 - DNA, 2150 bp, Homo sapiens
gtcgaccctctctcaccacccatccaggagttttatattctcctgtaaaataagcatgttgtgagaagttccctgaggaaatttgaagacaagtgtatgagagctctggagccccatccccctgccctgagcatagtcgccaaaaggactttccacttagtttacttcatgcttgcttttgagcctgcggcaaaaaattctaccttctgagtgactgtgggtggagggagggcctgagatgacatcaaatcacagtctttcctcctcccctcaggaagtaaagtccactagcaggagggcctaaatcgtctgagccctccttggctcttacaatgctcacttgttttcacaatgcagcaaaatgaaatgccttagaaaaagagtaacattccagaaaacggtgtaatttatttttcttccttaattgccccatctgtggaggatttctttgctgaacaccacatcaaagggatcttctgcatttaaaatagaagaggcatcatgctgaagagggaggggaaggtccaaccttacactaaaaccctggatggaggatggggatggatgattgtgattcattttttcctggtgaatgtgtttgtgatggggatgaccaagacttttgcaattttctttgtggtctttcaagaagagtttgaaggcacctcagagcaaattggttggattggatccatcatgtcatctcttcgtttttgtgcaggtcccctggttgctattatttgtgacatacttggagagaaaactacctccattcttggggctttcgttgttactggtggatatctgatcagcagctgggccacaagtattccttttctttgtgtgactatgggacttctacccggtttgggttctgctttcttataccaagtggctgctgtggtaactaccaaatacttcaaaaaacgattggctctttctacagctattgcccgttctgggatgggactgacttttcttttggcaccctttacaaaattcctgatagatctgtatgactggacaggagcccttatattatttggagctatcgcattgaatttggtgccttctagtatgctcttaagacccatccatatcaaaagtgagaacaattctggtattaaagataaaggcagcagtttgtctgcacatggtccagaggcacatgcaacagaaacacactgccatgagacagaagagtctaccatcaaggacagtactacgcagaaggctggactacctagcaaaaatttaacagtctcacaaaatcaaagtgaagagttctacaatgggcctaacaggaacagactgttattaaagagtgatgaagaaagtgataaggttatttcgtggagctgcaaacaactgtttgacatttctctctttagaaatcctttcttctacatatttacttggtcttttctcctcagtcagttagcatacttcatccctacctttcacctggtagccagagccaaaacactggggattgacatcatggatgcctcttaccttgtttctgtagcaggtatccttgagacggtcagtcagattatttctggatgggttgctgatcaaaactggattaagaagtatcattaccacaagtcttacctcatcctctgcggcatcactaacctgcttgctcctttagccaccacatttccactacttatgacctacaccatctgctttgccatctttgctggtggttacctggcattgatactgcctgtactggttgatctgtgtaggaattctacagtaaacaggtttttgggacttgccagtttctttgctgggatggctgtcctttctggaccacctatagcaggtaacaccttcaccacattctgaacaaatttcaatagcaataaaagagaaaaactgatccaggattaatggtaacatgtaatgatggtatcaggttaaaagaaacagattatttctgcttttcctatatctactcactccaccaccaatgcaggaaaatctgaaggctcagattcttgtattatcttaagatgtgccttaagcagattcttatattcttgggagttgtagggcagacactggatctatgtctacttgtctggggagacaatccagagttttttcagagcctcaaagacccatgatgctttaaa

SEQ ID NO: 31808 - DNA, 1568 bp, Homo sapiens
gtcgaccctctctcaccacccatccaggagttttatattctcctgtaaaataagcatgttgtgagaagttccctgaggaaatttgaagacaagtgtatgagagctctggagccccatccccctgccctgagcatagtcgccaaaaggactttccacttagtttacttcatgcttgcttttgagcctgcggcaaaaaattctaccttctgagtgactgtgggtggagggagggcctgagatgacatcaaatcacagtctttcctcctcccctcaggaagtaaagtccactagcaggagggcctaaatcgtctgagccctccttggctcttacaatgctcacttgttttcacaatgcagcaaaatgaaatgccttagaaaaagagtaacattccagaaaacggtgtaatttatttttcttccttaattgccccatctgtggaggatttctttgctgaacaccacatcaaagggatcttctgcatttaaaatagaagaggcatcatgctgaagagggaggggaaggtccaaccttacactaaaaccctggatggaggatggggatggatgattgtgattcattttttcctggtgaatgtgtttgtgatggggatgaccaagacttttgcaattttctttgtggtctttcaagaagagtttgaaggcacctcagagcaaattggttggattggatccatcatgtcatctcttcgtttttgtgcaggtcccctggttgctattatttgtgacatacttggagagaaaactacctccattcttggggctttcgttgttactggtggatatctgatcagcagctgggccacaagtattccttttctttgtgtgactatgggacttctacccggtttgggttctgctttcttataccaagtggctgctgtggtaactaccaaatacttcaaaaaacgattggctctttctacagctattgcccgttctgggatgggactgacttttcttttggcaccctttacaaaattcctgacctcgtgatccgcccgccttgtcctccaaagtgctgggattacaggcatgagccactgggcgcggccagataagtttttaaggttccttcttgctttagcattctgagaaatgtctaattggtagtaagacaagagtaatagcaacctgtattgttagtatttaaccaaataggctaaaattttaatcaggtaccttatgtattaaatagaaatcggaatgtaccataataaatccaaactctcaattacgccatggtaattcagtcactaaaatatgtaaagatagaaaattttttaatttaaagaagtgtgaaacatagccattgattgatcagaattctggaatctgaatattaaaaccttacttagtgactggaatggtatatgctccctccaaaagtttatctttgtttattgattaaaggtaatccttactttctttgtattacttaggttcttaattaaaggtaatccttactttctttgtattacttaggttcttaaatttctatgataaacatgtattgctaaataataaaaagtatataaaaattgctttaa

SEQ ID NO: 31809 - DNA, 1059 bp, Homo sapiens
gtcgaccctctctcaccacccatccaggagttttatattctcctgtaaaataagcatgttgtgagaagttccctgaggaaatttgaagacaagtgtatgagagctctggagccccatccccctgccctgagcatagtcgccaaaaggactttccacttagtttacttcatgcttgcttttgagcctgcggcaaaaaattctaccttctgagtgactgtgggtggagggagggcctgagatgacatcaaatcacagtctttcctcctcccctcaggaagtaaagtccactagcaggagggcctaaatcgtctgagccctccttggctcttacaatgctcacttgttttcacaatgcagcaaaatgaaatgccttagaaaaagagtaacattccagaaaacggtgtaatttatttttcttccttaattgccccatctgtggaggatttctttgctgaacaccacatcaaagggatcttctgcatttaaaatagaagaggcatcatgctgaagagggaggggaaggtccaaccttacactaaaaccctggatggaggatggggatggatgattgtgattcattttttcctggtgaatgtgtttgtgatggggatgaccaagacttttgcaattttctttgtggtctttcaagaagagtttgaaggcacctcagagcaaattggttggattggatccatcatgtcatctcttcgtttttgtgcaggtcccctggttgctattatttgtgacatacttggagagaaaactacctccattcttggggctttcgttgttactggtggatatctgatcagcagctgggccacaagtattccttttctttgtgtgactatgggacttctacccggtttgggttctgctttcttataccaagtggctgctgtggtaactaccaaatacttcaaaaaacgattggctctttctacagctattgcccgttctgggatgggactgacttttcttttggcaccctttacaaaattcctgatagatctgtatgactggacaggtacgtcattctaagtttatttactatcaact

SEQ ID NO: 31810 - DNA, 338 bp, Homo sapiens
cttggtcttttctcctcagtcagttagcatacttcatccctacctttcacctggtagccagagccaaaacactggggattgacatcatggatgcctcttaccttgtttctgtagcaggtaagaaagcctacatcagcctcctacccaaaaggaaagatcaacttaattttacaagcttattacattttaataaaaagctaaagaaaaacaaaagaggaattgtagaagggccagagaaagtaaaatttttgaggctagatggagcacctgggcatttcccaggaagagatctctgtcactgcacacaggctcccctactagacagtggaccctaaatc

SEQ ID NO: 31811 - DNA, 1185 bp, Homo sapiens
tgccagcctagtacaaggtccacattacaagccaaagctcagaaatttctggaggtggtgtatcaaaatttactctgcgagactctgctgaactggctgcatcagggagaaatttcatctcccagaagggtgttgctcatcgtttcttcccggaaacatctgcagagactagcttttcaggctaaggtatcctccatgatgttaccattgcaaggtgcccagatgctgcagatgctggagaaatccttgaggaagagcctcccagcatccttaaaggtttatggaactgtctttcacataaaccatggaaatccattcaatctgaaggctgtggtggacaagtggcctgattttaatacagtggttgtctgccctcaggagcaggatatgacagatgaccttgatcactataccaatacttaccaaatctactccaaagatccccaaaactgtcaggaattccttggatcaccagaactcatcaactggaaacagcatttacagattcaaagttcacagcctagcctgaatgaggctatacaaaatcttgcagccattaagtccttcaaagtcaaacaaacacaacgcattctctatatggcagctgaaacagccaaggaactgactcctttcctgctgaaatcaaagattttatctcccagtggtggcaaacccaaggccatgtgagtttgataaaatccagtctgtaccactcacacttctcaagtaacctcccaacttctctccctgcattcactctggctttcctacaatcaatgttgtacaaagaaatcagaattacatttttaaaaaatgtaactcagaacatgtttctctcctgcttaaaagactccaccatctcccttctcatctagaataaaccaggcctctggctaccacttggacctttattgcccttcctgctttcttcctccaacagctctgaccttcactctgttcctctttcatcacaagctcatctatattccaggacttcacatttgttatttcttctgtctactctgtctctcaagacaatagaggtcacagcaaatacaaacctttatactaatggattttgttttcttcttggaccctccatagcaaccaagagatgtttaaactctcatccatggatgttacccatgctcacttggtgaataaattctggcattttggtggtaa

SEQ ID NO: 31812 - DNA, 2126 bp, Homo sapiens
tgccagcctagtacaaggtccacattacaagccaaagctcagaaatttctggaggtggtgtatcaaaatttactctgcgagactctgctgaactggctgcatcagggagaaatttcatctcccagaagggtgttgctcatcgtttcttcccggaaacatctgcagagactagcttttcaggctaaggtatcctccatgatgttaccattgcaaggtgcccagatgctgcagatgctggagaaatccttgaggaagagcctcccagcatccttaaaggtttatggaactgtctttcacataaaccatggaaatccattcaatctgaaggctgtggtggacaagtggcctgattttaatacagtggttgtctgccctcaggagcaggatatgacagatgaccttgatcactataccaatacttaccaaatctactccaaagatccccaaaactgtcaggaattccttggatcaccagaactcatcaactggaaacagcatttacagattcaaagttcacagcctagcctgaatgaggctatacaaaatcttgcagccattaagtccttcaaagtcaaacaaacacaacgcattctctatatggcagctgaaacagccaaggaactgactcctttcctgctgaaatcaaagattttatctcccagtggtggcaaacccaaggccatcaaccaagagatgtttaaactctcatccatggatgttacccatgctcacttggtgaataaattctggcattttggtggtaatgagaggagccagagattcattgagcgctgcattcagacctttcccacctgctgtctcctggggcctgaggggacccctgtgtgctgggatctaatggaccagactggagagatgagaatggcaggcaccttgccggaataccggctccatggccttgtgacgtatgtcatctattcccacgcccagaaattgggcaaacttgggtttcctgtctattctcatgtagactacagcaatgaagctatgcaaaaaatgagttacacactgcaacatgttcccattcccagaagctggaaccagtggaactgtgtacctctgtgatgccaatcctgaacataagacagtgttgggcaggtctgggcgtataatttgaggagtggatggtggatgaaaagaaataataaattgtaatcagcagtaaaggagtgggcactgtttggactctggggaagcagtgtgatgttcaacagcatcgccatggtccctgcattcacaggtttctcagtgggaagcaggcccaggtcctcttacatttgacataagcaatttacctccccacatttccaggacctctatgacacttcatcagatacatattgctccaaattacttctcctggaatccctggttcctcagttgcaagacccttgccagtttttctgggagctaggaagaggtgaattaaattttctgagcactatgacttctttctttctaaagcctttcccttatgatcaacaagtggactctcctcagcaggtctttagagattatcctctcctgttattgctactttataggtacattaaatatactggacacaaatatatatgggatattaggctaaatacagtatacatgatatagcagggaatgttactagaagaaatatcaactgatgatatcctatcctctccaagctcctattccaggaaaaaagatccaatgttttttctaaagatgagcttccaaaacccacaactcctaaataatacagaaagttttgtgtttgactgtatacaatttttattgtgtttgttcaagctaagtggttcatcatggtgacagcatgaaaggaatgagtgtatgaaaaggtgaaggtgggagcaccttgacccagggatgtgatggtttattgaggagagataggagttgaagggagaggagacagcatgaacacctgcttgtccaattagcctcagcacattactaatctcagtttgttcctgctgtaacaaaatacctgagactgggtaattcataaataacagtctgaacttatttgtttatttaaaataataataaaataattaaaaatttatttatcccagttctggaggctggaagtctaaaatcatggt

SEQ ID NO: 31813 - DNA, 2012 bp, Homo sapiens
cagtgacagtccttgtgctctggttagattccatatccctgaacttcaacctgaaaacttccatcagctaaggtatcctccatgatgttaccattgcaaggtgcccagatgctgcagatgctggagaaatccttgaggaagagcctcccagcatccttaaaggtttatggaactgtctttcacataaaccatggaaatccattcaatctgaaggctgtggtggacaagtggcctgattttaatacagtggttgtctgccctcaggagcaggatatgacagatgaccttgatcactataccaatacttaccaaatctactccaaagatccccaaaactgtcaggaattccttggatcaccagaactcatcaactggaaacagcatttacagattcaaagttcacagcctagcctgaatgaggctatacaaaatcttgcagccattaagtccttcaaagtcaaacaaacacaacgcattctctatatggcagctgaaacagccaaggaactgactcctttcctgctgaaatcaaagattttatctcccagtggtggcaaacccaaggccatcaaccaagagatgtttaaactctcatccatggatgttacccatgctcacttggtgaataaattctggcattttggtggtaatgagaggagccagagattcattgagcgctgcattcagacctttcccacctgctgtctcctggggcctgaggggacccctgtgtgctgggatctaatggaccagactggagagatgagaatggcaggcaccttgccggaataccggctccatggccttgtgacgtatgtcatctattcccacgcccagaaattgggcaaacttgggtttcctgtctattctcatgtagactacagcaatgaagctatgcaaaaaatgagttacacactgcaacatgttcccattcccagaagctggaaccagtggaactgtgtacctctgtgatgccaatcctgaacataagacagtgttgggcaggtctgggcgtataatttgaggagtggatggtggatgaaaagaaataataaattgtaatcagcagtaaaggagtgggcactgtttggactctggggaagcagtgtgatgttcaacagcatcgccatggtccctgcattcacaggtttctcagtgggaagcaggcccaggtcctcttacatttgacataagcaatttacctccccacatttccaggacctctatgacacttcatcagatacatattgctccaaattacttctcctggaatccctggttcctcagttgcaagacccttgccagtttttctgggagctaggaagaggtgaattaaattttctgagcactatgacttctttctttctaaagcctttcccttatgatcaacaagtggactctcctcagcaggtctttagagattatcctctcctgttattgctactttataggtacattaaatatactggacacaaatatatatgggatattaggctaaatacagtatacatgatatagcagggaatgttactagaagaaatatcaactgatgatatcctatcctctccaagctcctattccaggaaaaaagatccaatgttttttctaaagatgagcttccaaaacccacaactcctaaataatacagaaagttttgtgtttgactgtatacaatttttattgtgtttgttcaagctaagtggttcatcatggtgacagcatgaaaggaatgagtgtatgaaaaggtgaaggtgggagcaccttgacccagggatgtgatggtttattgaggagagataggagttgaagggagaggagacagcatgaacacctgcttgtccaattagcctcagcacattactaatctcagtttgttcctgctgtaacaaaatacctgagactgggtaattcataaataacagtctgaacttatttgtttatttaaaataataataaaataattaaaaatttatttatcccagttctggaggctggaagtctaaaatcatggt

SEQ ID NO: 31814 - DNA, 764 bp, Homo sapiens
tgccagcctagtacaaggtccacattacaagccaaagctcagaaatttctggaggtggtgtatcaaaatttactctgcgagactctgctgaactggctgcatcagggagaaatttcatctcccagaagggtgttgctcatcgtttcttcccggaaacatctgcagagactagcttttcaggctaaggtatcctccatgatgttaccattgcaaggtgcccagatgctgcagatgctggagaaatccttgaggaagagcctcccagcatccttaaaggtttatggaactgtctttcacataaaccatggaaatccattcaatctgaaggctgtggtggacaagtggcctgattttaatacagtggttgtctgccctcaggagcaggatatgacagatgaccttgatcactataccaatacttaccaaatctactccaaagatccccaaaactgtcaggaattccttggatcaccagaactcatcaactggaaacagcatttacagattcaaagttcacagcctagcctgaatgaggctatacaaaatcttgcagccattaagtccttcaaagtcaaacaaacacaacgcattctctatatggcagctgaaacagccaaggaactgactcctttcctgctgaaatcaaagattttatctcccagtggtggcaaacccaaggccatcaaccaagagatgtttaaactctcatccatggatgttacccatgctcacttggtgaataaattctggcattttggtggtaa

SEQ ID NO: 31815 - DNA, 804 bp, Homo sapiens
tgccagcctagtacaaggtccacattacaagccaaagctcagaaatttctggaggtggtgtatcaaaatttactctgcgagactctgctgaactggctgcatcagggagaaatttcatctcccagaagggtgttgctcatcgtttcttcccggaaacatctgcagagactagcttttcaggctaaggtatcctccatgatgttaccattgcaaggtgcccagatgctgcagatgctggagaaatccttgaggaagagcctcccagcatccttaaaggtttatggaactgtctttcacataaaccatggaaatccattcaatctgaaggctgtggtggacaagtggcctgattttaatacagtggttgtctgccctcaggagcaggatatgacagatgaccttgatcactataccaatacttaccaaatctactccaaagatccccaaaactgtcaggaattccttggatcaccagaactcatcaactggaaacagcatttacagattcaaagttcacagcctagcctgaatgaggctatacaaaatcttgcagccattaagtccttcaaagtcaaacaaacacaacgcattctctatatggcagctgaaacagccaaggaactgactcctttcctgctgaaatcaaagattttatctcccagtggtggcaaacccaaggccattgggagtttggtaaaaaacccaagttttttccccattccaaccctttaaaggaaaccccccaaaaattttctccgcggataaacaggggggtttccaaaaaaaaaggggggcaaaaaaaaa

SEQ ID NO: 31816 - DNA, 481 bp, Homo sapiens
tgccagcctagtacaaggtccacattacaagccaaagctcagaaatttctggaggtggtgtatcaaaatttactctgcgagactctgctgaactggctgcatcagggagaaatttcatctcccagaagggtgttgctcatcgtttcttcccggaaacatctgcagagactagcttttcaggctaaggtatcctccatgatgttaccattgcaaggtgcccagatgctgcagatgctggagaaatccttgaggaagagcctcccagcatccttaaaggtttatggaactgtctttcacataaaccatggaaatccattcaatctgaaggctgtggtggacaagtggcctgattttaatacagtggttgtctgccctcaggagcaggatatgacagatgaccttgatcactataccaatacttaccaaatctactccaaagatcccctacagattcaaagttcacagcctagcctgaatgagg

SEQ ID NO: 31817 - DNA, 458 bp, Homo sapiens
tgccagcctagtacaaggtccacattacaagccaaagctcagaaatttctggaggtggtgtatcaaaatttactctgcgagactctgctgaactggctgcatcagggagaaatttcatctcccagaagggtgttgctcatcgtttcttcccggaaacatctgcagagactagcttttcaggctaaggtatcctccatgatgttaccattgcaaggtgcccagatgctgcagatgctggagaaatccttgaggaagagcctcccagcatccttaaaggtgataatggaaaattctgagaggagtaaagaagacaaacttgatgtgaaagaggagggaaagggactgatatttatgatgcacctattttgagccaggcactatttcatgttttctctcatttagtatgccttacctctctacaagatgtttactgtcatgtccatgttgctgttaagaaa

SEQ ID NO: 31818 - DNA, 468 bp, Homo sapiens
tgccagcctagtacaaggtccacattacaagccaaagctcagaaatttctggaggtggtgtatcaaaatttactctgcgagactctgctgaactggctgcatcagggagaaatttcatctcccagaagggtgttgctcatcgtttcttcccggaaacatctgcagagactagcttttcaggtgaggactcattacaaagtatcagatacataggatgaacaagtctagagatctaatgtacaacatgagaactatagttaatagaattgcattgtatatgggatccatgctacatgagtggagtttagctgctctttacataaaaacaacgacaaaaaataagtaactatgtgaagtaatagatatattaatttgcttcataatggtaatgttttcactatctgtatgctctcataacatcatattgtatactttaaatatccacaataaaatttatttttttaatgt

SEQ ID NO: 31819 - DNA, 2547 bp, Homo sapiens
tgccagcctagtacaaggtccacattacaagccaaagctcagaaatttctggaggtggtgtatcaaaatttactctgcgagactctgctgaactggctgcatcagggagaaatttcatctcccagaagggtgttgctcatcgtttcttcccggaaacatctgcagagactagcttttcaggctaaggtatcctccatgatgttaccattgcaaggtgcccagatgctgcagatgctggagaaatccttgaggaagagcctcccagcatccttaaaggtttatggaactgtctttcacataaaccatggaaatccattcaatctgaaggctgtggtggacaagtggcctgattttaatacagtggttgtctgccctcaggagcaggatatgacagatgaccttgatcactataccaatacttaccaaatctactccaaagatccccaaaactgtcaggaattccttggatcaccagaactcatcaactggaaacagcatttacagattcaaagttcacagcctagcctgaatgaggctatacaaaatcttgcagccattaagtccttcaaagtcaaacaaacacaacgcattctctatatggcagctgaaacagccaaggaactgactcctttcctgctgaaatcaaagattttatctcccagtggtggcaaacccaaggccatgtgagtttgataaaatccagtctgtaccactcacacttctcaagtaacctcccaacttctctccctgcattcactctggctttcctacaatcaatgttgtacaaagaaatcagaattacatttttaaaaaatgtaactcagaacatgtttctctcctgcttaaaagactccaccatctcccttctcatctagaataaaccaggcctctggctaccacttggacctttattgcccttcctgctttcttcctccaacagctctgaccttcactctgttcctctttcatcacaagctcatctatattccaggacttcacatttgttatttcttctgtctactctgtctctcaagacaatagaggtcacagcaaatacaaacctttatactaatggattttgttttcttcttggaccctccatagcaaccaagagatgtttaaactctcatccatggatgttacccatgctcacttggtgaataaattctggcattttggtggtaatgagaggagccagagattcattgagcgctgcattcagacctttcccacctgctgtctcctggggcctgaggggacccctgtgtgctgggatctaatggaccagactggagagatgagaatggcaggcaccttgccggaataccggctccatggccttgtgacgtatgtcatctattcccacgcccagaaattgggcaaacttgggtttcctgtctattctcatgtagactacagcaatgaagctatgcaaaaaatgagttacacactgcaacatgttcccattcccagaagctggaaccagtggaactgtgtacctctgtgatgccaatcctgaacataagacagtgttgggcaggtctgggcgtataatttgaggagtggatggtggatgaaaagaaataataaattgtaatcagcagtaaaggagtgggcactgtttggactctggggaagcagtgtgatgttcaacagcatcgccatggtccctgcattcacaggtttctcagtgggaagcaggcccaggtcctcttacatttgacataagcaatttacctccccacatttccaggacctctatgacacttcatcagatacatattgctccaaattacttctcctggaatccctggttcctcagttgcaagacccttgccagtttttctgggagctaggaagaggtgaattaaattttctgagcactatgacttctttctttctaaagcctttcccttatgatcaacaagtggactctcctcagcaggtctttagagattatcctctcctgttattgctactttataggtacattaaatatactggacacaaatatatatgggatattaggctaaatacagtatacatgatatagcagggaatgttactagaagaaatatcaactgatgatatcctatcctctccaagctcctattccaggaaaaaagatccaatgttttttctaaagatgagcttccaaaacccacaactcctaaataatacagaaagttttgtgtttgactgtatacaatttttattgtgtttgttcaagctaagtggttcatcatggtgacagcatgaaaggaatgagtgtatgaaaaggtgaaggtgggagcaccttgacccagggatgtgatggtttattgaggagagataggagttgaagggagaggagacagcatgaacacctgcttgtccaattagcctcagcacattactaatctcagtttgttcctgctgtaacaaaatacctgagactgggtaattcataaataacagtctgaacttatttgtttatttaaaataataataaaataattaaaaatttatttatcccagttctggaggctggaagtctaaaatcatggt

SEQ ID NO: 31820 - DNA, 2072 bp, Homo sapiens
tgccagcctagtacaaggtccacattacaagccaaagctcagaaatttctggaggtggtgtatcaaaatttactctgcgagactctgctgaactggctgcatcagggagaaatttcatctcccagaagggtgttgctcatcgtttcttcccggaaacatctgcagagactagcttttcaggctaaggtatcctccatgatgttaccattgcaaggtgcccagatgctgcagatgctggagaaatccttgaggaagagcctcccagcatccttaaaggtttatggaactgtctttcacataaaccatggaaatccattcaatctgaaggctgtggtggacaagtggcctgattttaatacagtggttgtctgccctcaggagcaggatatgacagatgaccttgatcactataccaatacttaccaaatctactccaaagatccccaaaactgtcaggaattccttggatcaccagaactcatcaactggaaacagcatttacagattcaaagttcacagcctagcctgaatgaggctatacatatggcagctgaaacagccaaggaactgactcctttcctgctgaaatcaaagattttatctcccagtggtggcaaacccaaggccatcaaccaagagatgtttaaactctcatccatggatgttacccatgctcacttggtgaataaattctggcattttggtggtaatgagaggagccagagattcattgagcgctgcattcagacctttcccacctgctgtctcctggggcctgaggggacccctgtgtgctgggatctaatggaccagactggagagatgagaatggcaggcaccttgccggaataccggctccatggccttgtgacgtatgtcatctattcccacgcccagaaattgggcaaacttgggtttcctgtctattctcatgtagactacagcaatgaagctatgcaaaaaatgagttacacactgcaacatgttcccattcccagaagctggaaccagtggaactgtgtacctctgtgatgccaatcctgaacataagacagtgttgggcaggtctgggcgtataatttgaggagtggatggtggatgaaaagaaataataaattgtaatcagcagtaaaggagtgggcactgtttggactctggggaagcagtgtgatgttcaacagcatcgccatggtccctgcattcacaggtttctcagtgggaagcaggcccaggtcctcttacatttgacataagcaatttacctccccacatttccaggacctctatgacacttcatcagatacatattgctccaaattacttctcctggaatccctggttcctcagttgcaagacccttgccagtttttctgggagctaggaagaggtgaattaaattttctgagcactatgacttctttctttctaaagcctttcccttatgatcaacaagtggactctcctcagcaggtctttagagattatcctctcctgttattgctactttataggtacattaaatatactggacacaaatatatatgggatattaggctaaatacagtatacatgatatagcagggaatgttactagaagaaatatcaactgatgatatcctatcctctccaagctcctattccaggaaaaaagatccaatgttttttctaaagatgagcttccaaaacccacaactcctaaataatacagaaagttttgtgtttgactgtatacaatttttattgtgtttgttcaagctaagtggttcatcatggtgacagcatgaaaggaatgagtgtatgaaaaggtgaaggtgggagcaccttgacccagggatgtgatggtttattgaggagagataggagttgaagggagaggagacagcatgaacacctgcttgtccaattagcctcagcacattactaatctcagtttgttcctgctgtaacaaaatacctgagactgggtaattcataaataacagtctgaacttatttgtttatttaaaataataataaaataattaaaaatttatttatcccagttctggaggctggaagtctaaaatcatggt

SEQ ID NO: 31821 - DNA, 602 bp, Homo sapiens
ttttttttttttagagatagggtcttgctatgttgcccagactggtcatgaattcctggttttaagcaatcctcctgcgtcatcctcctgagtagttgggattacaggcatgagccagcgggcccagcttaaacccacatttactaagagatgactgtgaggtcactactttgcgtatatattacctcattgttcataaagttaaaaaggccgtgtcttctgcttatggggaaatggaaggaagctcactctttgttaacagtcattttacaatatgaaagacttgctcattgtagataatttggaaagtatagaagagtatagaggaaataaaaacaacccagaatatattacctggagagaacttacatgtatacctttacatgtatgcctttacatgtataccttttgaacaaaatcactcttttaaagtgatttcataaatttatagctaacttaatgtaatctcataactcaaatttttgtcataccacagtgtgaaatcctaactgtatttttgaactaagtgacccctgtgcttttctcttgtgaaataaataccttttgaaaagctctctgaaagtttaactcaggttttggtt

SEQ ID NO: 31822 - DNA, 960 bp, Homo sapiens
  misc_feature (272)..(272): n is a, c, g, or t
  misc_feature (828)..(829): n is a, c, g, or t
atgccattcccaaactgctcagcccccagcactgtggtggccacagctgtgggtgtcttgctggggctggagtgtgggctgggtctgctgggcaacgcggtggcgctgtggaccttcctgttccgggtcagggtgtggaagccgtacgctgtctacctgctcaacctggccctggctgacctgctgttggctgcgtgcctgcctttcctggccgccttctacctgagcctccaggcttggcatctgggccgtgtgggctgctgggccctgcncttcctgctggacctcagccgcagcgtggggatggccttcctggccgccgtggctttggaccggtacctccgtgtggtccaccctcggcttaaggtcaacctgctgtctcctcaggcggccctgggggtctcgggcctcgtctggctcctgatggtcgccctcacctgcccgggcttgctcatctctgaggccgcccagaactccaccaggtgccacagtttctactccagggcagacggctccttcagcatcatctggcaggaagcactctcctgccttcagtttgtcctcccctttggcctcatcgtgttctgcaatgcaggcatcatcagggctctccagaaaagactccgggagcctgagaaacagcccaagcttcagcgggcccaggcactggtcaccttggtggtggtgctgtttgctctgtgctttctgccctgcttcctggccagagtcctgatgcacatcttccagaatctggggagctgcagggccctttgtgcagtggctcatacctcggatgtcacgggcagcctcacctacctgcacagtgtnntcaaccccgtggtatactgcttctccagccccaccttcaggagctcctatcggagggtcttccacaccctccgaggcaaagggcaggcagcagagcccccagatttcaaccccagagactcctattcctga

SEQ ID NO: 31823 - DNA, 5839 bp, Homo sapiens
accccacatcacaaccacgacgggttgtccgcagctcgcagccaccccaaagggaggaataaagaacaggagcagagggaagccgggcgcagaaagaagggaaaaggaagagctcagggttggacatttttggagacagggtggggaggataaagggagcgtgcctccttgattttcccctccccacccctctttgcttttctctccccttctctgtatagcatattccagaaacgacagcagaaggggacagaaacctctagtgtagaaaagggttttggaggggtagccagcgctcccgccagccgctacctaacagctggagcttgagtgtgcgtgtaagagtgtgaatgcggctctctctctttttttctctctctctcccctctctctccatcccttccttcctccctccttctccctctccttcacactacagtgtcagctacccctgtcagtttccccgtgtcagtttcttccctagctgttattgtgtgtgactggctgcgtaaagggagtgggtgcgcttgaaggggctcaggttgggttagagagctgggagaacagggtagggacattggtagagcaaagagtttcagggcactggcgaaggtgaaaggtgaggagggccgatctgttacaggcaagtttggcaataactgagcatccaaaggggaagccaaggtaggagccagtacttgcgctcgtctttacaccccgcccctttccctgtgctcatccgcccacccacccatcagcctagaggccccgggctgtcccagtcggctgctgtttcgcgccgcaaaagaggagtccggcaaggcgccgcaccacgcatcctggccggtggacatccagacgacacagattttatccaaaaaaaccacttggctcaggatttctgcattgctatgaaccatggcccaactgtactacaaaaaggtcaactactcaccgtacagagaccgcatccccctgcaaattgtgagggctgagacagagctctctgcagaggagaaggccttcctcaatgctgtggagaagggggactatgccactgtgaagcaggcccttcaggaggctgagatctactataatgttaacatcaactgcatggaccccttgggccggagtgccctgctcattgccattgagaacgagaacctggagatcatggagctactgctgaaccacagcgtgtatgtgggtgatgcattgctctatgccatacgcaaggaagtggtgggcgctgtggagcttctgctcagctacaggcggcccagcggagagaagcaggtccccactctgatgatggacacgcagttctctgaattcacaccggacatcactcccatcatgctggctgcccacaccaacaactacgaaatcatcaaattgcttgtccaaaaacgggtcactatcccacggccccaccagatccgctgcaactgtgtggagtgtgtgtctagttcagaggtagacagcctgcgccactctcgctcccgactgaacatctataaggctctggcaagcccctcactcattgccttatcaagtgaggaccccatcctaactgccttccgtctgggctgggagctcaaggagctcagcaaggtggagaatgagttcaaggccgagtatgaggagctctctcagcagtgcaagctctttgccaaagacctgctggaccaagctcggagctccagggaactggagatcatcctcaaccatcgagatgaccacagtgaagagcttgaccctcagaagtaccatgacctggccaagttgaaggtggcaatcaaataccaccagaaagagtttgttgctcagcccaactgccaacagttgcttgccaccctgtggtatgatggcttccctggatggcggcggaaacactgggtagtcaagcttctaacctgcatgaccattgggttcctgtttcccatgctgtctatagcctacctgatctcacccaggagcaaccttgggctgttcatcaagaaaccctttatcaagtttatctgccacacagcatcctatttgaccttcctctttatgcttctcctggcttctcagcacattgtcaggacagaccttcatgtacaggggcctcccccaactgtcgtggaatggatgatattgccttgggttctaggtttcatttggggtgagattaaggaaatgtgggatggtggatttactgaatacatccatgactggtggaacctgatggattttgcaatgaactccctctacctggcaactatttccctgaagattgtggcctatgtcaagtataatggttctcgtccaagggaggaatgggaaatgtggcacccgactctgattgcggaagcactcttcgcaatatccaacattttaagttcgttgcgtctcatatccctgttcacagccaactcccacttaggacctctgcagatctctttgggacgcatgctgcttgatatcctcaaattcctctttatctactgcctggtactactagcttttgccaatggactgaaccagctttacttctattatgaaaccagagctatcgatgagcctaacaactgcaaggggatccgatgtgagaaacagaacaatgccttctccacgctctttgagactcttcagtcactcttctggtctgtatttggccttttaaatctatatgtcaccaatgtgaaagccagacacgaattcaccgagtttgtaggagctaccatgtttggaacatacaatgtcatctccctggtagtgctgctgaacatgctgattgctatgatgaacaactcctatcagcttattgccgatcatgctgatatcgagtggaagtttgcaaggacgaagctctggatgagttactttgatgaaggtggcaccttgccacctcctttcaacatcatccccagccccaagtcatttctataccttggtaactggttcaacaacaccttctgccccaaaagagaccctgacggtagacggagaaggcgcaacttgagaagtttcacagaacgcaatgctgacagcctgatacaaaatcaacattatcaggaagttatcaggaatttagtcaaaagatatgtggctgctatgataagaaattccaaaacacatgagggacttacagaagaaaattttaaggaattaaagcaagacatctccagctttcggtatgaagtgcttgacctcttgggaaatagaaaacatccaaggagcttttccactagcagcactgaactgtctcagagagacgataataatgatggcagtggtggggctcgggccaaatccaagagtgtctcttttaatttaggctgcaagaaaaagacttgccatgggccacctctcatcagaaccatgccaaggtccagtggtgcccaaggaaagtcaaaagctgagtcatcaagcaaacgctccttcatgggtccttctctcaagaaactgggtctcctattctccaaatttaatggtcatatgtctgaacccagttcagagccaatgtacacaatttctgatggaattgttcagcagcactgtatgtggcaggacatcagatattctcagatggagaaagggaaagcagaggcctgttctcaaagtgaaattaacctcagtgaggtagaattaggtgaagtccagggcgctgctcagagcagtgaatgccctctagcctgttccagctctcttcactgtgcatccagcatctgctcctcaaattctaaacttttagactcctcagaggatgtatttgaaacttggggagaggcttgtgacttgctcatgcacaaatggggtgatggacaggaagaacaagttacaactcgcctctaagtcaagccctaatcatctgttctggaactcaacagaaatctgtaatttccttgctctcagaggtgacacagaatatgattccctcactgcccctgccccccagaaaggagagtgaaactcttatttgcaccatcttttatagccacattctccatttttgttcttgttttattattactttcattattatttgcctttttaatacctatacacactaagtccatcttacaaccgactgaaggggtgttgcacctaatcatcagaggtgcagttgggtgcttaacctttttgctttgcttttctcacccatgcttccttgaagccccaggtgccactttgctggtcttgttgccgcacagattcctgaccatcctcagaatctcatgccattttcccgcagagctgagggatgtggtcagcagtccccaccagctatcagataaggcaaactaccctgcccatctttgttgccattcagtgctacgcgctgcccatgctgggtcaatgaacagcatcaaagggaggctgaagagatttcaaagaattgtcagcttgtggtttctgggtataagtggcttgtttcgttcttaaatactacaacttcttattgtgggggctattgagttttcttgtttcttaaagatgtgttagtttcctaatgtgtgccaatgaaatatttaccccatagtatatgtcatatctaataagttaggcgaattatttttctgtttgtgtgtttcagttaacttactacattcgaaaatttgatagtatcaaaattagtatttagaatttgtgctattttttaaaaacatctactacactctaaccaatagtcactacatctcatacattggcaagataaatagttgtcatatttgttgggtcctattctactgttgatagttttaattatcattgctatcaaataatttctaagataaaagcctgaatttgaaatatttttatcagaaaaatggcatattgctgaagtgtcaaaatatgagaaaagagcatcttcattttaattaactgctttataaaaatggcaactttaggtatagataacctaattcaggttgcagttttaatattcattgggggcagtggaattgcatgtgtaaattatgttagatatatatcataacaaccctagtggattcatggaattataaacgtgatccaaattctactgtcttccaagaaagctacatttatacatccaaacaaattcttttccacagcttaagagtacctcatcagaatacagtggttcaagttaaaaaataaagtccataatgcatatggtcatcattctagacctgataaccactgagaacctgctgagcaaggacggcttttaccaacattagcacaaaggtttcctcagtttagactctaacatatgacctgaaacaactctaggtctgagtcctagagattacataaatagtgtgtagcccagaaaagtaaaataggtgtcacgctgttttttttaatgtcaacaccaataggaatccatttagattaatgtatgtaatttctgataaaagtaagagaaatgaggaactttcgaactgcaaatatgcctccaaactagcttttgataagtgtggtttctgttatttgaatggattcccatctttgtctctagcctggagaagagcaaaatggagggggaggggccagaaataggaggaggttttgaagaataaagcctcatatccaggaaaaagtgatcaagtgaaaaagctgcatcaagacccatttggcaagaggttgtccgaaaataattccttgatcatatctgaagtggttatttactcaaatcaatttctcccctgcgtcgctaagactgtcataaaatggccttgacatttaatcacaggttactttccagaaaggtttctaaagttacagattcagcttttcaaattgtcaaattcactttgaataataatagaacctgggctacattcctaactcatattaacagcac

SEQ ID NO: 31824 - DNA, 964 bp, Homo sapiens
acttaggggtggccgtcatgctggggctaaacccacctccatgtctgaattcatcctcgtcggcttctctgccttcccccacctccaactgatgctcttcctgctgttcctgctgatgtacctgttcacgctgctgggcaacctgctcatcatggccaccgtctggagcgagcgcagcctccacacgcccatgtacctcttcctgtgcgtcctctcagtctccgagatcctctacaccgtggccatcatcccgcgcatgctggccgacctgctgtccacccagcgctccatcgccttcctggcctgtgccagtcagatgttcttctccttcagcttcggcttcacccactccttcctgctcaccgtcatgggctacgaccgctacgtggccatctgccaccccctgcgctacaacgtgctcatgagcccacggggctgcgcctgcctggtgggctgctcctgggctggtggctcggtcatggggatggtggtgacctcggccattttccaactgactttctgtggattccatgagatccagcattttttatgtcatgtgccacctctgttgaagttggcctgtggaaataatgtaccagctgtggccctgggcgtgggcttggtatgtatcatggcactgctgggctgttttctcctcatcctcctctcctatgccttcatcgtggccgacatcttgaagatcccttctgctgaaggtcggaacaaggccttctccacctgtgcctctcaccttattgtggtcattgtgcactatggctttgcctctgtcatctacctcaagcccaaaggtccccactctcaggagggtgacaccctgatggccaccacctacgcagtcctcacgcccttcctcagccccatcatcttcagcctcaggaacaaagaactgaaggttgccatgaagaggaccttcctcagcacactctattcctcaggcacctga

SEQ ID NO: 31825 - DNA, 516 bp, Homo sapiens
gaggtgctcctagcgtctagtgagcagcggccaggcatgctgttaaactccttgcaactggaggacacaataaataattatttcacagccatagtaaagaatgaaattggccggtcgcggtggctcacgcctgttatcccaccactttgggaggccgaggtgggcagatcacctgaggtcaggagtttgagaccagcctggccaatgtggtgaaaccccgtctctactaaaaatatcaaaattagccaggcatggtagcacgtgcctgtaatcccagctactcaggaggctgaggcaggagaatcgcttgaacctgggaggcggaggttgcagtgagccaagatcatgccattgcattccagcctgagcgacaagagaaaaactccatctcaaaaaaaaaaaaaaaaaaaaaatgaaatcatgtcctttgcaacaacgtggatgaagctggaggccattatcctaagtgaactaactcaaacatagaaaaccaaatatttggctgggtgtgacagc

SEQ ID NO: 31826 - DNA, 539 bp, Homo sapiens
ccttctatgctcatatcattcttcagtttttcctttttaaatgttttgctcagcctcttggtagcctcatctgttattatcacctcaggtagctgccacattaaataattgccactgactgttttcaacaaatagtttagcaaaaggctatttgtacagagtaaagtctgagtcatatcaaagacaagctgtgagacaggtcaaacagtgaaagttttctggagatggaacttctccccttcagtagctgctaggctgcttacattcaggactaccataattgtgaggctgttagttttcaatattactacagaactggagagagtggaatgggactagggcaagttaaaacatcacaacacttattattcttaccaagattcagccacctttcttgaatcaacactcttcaagttactgaaaacctttgattaattttcagagttctgaaaaagttgcttttaactatttttccagtactcttattgcttttatgaggaagtggtatgtattttttttaatgtcctcactctaccatt

SEQ ID NO: 31827 - DNA, 401 bp, Homo sapiens
tgataagctgctggtggaataagataaattttaaatgactaggctcttgcatcagaatttgaatgtcaagaaatgaattgtcacaaagcaacaatagattcctggtttgttttacacaaaaacaacctctttccaggtttttagattacttctcagactgtgttactacgggtcagaaaaaaggtaagagaaaaaaatttgccaatactcctaatcggtgactttgaggatttaagaacaaactccaaaaactattccctgagacggaaagttacgctgattctcatcctaaaaaataaggaatgtggcacaaatttaaaagataagagggaaaaaatcaccaacattcaaatagagagattcagttcaattagatattttaagaactatagcagaccatc

SEQ ID NO: 31828 - DNA, 861 bp, Homo sapiens
tcttactgaaactgaaaattgcaaaacaaagaattttctagttctcacattccttgatggagaacagtgtttatatagaggttatcttgtggtttattttatattctacttaactttaacatttctgcaggtagaataaatatcctatttaaagctttcaaatcttattaattaaaggtagttgtcattactaattgtttactgagttttatttatttttgcttcattgtagctcatgaggaggccacctaaattgatcagaatataagcttatcctagtcactgaaataatacttagtgccggcaacagaaatatactcaagaaatatttgttaagtgaataaactgataatgacctaggaggatgcaagtcttaaaaagtagttcagaatatgcagattttaccatcagtctgagagttggtaacttagaacattttctatttgagctagtatgaatttaattttttagaatgcgacgatgtcatcagttcttaagtaggcctgggaactcattctttttgaaatatattacattttagagactttataacaacattttcttccatttgcatgtattgacagttttttatgttctggctggtcacagtgggctcatgcctgtaatcccagcactttgggaggctgggatcacctgaggtcaggagtttgagaccagcctggccaacattgagaaacccccgtctctactaaaaatacaaaaattagctgggggtgatggcacatgcttgtaatcccagttactggggaggttgaggcaccagaatgtcttgaacccgggaggcagaggttgcagtgagccaaagttgcgccactacactgcagcctgggcgacagagtg

SEQ ID NO: 31829 - DNA, 573 bp, Homo sapiens
atttggaaagggagagaagtcaaaactaaacacagaagagccttccattctgaaatgggacagaagtccccacagattctcactgacattccggtttctttttcccctgccttacatgcttatgatctccagttgacctccgctataaattgaagggattgaggcaaatggtttctaacattcctttgggctctaaagtttgtagttttcaaatggagaaccaaggtgtaactgccaaggaggcaggtagggacagagcctaggcccagggctctggtctgtgctggcagccagaagaatggccgagggccaccatcttgcagtagcatagtagggtgtggccatgtatatggtaaatacaattaggattttgtctgttgcccagttttctagggtttttttcactgctcgtgctaattttcttaatagcaaaccatgctctgagcctttcccttcacagagggaggtgtgctggacgtacctccttctcaaggactggtgtgaatatgtatgatgcttctcaagctgcaaagaacacattacttgaataggtgcaaaaaaaaaaaaactatc

SEQ ID NO: 31830 - DNA, 737 bp, Homo sapiens
tcagtatttacctccaaattgctaaataacatgcttatattactttattgatttttcagttttaggcgttatttattgcccttctctggcatataaggatttcatttcttccttttcctatccccaccattcgtgttcacccttctcatctccccaagtgtattaagctgttttggggttgctataaaaaaatacctgcagctgggtaatttacaaagaaaagtggtttattttggcttaccgttctgcagactgtacaggaagcatggtgttgctatctgcttctggtgaggcctcagggaaacttcccaatcatgacagaagggcaaagggggaagcccagcatatcccatgatgagagggagcaagagatgggggaggtgccacactcctttaagcaaccatatctgctgtgaactcagtgcaagaactcatgtatcacttcatgaagagcaccaagccattcctccccatgaccaccacctcccaccaggcaccccctccaacactggagattgcatttcaacatgagatctggaggggacaaacgttcaaaccatgtcgccatatttccaacttagttcaattataattttggttggctgcatagttcacaatagttgttttctctttctgcccaactttttattttccctatactaaatttgtcttattttttctttaataattcaatcacaaaagatgtttggatatattgggttgtctatcagttactt

SEQ ID NO: 31831 - DNA, 3868 bp, Homo sapiens
  misc_feature (629)..(629): n is a, c, g, or t
  misc_feature (1142)..(1142): n is a, c, g, or t
  misc_feature (1567)..(1567): n is a, c, g, or t
gtaggaagtatatgggtagggtcagataatatttctgaaaggaaacacccaggagtatcccaagttaatgacattttagaccctccaacaaccacacaagtcagctccttggaaagactctggttacttttacaaagcaaaccaggagaattttcataatacctgataactatgtaagacttggaatatttgaatttctaggacatgggattgtgcaaccattcattttatcccataatattgaaatctccctcagataagcctctcggcacctaatagagttttcttagtgaagggctacctttctgtgggtaacagggaagggcaaaataaacaaccaaataatatcataatcacgagtgtcaatgattgctggaacaggtgggggttggtcattaaattctagttgtttccactattccagtaggagttgtgtgaatgttagcaaaagaccagggtgttacgatctgactgtgtttcatcaattgccttgacttttggatgaaatgcgatttgaggacatatcattattagatttgccacagattccaatttttttctctaatatgaggctaaccatgatgtcctttcccaggaaggacaatctctcctttatcagggaaaaatcngtaggggcttcctcaattttctccttcatccccaccacagagtcatagaggtcaagtccttttcttgtgaaacctaaaaaatgcaaattccaaggttgctgctatggtgtactaattttgtcacagtgacatgccctgtcacagggcgtatgtgttctgttatacagttgaaatattggttatactattgaaatgtttttgtactattgaaatctcaaataaacttaattctaaaagaagcatgacctcaacagcctcacacctacttatatcttgtagttctttctgtctaatgctggcaatctaagcatgttccaggcaagcaacattcaatagcgttttactgctccaataagttggttcaattagcaatgtcaaaggcagtcactaaatagatagtgtataaccttcatacaatctcgtattattttccactaattactatagaaaaatcgatgaagtttcattacaatggaataacttcaatcacacttcaaaaactacatacggaanatagccacaacttgctgctctcaaaaaacacagagatggcatctttactttgtttcaaatccccaaccctggtggcggtccaaagttatggcagttataaccccttatgtcattataaggaggaagggtaaatattaagtcaacatcctttaaagctaagagtatgactacagtggggtggaatttgggacttcatgcccactccctgtttctgttctattttacctttcctgacctctaagccaacaggagagggggaagggccacacttttgtgacccttgttaaagaattgtgagtttaggaaacaaagatggacttctgagggggtagttgaggatgggctgaaggcacagaagaaaccagctggtgtgcccctctccccactagcagacccttcttcctcattggttcagggcaaacaancccccaaaaattcaagaaaactaacttagagttattttctgttatttctcttttccttgatctggagccaatgcagaaagaaatctaaaggtgaaggaaaggcagcgttcagcactgagcaagtccatgttggagaaagttcacagggaattggaaatccttgtcttcgtggttcctggctcagcaggacccctgtggggcctctccctctcttgggaaagagattgctctagaaggtttactacaccagtgaggagaagatgagcgcaagggggattggccggctgagggcgaaatcaagactggagccaagtgcgctgagctctcacatgaggtcctttgctcctgttccctggaggcataagtggctggggtagagagaagcaggggtatttcttctgtcctttcttgcttagggattgggggtggaaatctccccgcatctaaggaaatttgaaaagacaaactatggctgcttcttcaagcaaaccacctcaccacactatccaggggataaaacccgcttgctgctgctaaattatgccaagagagaacattctgatatttctcctcaattctaggcatgacagcgtgacttggtgcttaaaggcatggagttttgagttgcagacctaggtttgagtgctgaatctactagcttcagggtgttaaaaaagtttcttaatctctctaaaccttatttttctcaaagataaaaaactgggtgtagttgtgagtatagtgaatgcacatagtatgtgcctttggcatgttaattcactattattctggacataatttctcctaagaaaaaggatgaactaattgcagggcctagcctaagctctgagaagtcattcgttatagcatttcagtccatagtaaacaagaagaaatgaggtaaagagtttaaaccagggaaggcatagctgtggtcaccaaacaacctgttaaaggcgagctgtaggcaccaaaaaacctattatggactgaattgtgttcctcaaattcatatgttgaagtgctaaccccaagtaccaaatgtgactgtatttggggatagggtccctgaagaagtcactcagctggaaggagtcatattggattaggtgttgggaattggctggccaagggagaaatcaaggctggaaccaagtgctgaactctcacatcaggtcctttgctcctgttccctggaccctaatccaatatgactggcatctttatatgaagaggaagaggcaccagagggtacacacgcagagaaaaggccatgtgtggacacagtaagatgacggacatctgtaagccaaggagggaaacctcagaagaaaccagccttgcctgcaccttgatcttggaggtccagtctccagaactgtgaaaaaaatgaactggtgttgtttaaatcccccagtcgtggtattttgtcatggtggccctagaagacaatatacaacccaaaggaatattctttccactttctccctcttccactttatagttttttctccttcgtttctttctttttctcttttactttccttttcttctcttctctttcctctggtttttaattttaattttaatttttggccttcctatacctccatttgcctctccaggaagctgaattccagacaattaatcattcatctcatcagttcagcaaagcaaatgccctcaatggtttcttttgtgattcgattattatgggatcagaatgtatcttattcctctgggaaaaatgaaacataaaaatttcagaaataaggttttgggccagcttcattggttttaagagaaggaagggaggagactcatgcaggtttgacgctgagcagcaccatgtggttgggcctggcaggcactcgaggctttaggtcttggtttgaatccagactagaaaatcattacttattaaaagccttgaggatatgggtctaggaaagtctatgtgaagagataatagtttggaaaaagttttgcagaactaaagaaaagtttccacagttaccttttctgtcctaatgtagagcatctttgttaactaggtcttggatcaatccaagctgtgtctgagaataaccatttataatttctcactggccagcactaacaccctttagaaaaggaactcaaagcagccctagcagccagagtcatgcgatcatggtgggagtacagctcctcaccaaggtcagctcctcagtgaaatccatgccttctggaggactgcttgtaaataaatattaagcacaaccattaaaaaataatttggctgtgaccatcaaatagtga

SEQ ID NO: 31832 - DNA, 2569 bp, Homo sapiens
  misc_feature (203)..(203): n is a, c, g, or t
  misc_feature (267)..(267): n is a, c, g, or t
cattcttcaaaagtttcactgacatgaacctcacttgtgggtgccaggttatgaccacatgcatagtttcatcttcatcttatgcaacatttggggtaaaaggaaggttatgtggtaaccagtttatgacttgaactataggcaaagattgaccagaccaagccctgagacacagtgttgagagccaagacataaagttgtgnagattcagacccagagcccagcagggcacaggctggaggggtgatgtgagtgatcagtaacacnatgaagactctgctcctggatcaggaatgcttttttgtccctgtttttggattttccaccatgatcagccaatgcagaaagaaatctaaaggtgaaggaaaggcagcgttcagcactgagcaagtccatgttggagaaagttcacagggaattggaaatccttgtcttcgtggttcctggctcagcaggacccctgtggggcctctccctctcttgggaaagagattgctctagaaggtttactacaccagtgaggagaagatgagcgcaagggggattggccggctgagggcgaaatcaagactggagccaagtgcgctgagctctcacatgaggtcctttgctcctgttccctggaggcataagtggctggggtagagagaagcaggggtatttcttctgtcctttcttgcttagggattgggggtggaaatctccccgcatctaaggaaatttgaaaagacaaactatggctgcttcttcaagcaaaccacctcaccacactatccaggggataaaacccgcttgctgctgctaaattatgccaagagagaacattctgatatttctcctcaattctaggcatgacagcgtgacttggtgcttaaaggcatggagttttgagttgcagacctaggtttgagtgctgaatctactagcttcagggtgttaaaaaagtttcttaatctctctaaaccttatttttctcaaagataaaaaactgggtgtagttgtgagtatagtgaatgcacatagtatgtgcctttggcatgttaattcactattattctggacataatttctcctaagaaaaaggatgaactaattgcagggcctagcctaagctctgagaagtcattcgttatagcatttcagtccatagtaaacaagaagaaatgaggtaaagagtttaaaccagggaaggcatagctgtggtcaccaaacaacctgttaaaggcgagctgtaggcaccaaaaaacctattatggactgaattgtgttcctcaaattcatatgttgaagtgctaaccccaagtaccaaatgtgactgtatttggggatagggtccctgaagaagtcactcagctggaaggagtcatattggattaggtgttgggaattggctggccaagggagaaatcaaggctggaaccaagtgctgaactctcacatcaggtcctttgctcctgttccctggaccctaatccaatatgactggcatctttatatgaagaggaagaggcaccagagggtacacacgcagagaaaaggccatgtgtggacacagtaagatgacggacatctgtaagccaaggagggaaacctcagaagaaaccagccttgcctgcaccttgatcttggaggtccagtctccagaactgtgaaaaaaatgaactggtgttgtttaaatcccccagtcgtggtattttgtcatggtggccctagaagacaatatacaacccaaaggaatattctttccactttctccctcttccactttatagttttttctccttcgtttctttctttttctcttttactttccttttcttctcttctctttcctctggtttttaattttaattttaatttttggccttcctatacctccatttgcctctccaggaagctgaattccagacaattaatcattcatctcatcagttcagcaaagcaaatgccctcaatggtttcttttgtgattcgattattatgggatcagaatgtatcttattcctctgggaaaaatgaaacataaaaatttcagaaataaggttttgggccagcttcattggttttaagagaaggaagggaggagactcatgcaggtttgacgctgagcagcaccatgtggttgggcctggcaggcactcgaggctttaggtcttggtttgaatccagactagaaaatcattacttattaaaagccttgaggatatgggtctaggaaagtctatgtgaagagataatagtttggaaaaagttttgcagaactaaagaaaagtttccacagttaccttttctgtcctaatgtagagcatctttgttaactaggtcttggatcaatccaagctgtgtctgagaataaccatttataatttctcactggccagcactaacaccctttagaaaaggaactcaaagcagccctagcagccagagtcatgcgatcatggtgggagtacagctcctcaccaaggtcagctcctcagtgaaatccatgccttctggaggactgcttgtaaataaatattaagcacaaccattaaaaaataatttggctgtgaccatcaaatagtga

SEQ ID NO: 31833 - DNA, 339 bp, Homo sapiens
gagttaaagtcctgtaatggttgtcagataagtggattgatgaaggaataaaaaaggaattcaaaaaccattacgtttatacttcaagaggttatttttaatcaggaatggattcaagtaaaatattctaagtaatttttgaagaatgagtaagttactcaatttaaaaaaataaagggggcaaaagaaaaaatcaaatttgtcccaacagagttcagtgattttacaaaacaaatccattgatctagactctcccagttttgtctgccttttcctgtgatcacaggtcaagatgactgattaccctgggaaacacgctatagtctatctcataaacag

SEQ ID NO: 31834 - DNA, 827 bp, Homo sapiens
ataggacaacaggctcagacctgagcataacacttgaggtaatggtgcaggatacagagggttgccctccattcccctcttccagagcaccacaccctggggagacttcccttaccccactgatctgaccattcctgacctgcatccatctgtaatgtcgtggccatggggactggaagggggctgcgagcctgtgccggccagaaggcagtccagcccagcgcagctcagccagctgtcccaggcctctgcaagtcctgtgtgaaaatgaagctgtaaatatcttcctcaagagtcgtatgaggatcaagatcatgtactgaagtgcctggcacaggatcagtccttgactggtgccctgacttttggcagccaccaggtgacctcaagggccttacaagaggttgaagcctgctagtttctctcctgactgggaatttaggataatggctgaggggtgtgtctgtgaaagcctcgtggggaaggccatgagcttgggtgtgattgcagctgctaaggacccttctgtcccccttcagtagcttcctcttggcattgacttcaaaaacccagcaacctgggtgttctgccactgtggtattctgccattggcagctgtgcagccttcgataaggctgtgccctttctgggcatcagtgtcctctccagtaaaagggatcctgttgctccctccttctgtcctttggggttgcagagacaccctgcctggcattttgctttcactgaagggccctgcagagtctttgggctgccttagtcatcattcctgaggctcagcttagaggcttctgagtgtggcacatccc

SEQ ID NO: 31835 - DNA, 389 bp, Homo sapiens
aattctaaagatgacaagctcattctcacactaagtccgtagaaattatagtagaggtacttttgaattaataaaaatgtatatcactgctctcaaaaatagaagggggctgggcatggtggctcatgcctataatcccagcactttgggaggccaaggcaggtggatcatttgatgtcaggagttcaagaccagcctggccaacatggtgaaaccctgtctctactaaaaatacaaaaattagcctggcgtggtggcggacacctgtaattccagctactggggaggctgaggcaggaaaatcgcttgaatccaggaggtggaggttgcagtgagctgagattgcaccattgcactccagtctgggcaacagagcaagaccctgacta

SEQ ID NO: 31836 - DNA, 372 bp, Homo sapiens
  misc_feature (332)..(332): n is a, c, g, or t
  misc_feature (345)..(345): n is a, c, g, or t
  misc_feature (362)..(362): n is a, c, g, or t
aaggctatagtaatccaaacaacatgatactggtataaaagtagacacatagaccaatggaacagaatagagaaccgagaaataaagctgaatacttacaagtaattgatcttttgacagagcatacaaaaacataaatcagggaaaagacattctattcaatagatggtgctgggacaactggatagccacatgtagaagaatgaaatggacccctatctctcactatctacaaacatcagctcgagggggggcccgggtacccaattcgcccttttagttgagtcgtatttacatttcactgggccgttcgtttttacaacgtcgttgantgggggaaaaccnggggcgtttaccccaantttaattcgc

SEQ ID NO: 31837 - DNA, 570 bp, Homo sapiens
gttgtaagtaaggcaatgcctggtgatgggttcttggggctcctggagtttgatttaataacaaatatttattgaccacatattgtcttgtactgtgagaggccttatgggaggtcaaaaggaattttgccctaatgatcttaataatctccataggacaaaaagtgcacatgtataaagtggaaaacaaggaaagcctggcagatgatggttaaatttatttgctgatcaatgtgaatgaggcagactaagaggtttctaccagaaggaacttgagcttcttgattcgagttagccatcaagtaacttgaggtgaccttgggcaaggctttcttactggtctcctatattggacgagggcccctcaagcccaagtgagaaggctgtttctattatctccttttcctcctatctccagtgggacacccagtcctgcgaattctattttgggaatgtttctagagtctgcccagtctcttcccagtccagtgctttctccatcccgtggccagggtaatcttgctgaaacacaaatctgatcacgtcacccacctctgcttaaaaccttca

SEQ ID NO: 31838 - DNA, 2036 bp, Homo sapiens
ctggccctttaagggccgcccccgaggaggtgccaggcccgggtggcgccgtccgtccttcctggtcctgcgggtccaggactgtccgcggggttgagggaaggggccgtgcccggtgccagcccaggtgctcgcggcctggctccatggccctggtcacagtgagccgttcgcccccgggcagcggcgcctccacgcccgtggggccctgggaccaggcggtccagcgaaggagtcgactccagcgaaggcagagctttgcggtgctccgtggggctgtcctgggactgcaggatggaggggacaatgatgatgcagcagaggccagttctgagccaacagagaaggccccgagtgaggaggagctccacggggaccagacagacttcgggcaaggatcccagagtccccagaagcaggaggagcagaggcagcacctgcacctcatggtacagctgctgaggccgcaggatgacatccgcctggcagcccagctggaggcaccccggcctccccggctccgctacctgctggtagtttctacacgagaaggagaaggtctgagccaggatgagacggtcctcctgggcgtggatttccctgacagcagctcccccagctgcaccctgggcctggtcttgcccctctggagtgacacccaggtgtacttagatggagacgggggcttcagcgtgacgtctggtgggcaaagccggatcttcaagcccatctccatccagaccatgtgggccacactccaggtattgcaccaagcatgtgaggcagctctaggcagcggccttgtaccgggtggcagtgccctcacctgggccagccactaccaggagagactgaactccgaacagagctgcctcaatgagtggacggctatggccgacctggagtctctgcggcctcccagcgccgagcctggcgggtcctcagaacaggagcagatggagcaggcgatccgtgctgagctgtggaaagtgttggatctggagagcacctcagagaccagtgacatgccagaggtcttctcttcccacgagtcttcacatgaagagcctctgcagcccttcccacagcttgcaaggaccaagggaggccagcaggtggacagggggcctcagcctgccctgaagtcccgccagtcagtggttaccctccagggcagtgccgtggtggccaaccggacccaggccttccaggagcaggagcaggggcaggggcaggggcagggagagccctgcatttcctctacgcccaggttccggaaggtggtgagacaggccagcgtgcatgacagtggagaggagggcgaggcctgagccctcacacatgcccacgctcccctgacactgaagaggatccacaactccttggagaaacaccctcacgtctgttgccgcacacattcctctcagctccgccccatacccgtcactacagcctcacctcccacccctgtcactacggcctcacctcccacccctgtcactacagcctcacctcctacagccttaagtcccaggcccatgtctgcctgtccaagggctcaagactttctaactgggatgtggtagagggactgaaggtacctttgggggcaacagcaccctagtttcattctcaactctagccctgcacactcacctgtggcacggaatgaaaacagagcttcccgtgcaaaaagggtcacgcctcccacccccgccccctccctgcacctcctgtcctctcccagttcattcctggaaccagccaggccaggcaaccagtggcccccaaaggcaggcaggatcctcaggccccagccgcgggaggctggaagggctggcagatcgcttccctcatccacctccaccggtccaggtctttgctgctgtccccagacctcctgtgacaccacgccagatcacagggcaccaggccagagatagtcttctttttgtcctttctggcctctggctagtcagtttttcatagccttacagtatctggctttgtactgagaaataaaacacattttcata

SEQ ID NO: 31839 - DNA, 1831 bp, Homo sapiens
ctggccctttaagggccgcccccgaggaggtgccaggcccgggtggcgccgtccgtccttcctggtcctgcgggtccaggactgtccgcggggttgagggaaggggccgtgcccggtgccagcccaggtgctcgcggcctggctccatggccctggtcacagtgagccgttcgcccccgggcagcggcgcctccacgcccgtggggccctgggaccaggcggtccagcgaaggagtcgactccagcgaaggcagagctttgcggtgctccgtggggctgtcctgggactgcaggatggaggggacaatgatgatgcagcagaggccagttctgagccaacagcaccctagtttcattctcaactctagccctgcacactcacctatggcccgggagattgacaacttctaccctgagcgcttcacctaccacaatgtgcgcctctgggatgaggagtcggcccagctgctgccgcactggaaggagacgcaccgcttcattgaggctgcaagagcacagggcacccacgtgctggtccactgcaagatgggcgtcagccgctcagcggccacagtgctggcctatgccatgaagcagtacgaatgcagcctggagcaggccctgcgccacgtgcaggagctccggcccatcgcccgccccaaccctggcttcctgcgccagctgcagatctaccagggcatcctgacggccagtgagggtggtggggaggagaaggttgtaggcatggaagagagccaggcagccccgaaagaagagcctgggccacggccacgtataaacctccgaggggtcatgaggtccatcagtcttctggagccctccttggagctggagagcacctcagagaccagtgacatgccagaggtcttctcttcccacgagtcttcacatgaagagcctctgcagcccttcccacagcttgcaaggaccaagggaggccagcaggtggacagggggcctcagcctgccctgaagtcccgccagtcagtggttaccctccagggcagtgccgtggtggccaaccggacccaggccttccaggagcaggagcaggggcaggggcaggggcagggagagccctgcatttcctctacgcccaggttccggaaggtggtgagacaggccagcgtgcatgacagtggagaggagggcgaggcctgagccctcacacatgcccacgctcccctgacactgaagaggatccacaactccttggagaaacaccctcacgtctgttgccgcacacattcctctcagctccgccccatacccgtcactacagcctcacctcccacccctgtcactacggcctcacctcccacccctgtcactacagcctcacctcctacagccttaagtcccaggcccatgtctgcctgtccaagggctcaagactttctaactgggatgtggtagagggactgaaggtacctttgggggcaacagcaccctagtttcattctcaactctagccctgcacactcctgtcctctcccagttcattcctggaaccagccaggccaggcaaccagtggcccccaaaggcaggcaggatcctcaggccccagccgcgggaggctggaagggctggcagatcgcttccctcatccacctccaccggtccaggtctttgctgctgtccccagacctcctgtgacaccacgccagatcacagggcaccaggccagagatagtcttctttttgtcctttctggcctctggctagtcagtttttcatagccttacagtatctggctttgtactgagaaataaaacacattttcatatttggttattttcaatgtgacga

SEQ ID NO: 31840 - DNA, 325 bp, Homo sapiens
tggcctcccccaactctagaattcctgagagaggggaggggacagccctccccgccctcaccccgccctggggctgctctctcggcaggaccaggcggtccagcgaaggagtcgactccagcgaaggcagagctttgcggtgctccgtggggctgtcctgggacgtctttgctgctgtccccagacctcctgtgacaccacgccagatcacagggcaccaggccagagatagtcttctttttgtcctttctggcctctggctagtcagtttttcatagccttacagtatctggctttgtactgagaaataaaacacattttcata

SEQ ID NO: 31841 - DNA, 2831 bp, Homo sapiens
ctggccctttaagggccgcccccgaggaggtgccaggcccgggtggcgccgtccgtccttcctggtcctgcgggtccaggactgtccgcggggttgagggaaggggccgtgcccggtgccagcccaggtgctcgcggcctggctccatggccctggtcacagtgagccgttcgcccccgggcagcggcgcctccacgcccgtggggccctgggaccaggcggtccagcgaaggagtcgactccagcgaaggcagagctttgcggtgctccgtggggctgtcctgggactgcaggatggaggggacaatgatgatgcagcagaggccagttctgagccaacagagaaggccccgagtgaggaggagctccacggggaccagacagacttcgggcaaggatcccagagtccccagaagcaggaggagcagaggcagcacctgcacctcatggtacagctgctgaggccgcaggatgacatccgcctggcagcccagctggaggcaccccggcctccccggctccgctacctgctggtagtttctacacgagaaggagaaggtctgagccaggatgagacggtcctcctgggcgtggatttccctgacagcagctcccccagctgcaccctgggcctggtcttgcccctctggagtgacacccaggtgtacttagatggagacgggggcttcagcgtgacgtctggtgggcaaagccggatcttcaagcccatctccatccagaccatgtgggccacactccaggtattgcaccaagcatgtgaggcagctctaggcagcggccttgtaccgggtggcagtgccctcacctgggccagccactaccaggagagactgaactccgaacagagctgcctcaatgagtggacggctatggccgacctggagtctctgcggcctcccagcgccgagcctggcgggtcctcagaacaggagcagatggagcaggcgatccgtgctgagctgtggaaagtgttggatgtcagtgacctggagagtgtcacttccaaagagatccgccaggctctggagctgcgcctggggctccccctccagcagtaccgtgacttcatcgacaaccagatgctgctgctggtggcacagcgggaccgagcctcccgcatcttcccccacctctacctgggctcagagtggaacgcagcaaacctggaggagctgcagaggaacagggtcacccacatcttgaacatggcccgggagattgacaacttctaccctgagcgcttcacctaccacaatgtgcgcctctgggatgaggagtcggcccagctgctgccgcactggaaggagacgcaccgcttcattgaggctgcaagagcacagggcacccacgtgctggtccactgcaagatgggcgtcagccgctcagcggccacagtgctggcctatgccatgaagcagtacgaatgcagcctggagcaggccctgcgccacgtgcaggagctccggcccatcgcccgccccaaccctggcttcctgcgccagctgcagatctaccagggcatcctgacggccagccgccagagccatgtctgggagcagaaagtgggtggggtctccccagaggagcacccagcccctgaagtctctacaccattcccacctcttccgccagaacctgagggtggtggggaggagaaggttgtaggcatggaagagagccaggcagccccgaaagaagagcctgggccacggccacgtataaacctccgaggggtcatgaggtccatcagtcttctggagccctccttggagctggagagcacctcagagaccagtgacatgccagaggtcttctcttcccacgagtcttcacatgaagagcctctgcagcccttcccacagcttgcaaggaccaagggaggccagcaggtggacagggggcctcagcctgccctgaagtcccgccagtcagtggttaccctccagggcagtgccgtggtggccaaccggacccaggccttccaggagcaggagcaggggcaggggcaggggcagggagagccctgcatttcctctacgcccaggttccggaaggtggtgagacaggccagcgtgcatgacagtggagaggagggcgaggcctgagccctcacacatgcccacgctcccctgacactgaagaggatccacaactccttggagaaacaccctcacgtctgttgccgcacacattcctctcagctccgccccatacccgtcactacagcctcacctcccacccctgtcactacggcctcacctcccacccctgtcactacagcctcacctcctacagccttaagtcccaggcccatgtctgcctgtccaagggctcaagactttctaactgggatgtggtagagggactgaaggtacctttgggggcaacagcaccctagtttcattctcaactctagccctgcacactcacctgtggcacggaatgaaaacagagcttcccgtgcaaaaagggtcacgcctcccacccccgccccctccctgcacctcctgtcctctcccagttcattcctggaaccagccaggccaggcaaccagtggcccccaaaggcaggcaggatcctcaggccccagccgcgggaggctggaagggctggcagatcgcttccctcatccacctccaccggtccaggtctttgctgctgtccccagacctcctgtgacaccacgccagatcacagggcaccaggccagagatagtcttctttttgtcctttctggcctctggctagtcagtttttcatagccttacagtatctggctttgtactgagaaataaaacacattttcata

SEQ ID NO: 31842 - DNA, 2707 bp, Homo sapiens
tggcctcccccaactctagaattcctgagagaggggaggggacagccctccccgccctcaccccgccctggggctgctctctcggcaggaccaggcggtccagcgaaggagtcgactccagcgaaggcagagctttgcggtgctccgtggggctgtcctgggactgcaggatggaggggacaatgatgatgcagcagaggccagttctgagccaacagagaaggccccgagtgaggaggagctccacggggaccagacagacttcgggcaaggatcccagagtccccagaagcaggaggagcagaggcagcacctgcacctcatggtacagctgctgaggccgcaggatgacatccgcctggcagcccagctggaggcaccccggcctccccggctccgctacctgctggtagtttctacacgagaaggagaaggtctgagccaggatgagacggtcctcctgggcgtggatttccctgacagcagctcccccagctgcaccctgggcctggtcttgcccctctggagtgacacccaggtgtacttagatggagacgggggcttcagcgtgacgtctggtgggcaaagccggatcttcaagcccatctccatccagaccatgtgggccacactccaggtattgcaccaagcatgtgaggcagctctaggcagcggccttgtaccgggtggcagtgccctcacctgggccagccactaccaggagagactgaactccgaacagagctgcctcaatgagtggacggctatggccgacctggagtctctgcggcctcccagcgccgagcctggcgggtcctcagaacaggagcagatggagcaggcgatccgtgctgagctgtggaaagtgttggatgtcagtgacctggagagtgtcacttccaaagagatccgccaggctctggagctgcgcctggggctccccctccagcagtaccgtgacttcatcgacaaccagatgctgctgctggtggcacagcgggaccgagcctcccgcatcttcccccacctctacctgggctcagagtggaacgcagcaaacctggaggagctgcagaggaacagggtcacccacatcttgaacatggcccgggagattgacaacttctaccctgagcgcttcacctaccacaatgtgcgcctctgggatgaggagtcggcccagctgctgccgcactggaaggagacgcaccgcttcattgaggctgcaagagcacagggcacccacgtgctggtccactgcaagatgggcgtcagccgctcagcggccacagtgctggcctatgccatgaagcagtacgaatgcagcctggagcaggccctgcgccacgtgcaggagctccggcccatcgcccgccccaaccctggcttcctgcgccagctgcagatctaccagggcatcctgacggccagccgccagagccatgtctgggagcagaaagtgggtggggtctccccagaggagcacccagcccctgaagtctctacaccattcccacctcttccgccagaacctgagggtggtggggaggagaaggttgtaggcatggaagagagccaggcagccccgaaagaagagcctgggccacggccacgtataaacctccgaggggtcatgaggtccatcagtcttctggagccctccttggagctggagagcacctcagagaccagtgacatgccagaggtcttctcttcccacgagtcttcacatgaagagcctctgcagcccttcccacagcttgcaaggaccaagggaggccagcaggtggacagggggcctcagcctgccctgaagtcccgccagtcagtggttaccctccagggcagtgccgtggtggccaaccggacccaggccttccaggagcaggagcaggggcaggggcaggggcagggagagccctgcatttcctctacgcccaggttccggaaggtggtgagacaggccagcgtgcatgacagtggagaggagggcgaggcctgagccctcacacatgcccacgctcccctgacactgaagaggatccacaactccttggagaaacaccctcacgtctgttgccgcacacattcctctcagctccgccccatacccgtcactacagcctcacctcccacccctgtcactacggcctcacctcccacccctgtcactacagcctcacctcctacagccttaagtcccaggcccatgtctgcctgtccaagggctcaagactttctaactgggatgtggtagagggactgaaggtacctttgggggcaacagcaccctagtttcattctcaactctagccctgcacactcacctgtggcacggaatgaaaacagagcttcccgtgcaaaaagggtcacgcctcccacccccgccccctccctgcacctcctgtcctctcccagttcattcctggaaccagccaggccaggcaaccagtggcccccaaaggcaggcaggatcctcaggccccagccgcgggaggctggaagggctggcagatcgcttccctcatccacctccaccggtccaggtctttgctgctgtccccagacctcctgtgacaccacgccagatcacagggcaccaggccagagatagtcttctttttgtcctttctggcctctggctagtcagtttttcatagccttacagtatctggctttgtactgagaaataaaacacattttcata

SEQ ID NO: 31843 - DNA, 2203 bp, Homo sapiens
taggctagtagggctggggttaatcggcgaggccaggtgtcttatatggagacggggcttcagcgtgacgtctggtgggcaaagccggatcttcaagcccatctccatccagaccatgtgggccacactccaggtattgcaccaagcatgtgaggcagctctaggcagcggccttgtaccgggtggcagtgccctcacctgggccagccactaccaggagagactgaactccgaacagagctgcctcaatgagtggacggctatggccgacctggagtctctgcggcctcccagcgccgagcctggcgggtcctcagaacaggagcagatggagcaggcgatccgtgctgagctgtggaaagtgttggatgtcagtgacctggagagtgtcacttccaaagagatccgccaggctctggagctgcgcctggggctccccctccagcagtaccgtgacttcatcgacaaccagatgctgctgctggtggcacagcgggaccgagcctcccgcatcttcccccacctctacctgggctcagagtggaacgcagcaaacctggaggagctgcagaggaacagggtcacccacatcttgaacatggcccgggagattgacaacttctaccctgagcgcttcacctaccacaatgtgcgcctctgggatgaggagtcggcccagctgctgccgcactggaaggagacgcaccgcttcattgaggctgcaagagcacagggcacccacgtgctggtccactgcaagatgggcgtcagccgctcagcggccacagtgctggcctatgccatgaagcagtacgaatgcagcctggagcaggccctgcgccacgtgcaggagctccggcccatcgcccgccccaaccctggcttcctgcgccagctgcagatctaccagggcatcctgacggccagccgccagagccatgtctgggagcagaaagtgggtggggtctccccagaggagcacccagcccctgaagtctctacaccattcccacctcttccgccagaacctgagggtggtggggaggagaaggttgtaggcatggaagagagccaggcagccccgaaagaagagcctgggccacggccacgtataaacctccgaggggtcatgaggtccatcagtcttctggagccctccttggagctggagagcacctcagagaccagtgacatgccagaggtcttctcttcccacgagtcttcacatgaagagcctctgcagcccttcccacagcttgcaaggaccaagggaggccagcaggtggacagggggcctcagcctgccctgaagtcccgccagtcagtggttaccctccagggcagtgccgtggtggccaaccggacccaggccttccaggagcaggagcaggggcaggggcaggggcagggagagccctgcatttcctctacgcccaggttccggaaggtggtgagacaggccagcgtgcatgacagtggagaggagggcgaggcctgagccctcacacatgcccacgctcccctgacactgaagaggatccacaactccttggagaaacaccctcacgtctgttgccgcacacattcctctcagctccgccccatacccgtcactacagcctcacctcccacccctgtcactacggcctcacctcccacccctgtcactacagcctcacctcctacagccttaagtcccaggcccatgtctgcctgtccaagggctcaagactttctaactgggatgtggtagagggactgaaggtacctttgggggcaacagcaccctagtttcattctcaactctagccctgcacactcacctgtggcacggaatgaaaacagagcttcccgtgcaaaaagggtcacgcctcccacccccgccccctccctgcacctcctgtcctctcccagttcattcctggaaccagccaggccaggcaaccagtggcccccaaaggcaggcaggatcctcaggccccagccgcgggaggctggaagggctggcagatcgcttccctcatccacctccaccggtccaggtctttgctgctgtccccagacctcctgtgacaccacgccagatcacagggcaccaggccagagatagtcttctttttgtcctttctggcctctggctagtcagtttttcatagccttacagtatctggctttgtactgagaaataaaacacattttcata

SEQ ID NO: 31844 - DNA, 2729 bp, Homo sapiens
ctggccctttaagggccgcccccgaggaggtgccaggcccgggtggcgccgtccgtccttcctggtcctgcgggtccaggactgtccgcggggttgagggaaggggccgtgcccggtgccagcccaggtgctcgcggcctggctccatggccctggtcacagtgagccgttcgcccccgggcagcggcgcctccacgcccgtggggccctgggaccaggcggtccagcgaaggagtcgactccagcgaaggcagagctttgcggtgctccgtggggctgtcctgggactgcaggatggaggggacaatgatgatgcagcagaggccagttctgagccaacagagaaggccccgagtgaggaggagctccacggggaccagacagacttcgggcaaggatcccagagtccccagaagcaggaggagcagaggcagcacctgcacctcatggtacagctgctgaggccgcaggatgacatccgcctggcagcccagctggaggcaccccggcctccccggctccgctacctgctggtagtttctacacgagaaggagaaggtctgagccaggatgagacggtcctcctgggcgtggatttccctgacagcagctcccccagctgcaccctgggcctggtcttgcccctctggagtgacacccaggtgtacttagatggagacgggggcttcagcgtgacgtctggtgggcaaagccggatcttcaagcccatctccatccagaccatgtgggccacactccaggtattgcaccaagcatgtgaggcagctctaggcagcggccttgtaccgggtggcagtgccctcacctgggccagccactaccaggagagactgaactccgaacagagctgcctcaatgagtggacggctatggccgacctggagtctctgcggcctcccagcgccgagcctggcgggtcctcagaacaggagcagatggagcaggcgatccgtgctgagctgtggaaagtgttggatgtcagtgacctggagagtgtcacttccaaagagatccgccaggctctggagctgcgcctggggctccccctccagcagtaccgtgacttcatcgacaaccagatgctgctgctggtggcacagcgggaccgagcctcccgcatcttcccccacctctacctgggctcagagtggaacgcagcaaacctggaggagctgcagaggaacagggtcacccacatcttgaacatggcccgggagattgacaacttctaccctgagcgcttcacctaccacaatgtgcgcctctgggatgaggagtcggcccagctgctgccgcactggaaggagacgcaccgcttcattgaggctgcaagagcacagggcacccacgtgctggtccactgcaagatgggcgtcagccgctcagcggccacagtgctggcctatgccatgaagcagtacgaatgcagcctggagcaggccctgcgccacgtgcaggagctccggcccatcgcccgccccaaccctggcttcctgcgccagctgcagatctaccagggcatcctgacggccagtgagggtggtggggaggagaaggttgtaggcatggaagagagccaggcagccccgaaagaagagcctgggccacggccacgtataaacctccgaggggtcatgaggtccatcagtcttctggagccctccttggagctggagagcacctcagagaccagtgacatgccagaggtcttctcttcccacgagtcttcacatgaagagcctctgcagcccttcccacagcttgcaaggaccaagggaggccagcaggtggacagggggcctcagcctgccctgaagtcccgccagtcagtggttaccctccagggcagtgccgtggtggccaaccggacccaggccttccaggagcaggagcaggggcaggggcaggggcagggagagccctgcatttcctctacgcccaggttccggaaggtggtgagacaggccagcgtgcatgacagtggagaggagggcgaggcctgagccctcacacatgcccacgctcccctgacactgaagaggatccacaactccttggagaaacaccctcacgtctgttgccgcacacattcctctcagctccgccccatacccgtcactacagcctcacctcccacccctgtcactacggcctcacctcccacccctgtcactacagcctcacctcctacagccttaagtcccaggcccatgtctgcctgtccaagggctcaagactttctaactgggatgtggtagagggactgaaggtacctttgggggcaacagcaccctagtttcattctcaactctagccctgcacactcacctgtggcacggaatgaaaacagagcttcccgtgcaaaaagggtcacgcctcccacccccgccccctccctgcacctcctgtcctctcccagttcattcctggaaccagccaggccaggcaaccagtggcccccaaaggcaggcaggatcctcaggccccagccgcgggaggctggaagggctggcagatcgcttccctcatccacctccaccggtccaggtctttgctgctgtccccagacctcctgtgacaccacgccagatcacagggcaccaggccagagatagtcttctttttgtcctttctggcctctggctagtcagtttttcatagccttacagtatctggctttgtactgagaaataaaacacattttcata

SEQ ID NO: 31845 - DNA, 2684 bp, Homo sapiens
ctggccctttaagggccgcccccgaggaggtgccaggcccgggtggcgccgtccgtccttcctggtcctgcgggtccaggactgtccgcggggttgagggaaggggccgtgcccggtgccagcccaggtgctcgcggcctggctccatggccctggtcacagtgagccgttcgcccccgggcagcggcgcctccacgcccgtggggccctgggaccaggcggtccagcgaaggagtcgactccagcgaaggcagagctttgcggtgctccgtggggctgtcctgggactgcaggatggaggggacaatgatgatgcagcagaggccagttctgagccaacagagaaggccccgagtgaggaggagctccacggggaccagacagacttcgggcaaggatcccagagtccccagaagcaggaggagcagaggcagcacctgcacctcatggtacagctgctgaggccgcaggatgacatccgcctggcagcccagctggaggcaccccggcctccccggctccgctacctgctggtagtttctacacgagaaggagaaggtctgagccaggatgagacggtcctcctgggcgtggatttccctgacagcagctcccccagctgcaccctgggcctggtcttgcccctctggagtgacacccaggtgtacttagatggagacgggggcttcagcgtgacgtctggtgggcaaagccggatcttcaagcccatctccatccagaccatgtgggccacactccaggtattgcaccaagcatgtgaggcagctctaggcagcggccttgtaccgggtggcagtgccctcacctgggccagccactaccaggagagactgaactccgaacagagctgcctcaatgagtggacggctatggccgacctggagtctctgcggcctcccagcgccgagcctggcgggtcctcagaacaggagcagatggagcaggcgatccgtgctgagctgtggaaagtgttggatgtcagtgacctggagagtgtcacttccaaagagatccgccaggctctggagctgcgcctggggctccccctccagcagtaccgtgacttcatcgacaaccagatgctgctgctggtggcacagcgggaccgagcctcccgcatcttcccccacctctacctgggctcagagtggaacgcagcaaacctggaggagctgcagaggaacagagcacagggcacccacgtgctggtccactgcaagatgggcgtcagccgctcagcggccacagtgctggcctatgccatgaagcagtacgaatgcagcctggagcaggccctgcgccacgtgcaggagctccggcccatcgcccgccccaaccctggcttcctgcgccagctgcagatctaccagggcatcctgacggccagccgccagagccatgtctgggagcagaaagtgggtggggtctccccagaggagcacccagcccctgaagtctctacaccattcccacctcttccgccagaacctgagggtggtggggaggagaaggttgtaggcatggaagagagccaggcagccccgaaagaagagcctgggccacggccacgtataaacctccgaggggtcatgaggtccatcagtcttctggagccctccttggagctggagagcacctcagagaccagtgacatgccagaggtcttctcttcccacgagtcttcacatgaagagcctctgcagcccttcccacagcttgcaaggaccaagggaggccagcaggtggacagggggcctcagcctgccctgaagtcccgccagtcagtggttaccctccagggcagtgccgtggtggccaaccggacccaggccttccaggagcaggagcaggggcaggggcaggggcagggagagccctgcatttcctctacgcccaggttccggaaggtggtgagacaggccagcgtgcatgacagtggagaggagggcgaggcctgagccctcacacatgcccacgctcccctgacactgaagaggatccacaactccttggagaaacaccctcacgtctgttgccgcacacattcctctcagctccgccccatacccgtcactacagcctcacctcccacccctgtcactacggcctcacctcccacccctgtcactacagcctcacctcctacagccttaagtcccaggcccatgtctgcctgtccaagggctcaagactttctaactgggatgtggtagagggactgaaggtacctttgggggcaacagcaccctagtttcattctcaactctagccctgcacactcacctgtggcacggaatgaaaacagagcttcccgtgcaaaaagggtcacgcctcccacccccgccccctccctgcacctcctgtcctctcccagttcattcctggaaccagccaggccaggcaaccagtggcccccaaaggcaggcaggatcctcaggccccagccgcgggaggctggaagggctggcagatcgcttccctcatccacctccaccggtccaggtctttgctgctgtccccagacctcctgtgacaccacgccagatcacagggcaccaggccagagatagtcttctttttgtcctttctggcctctggctagtcagtttttcatagccttacagtatctggctttgtactgagaaataaaacacattttcata

SEQ ID NO: 31846 - DNA, 3153 bp, Homo sapiens
ctggccctttaagggccgcccccgaggaggtgccaggcccgggtggcgccgtccgtccttcctggtcctgcgggtccaggactgtccgcggggttgagggaaggggccgtgcccggtgccagcccaggtgctcgcggcctggctccatggccctggtcacagtgagccgttcgcccccgggcagcggcgcctccacgcccgtggggccctgggaccaggcggtccagcgaaggagtcgactccagcgaaggcagagctttgcggtgctccgtggggctgtcctgggactgcaggatggaggggacaatgatgatgcagcagaggccagttctgagccaacagagaaggccccgagtgaggaggagctccacggggaccagacagacttcgggcaaggatcccagagtccccagaagcaggaggagcagaggcagcacctgcacctcatggtacagctgctgaggccgcaggatgacatccgcctggcagcccagctggaggcaccccggcctccccggctccgctacctgctggtagtttctacacgagaaggagaaggtctgagccaggatgagacggtcctcctgggcgtggatttccctgacagcagctcccccagctgcaccctgggcctggtcttgcccctctggagtgacacccaggtgtacttagatggagacgggggcttcagcgtgacgtctggtgggcaaagccggatcttcaagcccatctccatccagaccatgtgggccacactccaggtattgcaccaagcatgtgaggcagctctaggcagcggccttgtaccgggtggcagtgccctcacctgggccagccactaccaggagagactgaactccgaacagagctgcctcaatgagtggacggctatggccgacctggagtctctgcggcctcccagcgccgagcctggcgggtcctcagaacaggagcagatggagcaggcgatccgtgctgagctgtggaaagtgttggatgtcagtgacctggagagtgtcacttccaaagagatccgccaggctctggagctgcgcctggggctccccctccagcagtaccgtgacttcatcgacaaccagatgctgctgctggtggcacagcgggaccgagcctcccgcatcttcccccacctctacctgggctcagagtggaacgcagcaaacctggaggagctgcagaggaacagggtcacccacatcttgaacatggcccgggagattgacaacttctaccctgagcgcttcacctaccacaatgtgcgcctctgggatgaggagtcggcccagctgctgccgcactggaaggagacgcaccgcttcattgaggctgcaagagcacagggcacccacgtgctggtccactgcaagatgggcgtcagccgctcagcggccacagtgctggcctatgccatgaagcagtacgaatgcagcctggagcaggccctgcgccacgtgcaggagctccggcccatcgcccgccccaaccctggcttcctgcgccagctgcagatctaccagggcatcctgacggccagccgccagagccatgtctgggagcagaaagtgggtggggtctccccagaggagcacccagcccctgaagtctctacaccattcccacctcttccgccagaacctgagggtggtggggaggagaaggttgtaggcatggaagagagccaggcagccccgaaagaagagcctgggccacggccacgtataaacctccgaggggtcatgaggtccatcagtcttctggagccctccttggagctggagagcacctcagagaccagtgacatgccagaggtcttctcttcccacgagtcttcacatgaagagcctctgcagcccttcccacagcttgcaaggaccaagggaggccagcaggtggacagggggcctcagcctgccctgaagtcccgccagtcagtggttaccctccagggcagtgccgtggtggccaaccggacccaggccttccaggagcaggagcaggggcaggggcaggggcagggagagccctgcatttcctctacgcccaggttccggaaggtggtgagacaggccagcgtgcatgacagtggagaggagggcgaggcctgagccctcacacatgcccacgctcccctgacactgaagaggatccacaactccttggagaaacaccctcacgtctgttgccgcacacattcctctcagctccgccccatacccgtcactacagcctcacctcccacccctgtcactacggcctcacctcccacccctgtcactacagcctcacctcctacagccttaagtcccaggcccatgtctgcctgtccaagggctcaagactttctaactgggatgtggtagagggactgaaggtacctttgggggcaacagcaccctagtttcattctcaactctagccctgcacactcacctgtggcacggaatgaaaacagagcttcccgtgcaaaaagggtcacgcctcccacccccgccccctccctgcacctcctgtcctctcccagttcattcctggaaccagccaggccaggcaaccagtggcccccaaaggcaggcaggatcctcaggccccagccgcgggaggctggaagggctggcagatcgcttccctcatccacctccaccggtccaggtctttgctgctgtccccagacctcctgtgacaccacgccagatcacagggcaccaggccagagatagtcttctttttgtcctttctggcctctggctagtcagtttttcatagccttacagtatctggctttgtactgagaaataaaacacattttcataaaaaaaaaaaaaaaactccggggacactaatgacgggggcgaaacaacgggtagcaatgcgcagtgccctagatggttcgtgacccacagtttttggggaccacggggcgaacctcgcggggccccaaaagggaggcgagaaattccgaaccggtggaacacacgtagaactagaatagcagagagcaagaagccaactcacaagcacgaacacaatacagcagaagcagcagacacagacaaagcacaagagaacacacatcccgagcaacagaaagaacagaatcaagccaacacacacaacaacagagcaagacgcggg

SEQ ID NO: 31847 - DNA, 1625 bp, Homo sapiens
taggctagtacgaggccgggtggtaatcggccgagggacacttctaccctgagcgcttcacctaccacaatgtgcgcctctgggatgaggagtcggcccagctgctgccgcactggaaggagacgcaccgcttcattgaggctgcaagagcacagggcacccacgtgctggtccactgcaagatgggcgtcagccgctcagcggccacagtgctggcctatgccatgaagcagtacgaatgcagcctggagcaggccctgcgccacgtgcaggagctccggcccatcgcccgccccaaccctggcttcctgcgccagctgcagatctaccagggcatcctgacggccagccgccagagccatgtctgggagcagaaagtgggtggggtctccccagaggagcacccagcccctgaagtctctacaccattcccacctcttccgccagaacctgagggtggtggggaggagaaggttgtaggcatggaagagagccaggcagccccgaaagaagagcctgggccacggccacgtataaacctccgaggggtcatgaggtccatcagtcttctggagccctccttggagctggagagcacctcagagaccagtgacatgccagaggtcttctcttcccacgagtcttcacatgaagagcctctgcagcccttcccacagcttgcaaggaccaagggaggccagcaggtggacagggggcctcagcctgccctgaagtcccgccagtcagtggttaccctccagggcagtgccgtggtggccaaccggacccaggccttccaggagcaggagcaggggcaggggcaggggcagggagagccctgcatttcctctacgcccaggttccggaaggtggtgagacaggccagcgtgcatgacagtggagaggagggcgaggcctgagccctcacacatgcccacgctcccctgacactgaagaggatccacaactccttggagaaacaccctcacgtctgttgccgcacacattcctctcagctccgccccatacccgtcactacagcctcacctcccacccctgtcactacggcctcacctcccacccctgtcactacagcctcacctcctacagccttaagtcccaggcccatgtctgcctgtccaagggctcaagactttctaactgggatgtggtagagggactgaaggtacctttgggggcaacagcaccctagtttcattctcaactctagccctgcacactcacctgtggcacggaatgaaaacagagcttcccgtgcaaaaagggtcacgcctcccacccccgccccctccctgcacctcctgtcctctcccagttcattcctggaaccagccaggccaggcaaccagtggcccccaaaggcaggcaggatcctcaggccccagccgcgggaggctggaagggctggcagatcgcttccctcatccacctccaccggtccaggtctttgctgctgtccccagacctcctgtgacaccacgccagatcacagggcaccaggccagagatagtcttctttttgtcctttctggcctctggctagtcagtttttcatagccttacagtatctggctttgtactgagaaataaaacacattttcata

SEQ ID NO: 31848 - DNA, 1989 bp, Homo sapiens
ctggccctttaagggccgcccccgaggaggtgccaggcccgggtggcgccgtccgtccttcctggtcctgcgggtccaggactgtccgcggggttgagggaaggggccgtgcccggtgccagcccaggtgctcgcggcctggctccatggccctggtcacagtgagccgttcgcccccgggcagcggcgcctccacgcccgtggggccctgggaccaggcggtccagcgaaggagtcgactccagcgaaggcagagctttgcggtgctccgtggggctgtcctgggactgcaggatggaggggacaatgatgatgcagcagaggccagttctgagccaacagcaccctagtttcattctcaactctagccctgcacactcacctatggcccgggagattgacaacttctaccctgagcgcttcacctaccacaatgtgcgcctctgggatgaggagtcggcccagctgctgccgcactggaaggagacgcaccgcttcattgaggctgcaagagcacagggcacccacgtgctggtccactgcaagatgggcgtcagccgctcagcggccacagtgctggcctatgccatgaagcagtacgaatgcagcctggagcaggccctgcgccacgtgcaggagctccggcccatcgcccgccccaaccctggcttcctgcgccagctgcagatctaccagggcatcctgacggccagccgccagagccatgtctgggagcagaaagtgggtggggtctccccagaggagcacccagcccctgaagtctctacaccattcccacctcttccgccagaacctgagggtggtggggaggagaaggttgtaggcatggaagagagccaggcagccccgaaagaagagcctgggccacggccacgtataaacctccgaggggtcatgaggtccatcagtcttctggagccctccttggagctggagagcacctcagagaccagtgacatgccagaggtcttctcttcccacgagtcttcacatgaagagcctctgcagcccttcccacagcttgcaaggaccaagggaggccagcaggtggacagggggcctcagcctgccctgaagtcccgccagtcagtggttaccctccagggcagtgccgtggtggccaaccggacccaggccttccaggagcaggagcaggggcaggggcaggggcagggagagccctgcatttcctctacgcccaggttccggaaggtggtgagacaggccagcgtgcatgacagtggagaggagggcgaggcctgagccctcacacatgcccacgctcccctgacactgaagaggatccacaactccttggagaaacaccctcacgtctgttgccgcacacattcctctcagctccgccccatacccgtcactacagcctcacctcccacccctgtcactacggcctcacctcccacccctgtcactacagcctcacctcctacagccttaagtcccaggcccatgtctgcctgtccaagggctcaagactttctaactgggatgtggtagagggactgaaggtacctttgggggcaacagcaccctagtttcattctcaactctagccctgcacactcacctgtggcacggaatgaaaacagagcttcccgtgcaaaaagggtcacgcctcccacccccgccccctccctgcacctcctgtcctctcccagttcattcctggaaccagccaggccaggcaaccagtggcccccaaaggcaggcaggatcctcaggccccagccgcgggaggctggaagggctggcagatcgcttccctcatccacctccaccggtccaggtctttgctgctgtccccagacctcctgtgacaccacgccagatcacagggcaccaggccagagatagtcttctttttgtcctttctggcctctggctagtcagtttttcatagccttacagtatctggctttgtactgagaaataaaacacattttcata

SEQ ID NO: 31849 - DNA, 2854 bp, Homo sapiens
ctggccctttaagggccgcccccgaggaggtgccaggcccgggtggcgccgtccgtccttcctggtcctgcgggtccaggactgtccgcggggttgagggaaggggccgtgcccggtgccagcccaggtgctcgcggcctggctccatggccctggtcacagtgagccgttcgcccccgggcagcggcgcctccacgcccgtggggccctgggaccaggcggtccagcgaaggagtcgactccagcgaaggcagagctttgcggtgctccgtggggctgtcctgggactgcaggatggaggggacaatgatgatgcagcagaggccagttctgagccaacagagaaggccccgagtgaggaggagctccacggggaccagacagacttcgggcaaggatcccagagtccccagaagcaggaggagcagaggcagcacctgcacctcatggtacagctgctgaggccgcaggatgacatccgcctggcagcccagctggaggcaccccggcctccccggctccgctacctgctggtagtttctacacgagaaggagaaggtctgagccaggatgagacggtcctcctgggcgtggatttccctgacagcagctcccccagctgcaccctgggcctggtcttgcccctctggagtgacacccaggtgtacttagatggagacgggggcttcagcgtgacgtctggtgggcaaagccggatcttcaagcccatctccatccagaccatgtgggccacactccaggtattgcaccaagcatgtgaggcagctctaggcagcggccttgtaccgggtggcagtgccctcacctgggccagccactaccaggagagactgaactccgaacagagctgcctcaatgagtggacggctatggccgacctggagtctctgcggcctcccagcgccgagcctggcgggtcctcagaacaggagcagatggagcaggcgatccgtgctgagctgtggaaagtgttggatgtcagtgacctggagagtgtcacttccaaagagatccgccaggctctggagctgcgcctggggctccccctccagcagtaccgtgacttcatcgacaaccagatgctgctgctggtggcacagcgggaccgagcctcccgcatcttcccccacctctacctgggctcagagtggaacgcagcaaacctggaggagctgcagaggaacagggtcacccacatcttgaacatggcccgggagattgacaacttctaccctgagcgcttcacctaccacaatgtgcgcctctgggatgaggagtcggcccagctgctgccgcactggaaggagacgcaccgcttcattgaggctgcaagagcacagggcacccacgtgctggtccactgcaagatgggcgtcagccgctcagcggccacagtgctggcctatgccatgaagcagtacgaatgcagcctggagcaggccctgcgccacgtgcaggagctccggcccatcgcccgccccaaccctggcttcctgcgccagctgcagatctaccagggcatcctgacggccagccgccagagccatgtctgggagcagaaagtgggtggggtctccccagaggagcacccagcccctgaagtctctacaccattcccacctcttccgccagaacctgagggtggtggggaggagaaggttgtaggcatggaagagagccaggcagccccgaaagaagagcctgggccacggccacgtataaacctccgaggggtcatgaggtccatcagtcttctggagccctccttggagctggagagcacctcagagaccagtgacatgccagaggtcttctcttcccacgagtcttcacatgaagagcctctgcagcccttcccacagcttgcaaggaccaagggaggccagcaggtggacagggggcctcagcctgccctgaagtcccgccagtcagtggttaccctccagggcagtgccgtggtggccaaccggacccaggccttccaggagcaggagcaggggcaggggcaggggcagggagagccctgcatttcctctacgcccaggttccggaaggtggtgagacaggccagcgtgcatgacagtggagaggagggcgaggcctgagccctcacacatgcccacgctcccctgacactgaagaggatccacaactccttggagaaacaccctcacgtctgttgccgcacacattcctctcagctccgccccatacccgtcactacagcctcacctcccacccctgtcactacggcctcacctcccacccctgtcactacagcctcacctcctacagccttaagtcccaggcccatgtctgcctgtccaagggctcaagactttctaactgggatgtggtagagggactgaaggtacctttgggggcaacagcaccctagtttcattctcaactctagccctgcacactcacctgtggcacggaatgaaaacagagcttcccgtgcaaaaagggtcacgcctcccacccccgccccctccctgcacctcctgtcctctcccagttcattcctggaaccagccaggccaggcaaccagtggcccccaaaggcaggcaggatcctcaggccccagccgcgggaggctggaagggctggcagatcgcttccctcatccacctccaccggtccaggtctttgctgctgtccccagacctcctgtgacaccacgccagatcacagggcaccaggccagagatagtcttctttttgtcctttctggcctctggctagtcagtttttcatagccttacagtatctggctttgtactgagaaataaaacacattttcatatttggttattttcaatgtgacga

SEQ ID NO: 31850 - DNA, 1089 bp, Homo sapiens
  misc_feature (57)..(57): n is a, c, g, or t
  misc_feature (61)..(61): n is a, c, g, or t
  misc_feature (85)..(85): n is a, c, g, or t
aaactatggggtgttccaggtatagaatcgtatgtttgcaaacagagatagtttgantttntcccttccagtttggatgcctttnatgtcttctcttcccacgagtcttcacatgaagagcctctgcagcccttcccacagcttgcaaggaccaagggaggccagcaggtggacagggggcctcagcctgccctgaagtcccgccagtcagtggttaccctccagggcagtgccgtggtggccaaccggacccaggccttccaggagcaggagcaggggcaggggcaggggcagggagagccctgcatttcctctacgcccaggttccggaaggtggtgagacaggccagcgtgcatgacagtggagaggagggcgaggcctgagccctcacacatgcccacgctcccctgacactgaagaggatccacaactccttggagaaacaccctcacgtctgttgccgcacacattcctctcagctccgccccatacccgtcactacagcctcacctcccacccctgtcactacggcctcacctcccacccctgtcactacagcctcacctcctacagccttaagtcccaggcccatgtctgcctgtccaagggctcaagactttctaactgggatgtggtagagggactgaaggtacctttgggggcaacagcaccctagtttcattctcaactctagccctgcacactcacctgtggcacggaatgaaaacagagcttcccgtgcaaaaagggtcacgcctcccacccccgccccctccctgcacctcctgtcctctcccagttcattcctggaaccagccaggccaggcaaccagtggcccccaaaggcaggcaggatcctcaggccccagccgcgggaggctggaagggctggcagatcgcttccctcatccacctccaccggtccaggtctttgctgctgtccccagacctcctgtgacaccacgccagatcacagggcaccaggccagagatagtcttctttttgtcctttctggcctctggctagtcagtttttcatagccttacagtatctggctttgtactgagaaataaaacacattttcata

SEQ ID NO: 31851 - DNA, 2062 bp, Homo sapiens
ctggccctttaagggccgcccccgaggaggtgccaggcccgggtggcgccgtccgtccttcctggtcctgcgggtccaggactgtccgcggggttgagggaaggggccgtgcccggtgccagcccaggtgctcgcggcctggctccatggccctggtcacagtgagccgttcgcccccgggcagcggcgcctccacgcccgtggggccctgggaccaggcggtccagcgaaggagtcgactccagcgaaggcagagctttgcggtgctccgtggggctgtcctgggactgcaggatggaggggacaatgatgatgcagcagaggccagttctgagccaacagagaaggccccgagtgaggaggagctccacggggaccagacagacttcgggcaaggatcccagagtccccagaagcaggaggagcagaggcagcacctgcacctcatggtacagctgctgaggccgcaggatgacatccgcctggcagcccagctggaggcaccccggcctccccggctccgctacctgctggtagtttctacacgagaaggagaaggtctgagccaggatgagacggtcctcctgggcgtggatttccctgacagcagctcccccagctgcaccctgggcctggtcttgcccctctggagtgacacccaggtgtacttagatggagacgggggcttcagcgtgacgtctggtgggcaaagccggatcttcaagcccatctccatccagaccatgtgggccacactccaggtattgcaccaagcatgtgaggcagctctaggcagcggccttgtaccgggtggcagtgccctcacctgggccagccactaccaggagagactgaactccgaacagagctgcctcaatgagtggacggctatggccgacctggagtctctgcggcctcccagcgccgagcctggcgggtcctcagaacaggagcagatggagcaggcgatccgtgctgagctgtggaaagtgttggatgtcagtgacctggagagtgtcacttccaaagagatccgccaggctctggagctgcgcctggggctccccctccagcagtaccgtgacttcatcgacaaccagatgctgctgctggtggcacagcgggaccgagcctcccgcatcttcccccacctctacctgggctcagagtggaacgcagcaaacctggaggagctgcagaggaacagggtcacccacatcttgaacatggcccgggagattgacaacttctaccctgagcgcttcacctaccacaatgtgcgcctctgggatgaggagtcggcccagctgctgccgcactggaaggagacgcaccgcttcattgaggctgcaagagcacagggcacccacgtgctggtccactgcaagatgggcgtcagccgctcagcggccacagtgctggcctatgccatgaagcagtacgaatgcagcctggagcaggccctgcgccacgtgcaggagctccggcccatcgcccgccccaaccctggcttcctgcgccagctgcagatctaccagggcatcctgacggccagccgccagagccatgtctgggagcagaaagtgggtggggtctccccagaggagcacccagcccctgaagtctctacaccattcccacctcttccgccagaacctgagggtggtggggaggagaaggttgtaggcatggaagagagccaggcagccccgaaagaagagcctgggccacggccacgtataaacctccgaggggtcatgaggtccatcagtcttctggagccctccttggagctggagagcacctcagagaccagtgacatgccagaggtcttctcttcccacgagtcttcacatgaagggctggcagatcgcttccctcatccacctccaccggtccaggtctttgctgctgtccccagacctcctgtgacaccacgccagatcacagggcaccaggccagagatagtcttctttttgtcctttctggcctctggctagtcagtttttcatagccttacagtatctggctttgtactgagaaataaaacacattttcata

SEQ ID NO: 31852 - DNA, 1960 bp, Homo sapiens
ctggccctttaagggccgcccccgaggaggtgccaggcccgggtggcgccgtccgtccttcctggtcctgcgggtccaggactgtccgcggggttgagggaaggggccgtgcccggtgccagcccaggtgctcgcggcctggctccatggccctggtcacagtgagccgttcgcccccgggcagcggcgcctccacgcccgtggggccctgggaccaggcggtccagcgaaggagtcgactccagcgaaggcagagctttgcggtgctccgtggggctgtcctgggactgcaggatggaggggacaatgatgatgcagcagaggccagttctgagccaacagagaaggccccgagtgaggaggagctccacggggaccagacagacttcgggcaaggatcccagagtccccagaagcaggaggagcagaggcagcacctgcacctcatggtacagctgctgaggccgcaggatgacatccgcctggcagcccagctggaggcaccccggcctccccggctccgctacctgctggtagtttctacacgagaaggagaaggtctgagccaggatgagacggtcctcctgggcgtggatttccctgacagcagctcccccagctgcaccctgggcctggtcttgcccctctggagtgacacccaggtgtacttagatggagacgggggcttcagcgtgacgtctggtgggcaaagccggatcttcaagcccatctccatccagaccatgtgggccacactccaggtattgcaccaagcatgtgaggcagctctaggcagcggccttgtaccgggtggcagtgccctcacctgggccagccactaccaggagagactgaactccgaacagagctgcctcaatgagtggacggctatggccgacctggagtctctgcggcctcccagcgccgagcctggcgggtcctcagaacaggagcagatggagcaggcgatccgtgctgagctgtggaaagtgttggatgtcagtgacctggagagtgtcacttccaaagagatccgccaggctctggagctgcgcctggggctccccctccagcagtaccgtgacttcatcgacaaccagatgctgctgctggtggcacagcgggaccgagcctcccgcatcttcccccacctctacctgggctcagagtggaacgcagcaaacctggaggagctgcagaggaacagggtcacccacatcttgaacatggcccgggagattgacaacttctaccctgagcgcttcacctaccacaatgtgcgcctctgggatgaggagtcggcccagctgctgccgcactggaaggagacgcaccgcttcattgaggctgcaagagcacagggcacccacgtgctggtccactgcaagatgggcgtcagccgctcagcggccacagtgctggcctatgccatgaagcagtacgaatgcagcctggagcaggccctgcgccacgtgcaggagctccggcccatcgcccgccccaaccctggcttcctgcgccagctgcagatctaccagggcatcctgacggccagtgagggtggtggggaggagaaggttgtaggcatggaagagagccaggcagccccgaaagaagagcctgggccacggccacgtataaacctccgaggggtcatgaggtccatcagtcttctggagccctccttggagctggagagcacctcagagaccagtgacatgccagaggtcttctcttcccacgagtcttcacatgaagggctggcagatcgcttccctcatccacctccaccggtccaggtctttgctgctgtccccagacctcctgtgacaccacgccagatcacagggcaccaggccagagatagtcttctttttgtcctttctggcctctggctagtcagtttttcatagccttacagtatctggctttgtactgagaaataaaacacattttcata

SEQ ID NO: 31853 - DNA, 1796 bp, Homo sapiens
ctggccctttaagggccgcccccgaggaggtgccaggcccgggtggcgccgtccgtccttcctggtcctgcgggtccaggactgtccgcggggttgagggaaggggccgtgcccggtgccagcccaggtgctcgcggcctggctccatggccctggtcacagtgagccgttcgcccccgggcagcggcgcctccacgcccgtggggccctgggaccaggcggtccagcgaaggagtcgactccagcgaaggcagagctttgcggtgctccgtggggctgtcctgggactgcaggatggaggggacaatgatgatgcagcagaggccagttctgagccaacagagaaggccccgagtgaggaggagctccacggggaccagacagacttcgggcaaggatcccagagtccccagaagcaggaggagcagaggcagcacctgcacctcatggtacagctgctgaggccgcaggatgacatccgcctggcagcccagctggaggcaccccggcctccccggctccgctacctgctggtagtttctacacgagaaggagaaggtctgagccaggatgagacggtcctcctgggcgtggatttccctgacagcagctcccccagctgcaccctgggcctggtcttgcccctctggagtgacacccaggtgtacttagatggagacgggggcttcagcgtgacgtctggtgggcaaagccggatcttcaagcccatctccatccagaccatgtgggccacactccaggtattgcaccaagcatgtgaggcagctctaggcagcggccttgtaccgggtggcagtgccctcacctgggccagccactaccaggagagactgaactccgaacagagctgcctcaatgagtggacggctatggccgacctggagtctctgcggcctcccagcgccgagcctggcgggtcctcagaacaggagcagatggagcaggcgatccgtgctgagctgtggaaagtgttggatgtcagtgacctggagagtgtcacttccaaagagatccgccaggctctggagctgcgcctggggctccccctccagcagtaccgtgacttcatcgacaaccagatgctgctgctggtggcacagcgggaccgagcctcccgcatcttcccccacctctacctgggctcagagtggaacgcagcaaacctggaggagctgcagaggaacagggtcacccacatcttgaacatggcccgggagattgacaacttctaccctgagcgcttcacctaccacaatgtgcgcctctgggatgaggagtcggcccagctgctgccgcactggaaggagacgcaccgcttcattgaggctgcaagagcacagggcacccacgtgctggtccactgcaagatgggcgtcagccgctcagcggccacagtgctggcctatgccatgaagcagtacgaatgcagcctggagcaggccctgcgccacgtgcaggagctccggcccatcgcccgccccaaccctggcttcctgcgccagctgcagatctaccagggcatcctgacggccagccgccagagccatgtctgggagcagaaagtgggtggggtctccccagaggagcacccagcccctgaagtctctacaccattcccacctcttccgccagaacccgtcggggggggccccgctcccaattcgcccttatttgagtttgattacaaaaaattggcccgttttttacaaactttttgcctgggaaaaccctggggtttacgcaacatattggaatttggaccaatatcctctttt

SEQ ID NO: 31854 - DNA, 922 bp, Homo sapiens
ctggccctttaagggccgcccccgaggaggtgccaggcccgggtggcgccgtccgtccttcctggtcctgcgggtccaggactgtccgcggggttgagggaaggggccgtgcccggtgccagcccaggtgctcgcggcctggctccatggccctggtcacagtgagccgttcgcccccgggcagcggcgcctccacgcccgtggggccctgggaccaggcggtccagcgaaggagtcgactccagcgaaggcagagctttgcggtgctccgtggggctgtcctgggactgcaggatggaggggacaatgatgatgcagcagaggccagttctgagccaacagagaaggccccgagtgaggaggagctccacggggaccagacagacttcgggcaaggatcccagagtccccagaagcaggaggagcagaggcagcacctgcacctcatggtacagctgctgaggccgcaggatgacatccgcctggcagcccagctggaggcaccccggcctccccggctccgctacctgctggtagtttctacacgagaaggagaaggtctgagccaggatgagacggtcctcctgggcgtggatttccctgacagcaggttcgagcagggagaggaaaggaggggcaaagaggtgagggacaggggggacaatggctttccctctgtcccctgccagctcccccagctgcaccctgggcctggtcttgcccctctggagtgacacccaggtgtacttagatggagacgggtctttgctgctgtccccagacctcctgtgacaccacgccagatcacagggcaccaggccagagatagtcttctttttgtcctttctggcctctggctagtcagtttttcatagccttacagtatctggctttgtactgagaaataaaacacattttcata

SEQ ID NO: 31855 - DNA, 934 bp, Homo sapiens
ataagtagttactaaattactttacctaattatgtaataaatggaatcattaggtatttcctttgccgtagggtcctgtgaacaaattactaagatactaagggttctgtgaatgagtttaagatcctctaactgtagatatgatcagtgtttatctatattatcaattttttttaagaacttgatttttagtggatgtttatactcttatatgaatatgcaatgctttactgaactctctctgcttgttgaacatttaagtttttcctaatattttgataatatgtgtaatactaatagctgttgttgtgtctaaatcttggtccttaatatctaattctttccttaaaatagcgtcttataagttaatttgctgtgtcaaagggtattagttgtttaaggctcttagtatttataacctaattttttcatatatagttttctccactactactaacaatatataaaaagtgcccctcatctcaacctcagtggctgtgaatgttctttatcacaatttgacagttgaaatggtttctgctttagcatgatagtaattagagctgtttctctatgattttcctacatctgagctaaagatcttaccagtcttacaatttacatctttcttagctcctaggacctgtagttcatggttgaggtaccacccctcttccaacctcactagtctttacccattttatagttggtaattatttttgacttactaaaaagcagctaatttttgtagtttttgtagagatgggggtgtcaccatgttgtgttggctggtctcaaactcctgagctcaaacagtccacccacctcagcctcccaaagtgctaggattacaagcatgtgccaccactcccagcctgtatttttatttatttatttgtttgtttgtttgtttgacagagtgagacgcgtctca

SEQ ID NO: 31856 - DNA, 173 bp, Homo sapiens
gtgtgtcaacaaaattaagagagtttgggttattgaagatacaagagtgtttttgaaggtatatataggaaaccaaatctcaaatgtggtctgtccttgtgattaaaattagagcaatagggaagccaggtgtgatggctcacacctgtaattccagcacttttgcaggctgt

SEQ ID NO: 31857 - DNA, 335 bp, Homo sapiens
ccccaccagtcacaaggctactttggaaaagtctggcaggtcctcaaaagttttaatgtaaaatttccatatgactcagcagttccactcctaaatagatatatacccaagagaagtgaaaacatactggccgggcataatggctcatgccggtaatcccagcactttgggaggccgaggcaggcggatcacgaggtcaggagttcgagaccagcctgaccaacatggtgaaaccccgtctctactaaaaatacaaaaattagctgggcgtgatggcgcgccactgtaatcccagctactcgggaggctgaggcaggagaatcgcttgaacctgg

SEQ ID NO: 31858 - DNA, 362 bp, Homo sapiens
aaattaaggggaagtttcaataaaaaagatgatgtcccaaagaaagtgaatggagaaaacttcatagtaaggacaatcttgaatatattgcacaacattgaaacaaaaaaaattaaatgttggaaacggatccaaatttagaaagagtatgataactggccaagttataaaaaggattctcatttcatattgtgcattataaaatgagaaggcaaacaatgttcaaattactcttgataagattttttcaaagaaacaaaacaattatcaatgtttctaatattgtatataactgtgtaaaataaatatttggttatttttgaattttccccttatatttatcaccaacaataagagaattt

SEQ ID NO: 31859 - DNA, 501 bp, Homo sapiens
tcaagagcatgggctttggggtctgaaccagatttgagacttggatccattacttcctgccttgtcaacttggaccaattacttcatctctctatacctcagtttccttgtctataaactggagacaacaatacctactttgtaagacctttgcaaggatttaaatttagcaggataatgcatgtaaaatgattagcatgttgtctggcatagaaatgtttgatgattggaaacatttactcttggccaggcatggtggctcacgcctataatcccagcactttgggaggctgaggcgggtggatcacttgaggtcagcagtttgagaccagcctggccaacttggcgaaaccccgtctctactaaaaatacaaaaattagccgggcatggtagcacacgcctgtaatcccagctactagggaggctgaggcaggacaattgcttgaacccgggaggcagaggttgcagtgagccaagatcacgccacagcactccatctc

SEQ ID NO: 31860 - DNA, 1741 bp, Homo sapiens
ggaaaagtctgttttttttgaaatacctttttttttctatttattcctttaattattatacattagaaagaaatgacaaggattgcatcctagttttaaaatgctgaacttttaaaaaggcaattttatttttaagactttaaataactcttattagtaattggatttgtggcagattccaagagggtggttttggaaagcacagtggcttcccggtggcttcagaccttggtttggaattgcaggcctaccgcacaccgactctggagagtgacttggagcctccaaattccaagcttcctgtgtgcgagtgaggctagcaaaccacattgagtaggacagcctgagggttaagttacaccatggatgaaaagctgatgcatggttctaacttgcccgggcttgatattcaaaagatgtctattccttttccattttctctcttttccaaaaatcctcttgctctgtttctgttaagacccttttgcaacactctgttttaacatggtgcttaatatattgtcagaaaccacattttccagtgcatatggtgcagtttttaatttctaatttagctttttaattaaaaactcaccttttgctcctaatacctataggggttggtttccaattctgcttttctggtggtaactgaatctctgttctcccagtgatgagtgtaaccctctgtgtacaagtaggaacatcatgactgccatgcttgggccattggtataattatttctgctacctctgaagactgtggtgagggtagaatcagagtggtccctagccatcgtcccccttttgaattggtagtcatcttgaatgtcacagcagcctagacttgtagaccatatcaggaaagtagaagcaagaattctgtcgtgtgctactccactccaagatgctgtaggtcatcagaagctctgtgacttcagatgtgcaagtgaggccaaggcactgtcacattaatatctgtgtgatctcggtggcattgtgcttttccatcattgtcagggctgctgggctctctgtgcctaaaagctgcttcaaacaagcagctcacattccagagctctgagagatgttgtcagcctttaacagttttctcttcgagaagacattagattctgtacaggttgcagaaacgttgtcttaaggtggctggaaggaagtgtttgaaataacacatgtgcttgtgattttggtaaccaaggaaacatgtacctgatacaaagcttcctttaaaaaatgatggtacccttctgggattgcctcagaatcacccacagcaagattccaaagggatttaaaattaaagtaggtcacttccagcaactgtatcaagagttaacagagaatcacctctttaaaaatgaagaatcatctctttaaaaatgtactgtttagaagaggaacccaatacattgtggatacaatatgctaccatctgaataatctgagtcttgcttataatggatgtttaataagtcttacctggattaaattttcctctgcttctgccttattatttgtattatttttattcttagtttgccttctattccaaattaatccttagcttctcgccatctcttttctaacagtttgttattaaaattatatagtgatggttaatgcagccactacctgtactttgcaaacagattttgctaatacatccatgatatgtagaatgatagaaactggagttgacttagaagataatcatatccaa

SEQ ID NO: 31861 - DNA, 476 bp, Homo sapiens
ttttcgaatacttaagagggcccctaaagtgtccagaaaagagaggtaaacaggattatttggcatgtttaggtacatgggattgccaaaatgatgctcagtcttctttaggttatatcttggtgaataatgctaatatatattccaaaattgcatgggatttctaaaattctaatgtctgagtatatgctatcaatcacaattaaggtttttatgttaagttattgtaaaccacagggataaccaagcttctttgtcaattgtgtttctaattttaactaccctggacattttgctattcacagacaattgttgtcttgttttaattcttttcaaaagatggtttataatagggtataagactctgataagtgctttcagatacaatttctgattttatttgagacaatcaggtttctgataactttgcagattgtaacattggaataaaggaaaatgtacaagactcatgaaga

SEQ ID NO: 31862 - DNA, 3669 bp, Homo sapiens
  misc_feature (2321)..(2321): n is a, c, g, or t
  misc_feature (3143)..(3143): n is a, c, g, or t
  misc_feature (3156)..(3156): n is a, c, g, or t
  misc_feature (3185)..(3185): n is a, c, g, or t
  misc_feature (3319)..(3319): n is a, c, g, or t
  misc_feature (3378)..(3378): n is a, c, g, or t
  misc_feature (3384)..(3384): n is a, c, g, or t
  misc_feature (3390)..(3390): n is a, c, g, or t
  misc_feature (3460)..(3460): n is a, c, g, or t
aggacagtacagtgccttacttgcaagatgtgcaagcacacaagacctatgaagaactgtctcccaacaaaggatacatgcagaaggagaaaaaactctcttaaacaaaaagaggcagagccggcagggaccgagcgggtgcctcagtctccttcccctcccctcgcctgtcctcgccatcttcttctcacagccggaccggaactatgtgatcccggaagttccgggtcctttggccctatatgatcccggaagttccggggcttttggacctctgtgattccggaagttccggggcgttccggggcgttctggggcctttggagcgtgggataagcagtaatggcggaggctgcagctcccggaacaacagtcacaacatcgggagcaggagcagcagcggcggaggcggcggagacggcggaagcagtctccccgactccgatccccacagtcaccgccccgtccccgagggcgggcggaggggtcggcggcagcgacggcagcgacggtagtggcggcaggggcgacagtggcgcgtatgacggcagcggtgcgtgcggcggcagcgacgcgtgcgatggcagcggcgacagcagcggcgacagctggactaaacaggtcacttgtagatattttaagtatgggatttgtaaggaaggagataactgtcgctactcgcatgacctctctgaccgtctgtgtggtgtagtgtgcaagtattttcagcgagggtgctgtgtttatggagaccgctgcagatgtgaacatagcaagccattgaaacaggaagaagcaactgctacagagctaactacaaagtcatcccttgctgcttcctcaagtctctcatcaatagttggaccacttgttgaaatgaatacaaacgaagctgagtcaagaaattcaaattttgcaactgtagtagcaggttcagaggactgggcgaatgccattgagtttgttcctgggcaaccctactgtggccgtactgtgccttcctgcactgaagcacccctgcagggctcagtgaccaaggaagaatcagaggaagagcaaaccgccgtggaaacaaagaagcagctgtgcccctatgctgcagtgggacagtgccgatatggggagaactgtgtgtatctccacggagatttatgtgacatgtgtgggctgcaggtcctgcatccgatggatgctgcccagagatcacagcatatacaagcgtgcattgaagcccatgagaaagacatggagttctcatttgctgtgcagcgcagcaaggacaaggtgtgtgggatctgcatggaggtggtctatgagaaagccaaccccaacgagcaccgcttcgggatcctctccaactgcaaccacaccttctgtctcaagtgcattcgcaagtggaggagtgctaaggaatttgagagcaggatcgtcaagtcctgcccacaatgccgaatcacatctaactttgtcattccaagtgagtactgggtggaggagaaagaagagaagcagaaactcattcagaaatacaaggaggcaatgagcaacaaggcatgcaagtattttgatgaaggacgtgggagctgcccatttggagagaactgtttttacaagcatatgtaccctgatggccgcagagaggagccacagagacagcaagtgggaacatcaagcagaaacccaggccaacaaaggaaccacttctgggaattctttgaggaaggagcgaacagcaacccctttgacgatgaagaagaggctgtcacctttgagctgggtgagatgttgcttatgctttaggctgcaggtggggacgacaaactgacagactctgaaaatgagtgggacttgttttgtgatgaagaattttatgtcttagatctatagaaaccttgcgtagtgtgtgagctggtctgctgaccccagatagcagctgtcccctgtggtggtgtggcagtgcctatgttctctcctaggcagacctatcaactccaggtgctgcggttaagaatatgtacccagggcctgtcttgtcaacccctcacctttccccaaggagtgtgttgttttccctgttggaaaaagttacaaaaataaatgttaaaggttttttttgttttttgttttattgagacagagtcccactctgtcacccaggctggagtgcagtggtgcaatcttggctcactgcaacctccgtcttccgggttcaagccattctcctgtctcagcctcccaagttgctgggactacaggtgcatgctacaatgcccagctaatttttctcatttttagtagaaacggggtttcaccatattggncaggctggtctcgaactcctgacctcaggtgatccacctgccactaccttccaaagtgctgggattacaggcgtcagccaccatgcccagccttaaagttagttttttgtaacaggcatgagccaccgcgcctggctttaaagttcgttttttgtaacaggcataagccactgtgcctggccttaaagttagtttttttgtaacacgaatttaactgttggacagttagtttagatgtgttgcatcatctgttttcaaccagattgtgtttatggacttttcacacactaattttgaggaccccaggttcaaaagtaaaagcagtggccctgctttggggtccaataataggagtgatgggtgaagggacctaagctggccagtagccttctgctccagacatgggacgcggatccttgaggtttctggttaaatctgcacatctgtgtttttatatctgttccctacccctgtaatccctaccgcatgcactagttctgtagttttggtctctcgtttaattgtatgcaagtagtactactgggtaaccagagccaagcgtgaatgtgttcagatttctactgttttgcatgataggaaaattgagaaagaatacatataaaagatatagaggcataacatcaatgcagagttggaagttgacctccacggggtgacatggtgtgtgtgagtgtgggtgtgtgataagcttctcaaacctgcatagatgcagtattcttggctttggtagaaagccttggtttaaggctgggcgcggtggctcacgcctgtaatcccagcactttgggaggctgaggcggncggatcacaaggncaggagatcgagaccatcctgtgaatggngaaaccctgtctctactaaaaatacaaaaaattagccgggcgtagtggcgggcgcctgtagtcccagctactctggaggctgaggcgggagaatggtgtgaacctgggaggcggagcttgcaatgaactgagantgtgccactggactccagcctgggtgacagagcgagactctgtctcaaaaaaaaaaaanaaaaanggaaanccttggtttaggggtttaagtcttatgtggtggttagatcttaaaggacaaagcagtatattggtagttntcaatatagcagtactagctctgtttatataaatagagaaatggagttagccatagaggttaaaactacctggttatcccatatattaacccaaactgggtcttggatacacagttgtatttaatgttttacgatctagcctttccagtataggcacttcctgaaaaacctttgtcctcatttggggcattttgttgttgggtttcgcc

SEQ ID NO: 31863 - DNA, 1221 bp, Homo sapiens
tctcattctgttgcctaggctggagtgcagtggcatgatcttggctaactgcaacctctgcctcccaggttcaagtgattcttctgtcgcagcctcccagtagctgggattacaggcactcgccaccacgccattctcatttttgtactttttttttttttagtagagatggggtttcgccatgttgaccaggctagtctcgaactcctgacctaagtgatctgcctgcctcggcctcccaaaatgctgggaatacaggcatgagccaccgcgcccagccaagttgagtaactttcaaaggtcacacagctaatgtatgcactgtgtactcacaaaaaaacagctttttataagggcctccaattcttgtaataccttgttcaaaaagtattatacctctgagtcaccgctaggaaaaaaaaaagtgaagaaccaggacaatctgaatccatactctgtttgctcacccactgttattctgcctgcgtgccttggcgagaacaggtctctggactctggctgggggcagcctgcggagggctctaggacagatcctgcttgtttcattagtagcctggattgattgattgattgattgattgattgattgattttgagacggagtctcgctctgtcacccaggctggagtgcagtggcaagatctcagctcactgtaagctccgcctcccgagttcacgccattctcctgcctcagcctccagagtaactaggacaggcacccgccaccacgcccggctaattttttttgtatttttagtagagactggtttcaccgtgttagccaggatggtctcgatctcctgacctcgtgatccgcccgcctcggcctcccaaagtgctgagattacaggcgtgagccaccacgcctggccctagcctgggttttatttctaagggaacacatctttaactaagtgcagaggctcacaacttagttatctatttaaaccaagtcacataaacacacaacacacaattccccttacctctttgaagaaaaaaataaccatttgaagtcaggtcagcatgggtttttgtttgtttgtttgttttgttttttgagatgtagtctcgctctgtctcccaggctggagtgcagtggcacgatcttgactcactgcaacctccgcctcccgggttcaagcgattctcatgcctcagcatcgaggcacaagaaactgggattacaggtacgtgcc

SEQ ID NO: 31864 - DNA, 627 bp, Homo sapiens
aggctctaggacagatcctgcgagacggagtctcgctctgtcacccaggctggagtgcagtggcaagatctcagctcactgtaagctccgcctcccgagttcacgccattctcctgcctcagcctccagagtaactaggacaggcacccgccaccacgcccggctaattttttttgtatttttagtagagactggtttcaccgtgttagccaggatggtctcgatctcctgacctcgtgatccgcccgcctcggcctcccaaagtgctgagattacaggcgtgagccaccacgcctggccctagcctgggttttatttctaagggaacacatctttaactaagtgcagaggctcacaacttagttatctatttaaaccaagtcacataaacacacaacacacaattccccttacctctttgaagaaaaaaataaccatttgaagtcaggtcagcatgggtttttgtttgtttgtttgttttgttttttgagatgtagtctcgctctgtctcccaggctggagtgcagtggcacgatcttgactcactgcaacctccgcctcccgggttcaagcgattctcatgcctcagcatcgaggcacaagaaactgggattacaggtacgtgcc

SEQ ID NO: 31865 - DNA, 372 bp, Homo sapiens
gagaataccacaaagaagtggatagatggcagatgacacatgcgagacccaaagtgctaatttcctgaatatacaaagagctcttacaagttaatcaaaagacaaataactcaatgaagtaatgggctcttgcctatgttatgaatattttcatctggtatgacatttactctttgatttcattatttttgtgattttcataggcttgtattttatgtagtcaaatctctatgtctttctatcacttttgtgtttagaaggacgttcctccttctgaagtacacatatttgattttggatttgagatggcattcatttctgatccatctataaagtttttggtgtgtggttaaaggtaaaaatagactcaca

SEQ ID NO: 31866 - DNA, 583 bp, Homo sapiens
ttaccttagttatcacatttcttttattgacataattcataatcatcagaatcatctgacttgtacatcattgtatcagttggttttatgctcaagatgttgtattggttcattattgtcttaatatcccaaccaacccaatctagacataaatgctggcccctgtgacatggcaggaaagggagacaggcctgggccaagcatagtgatagcaatgcacctgtgtttgaagctgttaaatatttgctacagtcgtattcctagactcaaaattagattcttgttaagtcctacttgtcagtgtctatggctgtgtgagttctggttagtagaaggtgggcaaaagtgatgtgtattcttccataactggtccataaccacctaccactcacaatactccatgcctttttttctcttcaggctccttggattagagaccatcctgaggacatccttgggagccatgtgctgaagatggccaagccacaggatgaaaggagctgcatctttgagtcaccactggagaaaggtctctctaaatggatttgcagagacgtcttctcgaatactccccttctaagtt

SEQ ID NO: 31867 - DNA, 240 bp, Homo sapiens
ctaagagcgagagctccgggaaaggagccgatcctggtggaagactacaggtctgagtccactggacgaaaaacgaggctccttggattagagaccatcctgaggacatccttgggagccatgtgctgaagatggccaagccacaggatgaaaggagctgcatctttgagtcaccactggagaaaggtctctctaaatggatttgcagagacgtcttctcgaatactccccttctaagtt

SEQ ID NO: 31868 - DNA, 331 bp, Homo sapiens
cgttctgaaatattttaccactgctgtgaacaagtgaacacattgtgtcacatcatgacactcgtataagcatggagaacagtgatttttttttagaacagaaaacaacaaaaaataaccccaaaatgaagattattttttatgaggagtgaacatttgggtaaatcatggctaagcttaaaaaaaactcatggtgaggcttaacaatgtcttgtaagcaaaaggtagagccctgtatcaacccagaaacacctagatcagaacaggaatccacattgccagtgacatgagactgaacagccaaatggaggctatgtggagttggcattgc

SEQ ID NO: 31869 - DNA, 468 bp, Homo sapiens
ggaattgaagcacaacaggtagttttacttcttgaggattaccagtttgtacatcctacatttttggagatgatcaatagccttttgtcttcaggtgaagttcctggactctatactcttgaagaattagagcccttgctgttaccacttaaggatcaagcttcacaagatggtttttttggaccagtcttcaattacttcacatatagaattcagcaaaacttgcatattgtcttgataatggattctgcaaattcaaacttcatgataaactgtgagagtaatccagctttgcataagaaatgccaggtgttgtggatggagggttggtccaatagcagtatgaagaaaatacctgaaatgttattcagtgaaacaggtggtggagaaaaatacaatgataaaaaacgaaaagaagaaaagaaaaaaaattcaggtagtattttgataaaatcagtttgatctggt

SEQ ID NO: 31870 - DNA, 890 bp, Homo sapiens
ggattttacagctggatgaaatcttagaaataattcagtttaacctcctcttttttaaaccacctcactgtaaaaatagaaatccaaaggctctaggtgccaggctggcctgcccctgtcctctgctgttccctctgttgacgaattgatgagctgactcaccctgcccctccctggacctcagccctggggcttggccattgtgagcctcatctgttctgtgaagcgtgttcaactccagctgaataccagaaatgcaatgtccctgtttacttccaattcaggtagaattgtatatacttcccttatacagcttcccacactgagctgtctcaccatctctggacagatgagtaattcgtgcctgctctcccttctcagtttgtcttctgtgtgaactgccaacatggtctctcctttttagaaagtcacatactgtgagtgcaactttgtggaagtcaatgtacataaacatgtgaaatgtgcatcccagctactgtagataatgaggcagctgtatatgtaatgttgaggaacaatcaccaagataatttcagtggaaaagccagcacagaagaggctgaggagcacgctgccatgtatctacgcatagtgtagctctagcaggattcgcgaggagcaagtgacagcaggtgcctctgcagagaggaactggggacaacagtggggatgaagttaatacgtcgtcattattttattttttagatattctacaatgtgaatttactatttattaaaaaataaataaaattataagcgggcatgttggctcatgcctgtaaactcagctgagatgggagaatcacttgaggctgagagttcaagaccagcctggtcaacatagcaagaccctatctctacaaaaaaaa

SEQ ID NO: 31871 - DNA, 1084 bp, Homo sapiens
gaccttaggagaaagacgcttagtaattacagcccttgtcaaggcacagttttttgtttcaaaggttgttaacagttattgtggaaaaatcagtacctctattctgttgtagcagctgggtttaaaatctgcagtgagagttttggggacagttttgttcttaagaacaaagcgccttggcagggaaatgttagatattcaaattagtgatctggccactgaaagatacccagtaaccaggttgggctgcatccagccactggaaccactcaataggtacagagctgggactggaggagaaatcactcacaggggttcctgccagcctgcctgatacctactctctaaggaacaagtaggcaaaggcacttcccatccctggccctcagtttcctcatctgcaaaaggttggttttgggtggttttcaaacaggtaatagcttcaaacttaagctgattccaggtcagcaaataaagccaataacatggagaacagctcttggatgtatagtgggtgctgggagttcctccttcctgccacctcctaacccgctccctccctggccaggaggaggcatttctgacatctcctccttctccctaggagcactgaggctgttccagacccatgcagcctaaggaagactccttctgtgctgtgggtgcacccgtctcccccacttatttttttattattattattatttgagacagaatctcttgaacctgggagatggaggttgcagtgagctgacatcgcagtactgcactccagcctgagcaaaaaaaaaaaaaagaaaaagaaaaaagagcccttttatttaagtatttaaccagaagagaaactaaggatcagagagaaaatgtgggaaaagaaaaattgtaggcagaaggttttacctggctgaaaatcatccacaaatgattttctttctcctcaaaacattgagtctctctctctttttttttttttctgctgtgttgcccaggctgaggcaagagaatctcttgaacccatcttggcagtgagctgagattgcgctactgcacaccagcctgggcaacagagcaagactccatctaa

SEQ ID NO: 31872 - DNA, 738 bp, Homo sapiens
gtacctaggatatcctgtgaaccctgctctctcccacctcacgacactggtcctctttacttgtccttaaaccgcacatgtgtatttttatttctttgaggaagactgggtggcaggcacctgtgtgtgtgtctggaaacatatagcaagctagaggcagatttcaggcaaaaaaaaaaaatgctcttttgggctgggcgtggtgactcacatctataatctcagcagacaggtggatcacctgaggtcaggagtttgagaccagcctggccaacatggtgaaacctcgtctctactaaaaatacaaaagagctgggtgtggtggtgcatgcctgtaatcccagctgctcgggaggctgaggcaggagaatctcttgaacctgggagatggaggttgcagtgagctgacatcgcagtactgcactccagcctgagcaaaaaaaaaaaaaagaaaaagaaaaaagagcccttttatttaagtatttaaccagaagagaaactaaggatcagagagaaaatgtgggaaaagaaaaattgtaggcagaaggttttacctggctgaaaatcatccacaaatgattttctttctcctcaaaacattgagtctctctctctttttttttttttctgctgtgttgcccaggctgaggcaagagaatctcttgaacccatcttggcagtgagctgagattgcgctactgcacaccagcctgggcaacagagcaagactccatctaa

SEQ ID NO: 31873 - DNA, 856 bp, Homo sapiens
ggtctggaaaatagagcccacagtgagcaatttaatgccttttttaggctgcccaaaggagagagtttgaaagaagtacatgaatgtttcttatgggtaccattcagccacttcaatactcatgggaaaatgtgcatctcagaaaattatatctgctttgctagccaagatggcaatcagtgtagtgtaatcattccactacgagaggtcttagctatagataagacaaatgattccagcaaatctgtcatcattagcatcaaaggaaaaacagcttttcgcttccatgaagttaaagactttgaacaactggtagcaaaactcaggctcagatgcggagcagcttcaactcaatatcatgatattagcacagaggtaattaattatacagcaatcaaatcatttggaaaaaaaggtgtgtgtttagtgtagcccattcttcaagaggaattcatagtacctttcctatttatgcccaggggttttttttaaagatagaatctaagaaattatattgtctaactcacatccttaagcagaagtgagaattaaggactttattcatttttaggaacccatacattataaaattactataatttgatctttcttttactctatttgctgtttaccatataaatataccttgtactttcacatagtttggtttttaagaagtcaaaatatatttgagaattcagtgaggcctcgaaaaaggactcctcttactgttgcaaagacatagcaattttaaacctgtctggatatcttttatttaatatcttataggtcagccttatttacataatctggccaaaagcaaaatagtggtatatctgtttactagtaaaatatt

SEQ ID NO: 31874 - DNA, 529 bp, Homo sapiens
ggtctggaaaatagagcccacagtgagcaatttaatgccttttttaggctgcccaaaggagagagtttgaaagaagtacatgaatgtttcttatgggtaccattcagccacttcaatactcatgggaaaatgtgcatctcagaaaattatatctgctttgctagccaagatggcaatcagtgtagtgtaatcattccactacgagaggtcttagctatagataagacaaatgattccagcaaatctgtcatcattagcatcaaaggaaaaacagcttttcgcttccatgaagttaaagactttgaacaactggtagcaaaactcaggctcagatgcggagcagcttcaactcaatatcatgatattagcacagagcttgctattagttctgagtctacagagccatctgataattttgaggtgcaatctttgacaagtcagagggaatgcagtaaaactgtgaacactgaagccttaatgacagtatttcaccctcagaatttggagactcttaattctaaaatggtag

SEQ ID NO: 31875 - DNA, 301 bp, Homo sapiens
tgcatggggatctagctgttccagcaccatttgttgaaaagactatctttgctttactgtgttgcctttactcctttgttaaaaccagtttactttaattttgtgggcctatttctgagttctctattctcttccactaatctatttgtctgttttttcacaaacaccacattgtcttgattaccatatatctatagttaactcttgaagttgggtagtgtcagccctccaactctgttcttctcctttaatattgagttggctacactgaatctgttgcctctccatataaattatagaa

SEQ ID NO: 31876 - DNA, 1097 bp, Homo sapiens
ctactgcggtggaagtcttagagtagccaccttctctgtactcagaccttcacttcgccagatgtcagcacagcagtgtcagcagcttcgtcaaacacaaacaccaccacctctctggatcagaagcacatggaaagcccaccttgcaagaagacccagctattccaaaagtacccatatccctgtagcatcctcttagctgaatgtctctactccttaaacttgtaccactttgaagagtaaaaatttaaattcattcatattatcattttttagtttttagtataagtggagctgtttatcggccatttgtatgtccttttcttttttttgcaaattactcctttgccaaattttctctcaaatgactcatctttttcttattgatttgcagaagctatttacatattatggatgtggggtgtctaacatacacagcaaatactttgtcccagtgtgtcactttttaaaaaaattcttataatgtctttcatctttaaaaaattattaagctattgtgagcttttatgccttttcagtttattttcttacatagataattatatgaagtgcaaataggggcagtgttagtctcatcttcccaaggctgacctcagatgtggaatgttgacagcaacacctgttaccttgtttctgtttaggattttagcgttaaggccaggcataatggttcatgcctgtaattccagcactttgggaggccgaggtgggcagatcacttgaagccaggagttcaagaccagcctggccaacatggagaaaccctctctatttttaaatacatttaaaatgttaacaattaaaacaaaatattttaccgttagtatgatgcttgatacaggatttctggtacatacgccttatcaaattaaataagtttccttttactcttgtttattgttattttttaaaataaggaatgaatcttggattttagtgtatcaataattatattttattctttaacttcataatattccttataattccttatgtcatattaaagatgtaaattcatatatattttatcatacaaatgattaataaatgtataagcatgtcattatatgagagta

SEQ ID NO: 31877 - DNA, 490 bp, Homo sapiens
ttcttggcctccataattatgtaagccaattcccataataaatctcctatctatctatctatctatccatctatcaatcatctatctagtctatctatctatctatctctatcctattgattctgtgtctctgaggaaccctaatacacctccagaactgtgagatgatacatttctgtggtttaagccactcagaaggtggtactttgtttcaccaggcctagcaaactaatacaagtgcatggaaggtgactactcatgactgcaacttagagaacaagggttataataaaaataaaagtgttatacaaaggtggcaagataaatgacaataaatgaaaatattaacatgtgaattaaaaagtaaagatatttttcctagcattctcccagaaagtagagacgcgtctctcttgtttgccatcatatccagcaatggcaagataagttctaggcacttcataaaaatttgttgaatgaaagaaatgaa

SEQ ID NO: 31878 - DNA, 460 bp, Homo sapiens
tcacatccctttaggacttgttaatgtgttcagaatgcttatgatcatgatacagcttcagtaggtggcagttctgcagactcaaagcatttttagtgacaaatcttgtgaagtagttgtatctgttttttttttttttttaaagttcactttccagggcactgaaaaacactagaaggaagtgccctgataaactacagcatttaatactttagactcactgaaagaagtgcttttcttagttcttgacgtttctccaagaactttatacatttaattttacctttcccgatcaaatagaacattgtatcataactatagtgttagaaaatacttttggccaggctgggtggctcaaacctgtagtcccagcactttctgaggtgaggtgggaggatctcttgagcccaggagtttgagccagactgggtaacgtagtaagaccctgtctcttaaaaac

SEQ ID NO: 31879 - DNA, 2018 bp, Homo sapiens
gttcgatgctggtttagggtttcaggcgtggaggttccaaaatccgaggtttgatttcagcctgcccttgccagtgcctgggccgctgggagccgttattggctgccgttaaggaccgttacgtttcccgggtccttctggcactcctctggtggaccgcccccatcggccacacttgccctgctctccagtgattctgtagctcctggctccgtagtctcgcggacagctctctttcctggaagatgtttctggtgggcctgacagggggcattgcctcaggcaagagctcagtgatccaggtgttccagcagctgggctgtgcggtgattgacgtggacgtgatggcccggcacgtcgtgcagccaggataccctgcccaccggcgcatcgtagaggtcttcggcactgaggtcttgctggagaacggcgacataaatcgcaaggtcctgggggacctgatctttaaccagcctgaccggcggcagctgctcaacgccatcacccaccccgagattcgcaaggagatgatgaaggagacgttcaagtacttcctccggggataccgctacgtgattctggatatccccctgctgtttgagaccaagaagttgctcaagtacatgaagcacaccgtggtagtatactgcgaccgggacacacagctggcacggctgatgcggcggaacagcctgaaccgcaaggacgcagaggcccgcatcaatgcccagctgcccctgacagacaaggcccgcatggcccgccatgtcctagacaactcgggcgagtggagtgtcaccaaacgccaggtcatcctcttgcacactgagctggagcgctccctggagtacctgccgctgaggtttggggtcctcacagggctcgctgccattgccagcctcctctacctgctcacccactaccttctgccttacgcctagtggggcactcaaggcagggagccccaggcctccatctatctccttggaggctgaagccaggtaacacatcctgtttcctctcagccccctccacacacacacacacacacacacacacacacacacacacacacacggactctccgaatcagggctgggcctctgtgccaggccatcccgtctttggagtgtatcctatttgaggtcaagaaatagcctgctgtccttcccaccttccctgagcagcacctacagaacagcaaccgtgatggtgtgtgaaagcaacagtcagagactgctatacatttctgtgggtgggggtagggaatactggctctgtggccctcctcagagctgggaggccaagggttcactgggcttgaatcctctctaagcacctaccccattatggcctaaacctcctcagtggaccacgggaaatcatgttggaccaagggtttccatgttcaaacagtcaacaaggccctcccctaggttgagatatttttgatactgaaggcccaggccccccagtatggcttgctgccagcaagcagcaaggattctctcgtgggtaacgctgtagccaggcaggaccagcctcttctgggagacccctctccccacgtagggtttgtgtagtgctcccacatcctgcttattgcctgccacccctgcttctcgcctggacctcttggtattccgtgtacaccatccttgctgtttcttgcctctgtgccttcaacctgctgctcctggcctgggataccttttattttcttttatttcttcttcctttttttttttttttttttttttaacctacaactagctctcagttcaggcactgtctaaagccccaggctgggttaggtggtctaggataccaactccccctcaacattttaccttaatccaacagtacagtaattagccgaaacttgcctggtttttcctactagactgtaagccctctagggacagggacagtgtcttattcatctctgtgttcttagtgcagagcctggcccgctgttggtgtttaataaagtgtgttgatctgaaatgccccagacc

SEQ ID NO: 31880 - DNA, 2266 bp, Homo sapiens
ggccgcggctgctacgcggggctgccaccgccccgggcgacccaatttcgcggcctagtggggcgtacgggcctcttttgaaagcctgagttacgatgtattgagcgcgtcgtatgcggccagcactagggtccttctggcactcctctggtggaccgcccccatcggccacacttgccctgctctccagtgattctgtagctcctggctccgtagtctcgcggacagctctctttcctggaagatgtttctggtgggcctgacagggggcattgcctcaggcaagagctcagtgatccaggtgttccagcagctgggctgtgcggtgattgacgtggacgtgatggcccggcacgtcgtgcagccaggataccctgcccaccggcgcatcgtagaggtcttcggcactgaggtcttgctggagaacggcgacataaatcgcaaggtcctgggggacctgatctttaaccagcctgaccggcggcagctgctcaacgccatcacccaccccgagattcgcaaggagatgatgaaggagacgttcaagtacttcctccggggataccgctacgtgattctggatatccccctgctgtttgagaccaagaagttgctcaagtacatgaagcacaccgtggtagtatactgcgaccgggacacacagctggcacggctgatgcggcggaacagcctgaaccgcaaggacgcagaggcccgcatcaatgcccagctgcccctgacagacaaggcccgcatggcccgccatgtcctagacaactcgggcgagtggagtgtcaccaaacgccaggtcatcctcttgcacactgagctggagcgctccctggagtacctgccgctgaggtttggggtcctcacagggctcgctgccattgccagcctcctctacctgctcacccactaccttctgccttacgcctagtggggcactcaaggcagggagccccaggcctccatctatctccttggaggctgaagccaggtaacacatcctgtttcctctcagccccctccacacacacacacacacacacacacacacacacacacacacacacggactctccgaatcagggctgggcctctgtgccaggccatcccgtctttggagtgtatcctatttgaggtcaagaaatagcctgctgtccttcccaccttccctgagcagcacctacagaacagcaaccgtgatggtgtgtgaaagcaacagtcagagactgctatacatttctgtgggtgggggtagggaatactggctctgtggccctcctcagagctgggaggccaagggttcactgggcttgaatcctctctaagcacctaccccattatggcctaaacctcctcagtggaccacgggaaatcatgttggaccaagggtttccatgttcaaacagtcaacaaggccctcccctaggttgagatatttttgatactgaaggcccaggccccccagtatggcttgctgccagcaagcagcaaggattctctcgtgggtaacgctgtagccaggcaggaccagcctcttctgggagacccctctccccacgtagggtttgtgtagtgctcccacatcctgcttattgcctgccacccctgcttctcgcctggacctcttggtattccgtgtacaccatccttgctgtttcttgcctctgtgccttcaacctgctgctcctggcctgggataccttttattttcttttatttcttcttcctttttttttttttttttttttttaacctacaactagctctcagttcaggcactgtctaaagccccaggctgggttaggtggtctaggataccaactccccctcaacattttaccttaatccaacagtacagtaattagccgaaacttgcctggtttttcctactagactgtaagccctctagggacagggacagtgtcttattcatctctgtgttcttagtgcagagcctggcccgctgttggtgtttaataaagtgtgttgatctgaaatgccccagaccaaccaagattcccagacttggcttcttcccacactgggctggagtcctcccggagctcagggggaggtgagggccccagaaggtgcacttgccatcaggcttctccctgggtcccaggaggactgcagccaggcccgaggcacctttgtgggaggtgggtagagggctgaggcagcgtcacaccttcttgccccgcctccccatctgccttccccaacccaattagaccagcgcagacataagccttcc

SEQ ID NO: 31881 - DNA, 2173 bp, Homo sapiens
ctagaggcggaggcctgggccacggcggaggcgctgggtccttctggcactcctctggtggaccgcccccatcggccacacttgccctgctctccagtgattctgtagctcctggctccgtagtctcgcggacagctctctttcctggaagatgtttctggtgggcctgacagggggcattgcctcaggcaagagctcagtgatccaggtgttccagcagctgggctgtgcggtgattgacgtggacgtgatggcccggcacgtcgtgcagccaggataccctgcccaccggcgcatcgtagaggtcttcggcactgaggtcttgctggagaacggcgacataaatcgcaaggtcctgggggacctgatctttaaccagcctgaccggcggcagctgctcaacgccatcacccaccccgagattcgcaaggagatgatgaaggagacgttcaagtacttcctccggggataccgctacgtgattctggatatccccctgctgtttgagaccaagaagttgctcaagtacatgaagcacaccgtggtagtatactgcgaccgggacacacagctggcacggctgatgcggcggaacagcctgaaccgcaaggacgcagaggcccgcatcaatgcccagctgcccctgacagacaaggcccgcatggcccgccatgtcctagacaactcgggcgagtggagtgtcaccaaacgccaggtcatcctcttgcacactgagctggagcgctccctggagtacctgccgctgaggtttggggtcctcacagggctcgctgccattgccagcctcctctacctgctcacccactaccttctgccttacgcctagtggggcactcaaggcagggagccccaggcctccatctatctccttggaggctgaagccaggtaacacatcctgtttcctctcagccccctccacacacacacacacacacacacacacacacacacacacacacacggactctccgaatcagggctgggcctctgtgccaggccatcccgtctttggagtgtatcctatttgaggtcaagaaatagcctgctgtccttcccaccttccctgagcagcacctacagaacagcaaccgtgatggtgtgtgaaagcaacagtcagagactgctatacatttctgtgggtgggggtagggaatactggctctgtggccctcctcagagctgggaggccaagggttcactgggcttgaatcctctctaagcacctaccccattatggcctaaacctcctcagtggaccacgggaaatcatgttggaccaagggtttccatgttcaaacagtcaacaaggccctcccctaggttgagatatttttgatactgaaggcccaggccccccagtatggcttgctgccagcaagcagcaaggattctctcgtgggtaacgctgtagccaggcaggaccagcctcttctgggagacccctctccccacgtagggtttgtgtagtgctcccacatcctgcttattgcctgccacccctgcttctcgcctggacctcttggtattccgtgtacaccatccttgctgtttcttgcctctgtgccttcaacctgctgctcctggcctgggataccttttattttcttttatttcttcttcctttttttttttttttttttttttaacctacaactagctctcagttcaggcactgtctaaagccccaggctgggttaggtggtctaggataccaactccccctcaacattttaccttaatccaacagtacagtaattagccgaaacttgcctggtttttcctactagactgtaagccctctagggacagggacagtgtcttattcatctctgtgttcttagtgcagagcctggcccgctgttggtgtttaataaagtgtgttgatctgaaatgccccagaccaaccaagattcccagacttggcttcttcccacactgggctggagtcctcccggagctcagggggaggtgagggccccagaaggtgcacttgccatcaggcttctccctgggtcccaggaggactgcagccaggcccgaggcacctttgtgggaggtgggtagagggctgaggcagcgtcacaccttcttgccccgcctccccatctgccttccccaacccaattagaccagcgcagacataagccttcc

SEQ ID NO: 31882 - DNA, 1380 bp, Homo sapiens
ctagaggcggaggcctgggccacggcggaggcgctgggtccttctggcactcctctggtggaccgcccccatcggccacacttgccctgctctccagtgattctgtagctcctggctccgtagtctcgcggacagctctctttcctggaagatgtttctggtgggcctgacagggggcattgcctcaggcaagagctcagtgatccaggtgttccagcagctgggctgtgcggtgattgacgtggacgtgatggcccggcacgtcgtgcagccaggataccctgcccaccggcgcatcgtagaggtcttcggcactgaggtcttgctggagaacggcgacataaatcgcaaggtcctgggggacctgatctttaaccagcctgaccggcggcagctgctcaacgccatcacccaccccgagattcgcaaggagatgatgaaggagacgttcaagtacttcctccggggataccgctacgtgattctggatatccccctgctgtttgagaccaagaagttgctcaagtacatgaagcacaccgtggtagtatactgcgaccgggacacacagctggcacggctgatgcggcggaacagcctgaaccgcaaggacgcagaggcccgcatcaatgcccagctgcccctgacagacaaggcccgcatggcccgccatgtcctagacaactcgggcgagtggagtgtcaccaaacgccaggtcatcctcttgcacactgagctggagcgctccctggagtacctgccgctgaggtttggggtcctcacagggctcgctgccattgccagcctcctctacctgctcacccactaccttctgccttacgcctagtggggcactcaaggcagggagccccaggcctccatctatctccttggaggctgaagccaggtaacacatcctgtttcctctcagccccctccacacacacacacacacacacacacacacacacacacacacacacggactctccgaatcagggctgggcctctgtgccaggccatcccgtctttggagtgtatcctatttgaggtcaagaaatagcctgctgtccttcccaccttccctgagcagcacctacagaacagcaaccgtgatggtgtgtgaaagcaacagtcagagactgctatacatttctgtgggtgggggtagggaatactggctctgtggccctcctcagagctgggaggccaagggttcactgggcttgaatcctctctaagcacctaccccattatggcctaaacctcctcagtggaccacgggaaatcatgttggaccaagggtttccatgttcaaacagtcaacaaggcccgctccccacaatgaaataaagttattttctcattcccaaaaaaaga

SEQ ID NO: 31883 - DNA, 343 bp, Homo sapiens
gtgatactctaacataaagccataaatgcactcccaacattgaattctagttatctgcttctgtgtttttccctccctgcactgtgagctacagaacatagagaagaccatatcctactcaacctcatatctcaggtgctaagcactgtgcctgaccgaaggagcactcgatggatgtttatctaataaagtaagaaaggaagaacagcacacatccaaaaatattaagctgtttctatcttccttgacaaaacaaccttatggccaggtgcggtgactcacgcctgtaatcccagcactttggggtttcaccatgttggccaggctggtcttgaactcctgg

SEQ ID NO: 31884 - DNA, 292 bp, Homo sapiens
tgttctttcctttcactccgcgtttgctctcccagtctctcccttcctgggaacggcgcgcgctgacatctccgtgacttcccaacccgtcggtccttttaactttgcccaggccgccttctgttgatctatctcttgtctgtccgctccctacttaccgaaattcttaccttttttggacctcttgacaccaaattagcctagttctcctgcttccctgctgtctgctgctcttctgtttggttttgtccctgaagtgtggttgtttcccccaagtctccgtgagggtctg

SEQ ID NO: 31885 - DNA, 6067 bp, Homo sapiens
  misc_feature (1642)..(1642): n is a, c, g, or t
  misc_feature (2730)..(2730): n is a, c, g, or t
acctccagagaggcccaacagggagctcgcgcggtcgtttggtctcggcggccgtagaagccgggcgcactggaccggagctgccccgccggggttgggtcgtggctgccagggcgcgtcgccaggaggcctcgcgggccgcccttccgctctcccggggctgggcggcgctgtccggctcttcctgccgcgctctggccactccccctcgcccctcgctgggcttggccttggcggccgtgctctgcaggcagtgcctccctcgggcgtgggtctgcaggagagccggacagggcagcggccggcactaccgcgctgcgatttgcgcagagctgaagaagcccctgaccattgaagaggtggcccccgccccgtcgggcctcacgaggtcagagttgatgtccatttctgtggagttaactttggtgatattttgatctgccgtgatcaatatcaggaaaggccccatcttcccttcacacctgcctggcatgggagggcaggattgtggtggtgggatttgctggaggaaacattgcttctgaaccagccaaccttctgctcctgaagaatatctctgctatgggcctgtactgtggtcaatacaaagatatgaactttcccgtcttctccaagagcctatcttcagtgcttcagtactgccagcaagggtgcatccagctatatgtcagaatggttttcaagctggacgaggaagataaaataactgcacaacttactcaaaacccaggacaaattcagagagtcaaggatggaactttgggctccccagaggctgccccagacacgagggaaggccacagcaccctcaaaggatccagaccgagggtttcggagagatggacatcatcggcctgtccctcactcttggcacaatggagagaggtttcaccaatggcaagacaaccgtgggagcccccagccacagcaggagcccagggcagaccatcagcagcagccccattatgcatccaggccaggggactggcatcagcctgtgtctggagttgactattacgaaggtggttatcgcaatcagttgtattcaaggccaggttatgagaattcatatcagagctatcagtctcccacaatgagggaggaatatgcttatggaagttattactatcatggacacccacagtggctgcaggaagaaagagtgccaaggcaacggagtccttatatctggcacgaagattaccgagagcaaaagtaccttgatgaacatcattatgaaaaccagcacagtccatttggaacaaatagtgagacccacttccaatctaacagtaggaacccttgtaaagacagccctgcttccaactctggacaggagtggccgggggagctgtttccagggagcctgcttgctgaggcccagaaaaataagccatcattggctagtgagtccaaccttctccagcagcgtgagtctggtctcagctccagcagctatgagctcagtcagtacatcagagatgccccggagcgggatgatcccccagcttcagcagcttggagtccagttcaggctggtgggttctaaaatgatcagaagagttgattgaatctgatgtggaagggctgggtggcaagtctctgggaaagtcagccttangatggatcattgtccacctcatttgcttatgtaggtcacctgggcagagaggtcaactttggttccattttctctctttttgcttgtaatagtaattgcatcatagctgattcctggaagggaacactgcccctatccattatcaagttgggaaaggaggcactcagtggtgcttttaagaaagggaagaccagagagaattaggaaaagcaaaagcaagatgcaaagcttcattgctttgtctggatgtaggaactttgtcatgagtatagaggccatgaaagccagagactccttggcctctcagcatcactgagagtctgggctgagagcattatcatttggactgaatcatcaagcccacgcattgtattctgacaccttctcagaggcttaaatctgactggagcagggaacatgggcttcttctaattacacaacccacccagaatcttattttggttcaggcagaatttgggcagaaatacatctgtggcatattcctaaactaaagaaaagtgatggaagtaacgctaacaatgtccatctgtgtctgttggtcagaagatgtctcctcagctggtcccaaagcacccatgaagttctacatccctcatgttcctgtgagtttcgggccaggaggtcagctggtgcatgtaggtcccagctctcccactgacgggcaagcagcccttgttgaactgcacagcatggaggtaaagaagacccagtgtccctggaatgctggcacactgcttacccaactactcctaacatgcttaccttgctttcctgtgcctgagccggggcatctccaggaatgggatgctcttgcgggaaactgggccatgtaccccctggattaggagggtgcaggaatgggtggggctcttctctgaaagaattgatgctacagttgtgtttttcctgagatgtcaatgtctcatctttagcaacaaaattcacttttttctttctgctttctccacaaggccttgagccatatcctagccccacggccttggggtctgacactagacttgactgaaaggggcctagggtggccacagtcttaaacacaaaatctnattgttttattccaggttattcttaatgattccgaagagcaagaggagatgagaagtttctcaggacccttgattagggaagatgtacataaggtggatattatgacgttttgccagcagaaagcagctcagagctgcaaatctgagacactggggagcagagactcagctctactgtggcagctcttggttctcctttgtcgccagaatgggtccatggtggggtctgacatcgctgagctgctaatgcaagactgcaagaagctggagaagtacaagcggcagccccctgtggccaacctcatcaacctgaccgatgaggactggccagtgctgagctctgggaccccgaacctgctcacgggagagatcccccccagtgtggagacacctgcgcagatcgtggagaaattcactaggctgctctactatggaaggaagaaggaagccttggagtgggccatgaagaaccacttgtggggccatgctttgttcctgtccagcaagatggacccacagacctacagctgggtcatgagtggcttcaccagcacgctggcgctcaatgacccactgcagaccctcttccagctcatgtcggggaggattccacaggcagccacgtgttgtggagaaaagcagtggggagactggaggcctcacttggctgtgattctgtcgaatcaggctggggacccagagctgtatcagcgtgcgattgttgccattggggacaccctggctgggaaggggcttgtggaggcagctcacttctgctatctcatggctcacgtgccctttggccactacaccgtgaagacagaccatctggtcttgctgggcagcagccacagtcaagagtttttgaaatttgcaacaactgaggcaatccagaggacggaaatcttcgagtactgtcagatgctgggccgccccaaatccttcatcccttctttccaggtgtataagctcctttatgcttcccgtctggcagattatggcctcgtgtcccaggctttgcattactgcgaagccattggtgcagctgtcttgagccagggagagagcagtcaccctgtgctattagtggaactcatcaagctagcagagaaactgaagctgtcagatcctctggttttagaaagacgcagtggagacagggacctggagccagattggctagcgcaacttcggaggcagctggagcaaaaggtagcaggagacattggggatcctcatcctactcgctcagatatttcgggagccggaggaacaacaacagaaaacactttctaccaggacttttctggatgtcaaggctactctgaagcccctgggtaccgctcagctctgtggctgacacctgagcagacctgcctgctccagcccagcccacagcagccctttcccctccagccgggctcctacccagcaggagggggtgcagggcagacagggacaccgaggcctttttactcagttcctgagacccatctaccagggactggcagcagcgtggcagtgacagaggccactggaggaacagtctgggaggaaatgctgcagacacacctgggccctggagagaacacagtgtctcaagaaacttcccagcctcctgatggccaagaggtcatttccaaaccacagacaccattggctgctagagcacgaagtatttctgagagttccgccagttcagccaaggaggatgagaaggagtcctctgatgaggctgataaaaactctccccgaaatactgcccagagaggcaagctcggagatgggaaggagcatacaaagagctcagggtttggctggttcagctggtttcgatcgaagcccaccaagaacgcatcccccgctggagacgaggactcctcagacagccctgactctgaggagacccccagagcatcttctccccaccaggctggcctgggcctctcactgacaccttcccctgagtccccacctctgccggatgttagtgccttctccaggggcagaggtgggggtgaaggccgaggatccgcatccagcgggggagcagctgcgggcgctggggttggaggcttgtctggaccagagagtgtttcctttgagctctgctccaaccctggtgttcttcttcctccacctgccttaaaaggggctgttcctctttacaacccatctcaggtgcctcagctgcccacggccactagcctgaatcggccaaatcgcctagctcagcgtcgctatcccacccagccatgctgagaataaacacacgtcccaggctcatctcccaggactgaaactttcttgctctctttttctcaatctcccagcccctctctaccatattgggaccctcaagaggtttgtgctagcccgatgcctccaccgggcacttagaaggcaagaggacaggatctctcaagacacagcacaattcagtctcttaagattaacttcacaatgatggaaattatttcatcaggtggaaagtctgggtctaatagcagactgcacatgagcagagtgacatggtggtggcacttatggtggtggcttgagagccttggggaaattagggccctaacagctagaatcaaagatgataccgcagggccctgtagcaagaaatgggaagcagggggaggggcaggggctcagaacaatattctagaccaactttgactacttcctgtcttagtaatagaccaatacatggctctatttagcaaagtttttatactgaaacttgattattgctgccctttataatttcctcttcaatgatatttcagcagtttccctcttggtcctagttttgtgcacatttttttgaatgtggttcagattaattatatttctctcactttcttagctggtcctattttttcacattctggcatgtggctatcaagttagattgctgtaggcatcatattgtcatggtaactactgaacctaatgatgcagatggatggcacatcagtataataaatgatggaaaacggttcctaaaaattcatccctttcataagaggggaagaatgagtgcctgatattgttaatacctccctttctacctcaggcctttgcaaattgatgttcagagggtcactggagtgagagggaggaggggggcgtcttggaaatttccatttctcttttcaaacccaaaataggaatgactcttgctgtttgtcagatttgctgaaaattgctcctcacaaagaacatttttttttgtacatgtaattgtaaatacaggtttagtacgttaatgttctatagttctgatattgataataattaaacccagataattttatagcaaaagctt

SEQ ID NO: 31886 - DNA, 2932 bp, Homo sapiens
  misc_feature (1930)..(1930): n is a, c, g, or t
  misc_feature (2676)..(2676): n is a, c, g, or t
  misc_feature (2679)..(2679): n is a, c, g, or t
gtgggaatttggatgatttctcatgaagataaaataactgcacaacttactcaaaacccaggacaaattcagagagtcaaggatggaactttgggctccccagaggctgccccagacacgagggaaggccacagcaccctcaaaggatccagaccgagggtttcggagagatggacatcatcggcctgtccctcactcttggcacaatggagagaggtttcaccaatggcaagacaaccgtgggagcccccagccacagcaggagcccagggcagaccatcagcagcagccccattatgcatccaggccaggggactggcatcagcctgtgtctggagttgactattacgaaggtggttatcgcaatcagttgtattcaaggccaggttatgagaattcatatcagagctatcagtctcccacaatgagggaggaatatgcttatggaagttattactatcatggacacccacagtggctgcaggaagaaagagtgccaaggcaacggagtccttatatctggcacgaagattaccgagagcaaaagtaccttgatgaacatcattatgaaaaccagcacagtccatttggaacaaatagtgagacccacttccaatctaacagtaggaacccttgtaaagacagccctgcttccaactctggacaggagtggccgggggagctgtttccagggagcctgcttgctgaggcccagaaaaataagccatcattggctagtgagtccaaccttctccagcagcgtgagtctggtctcagctccagcagctatgagctcagtcagtacatcagagatgccccggagcgggatgatcccccagcttcagcagcttggagtccagttcaggctgaagatgtctcctcagctggtcccaaagcacccatgaagttctacatccctcatgttcctgtgagtttcgggccaggaggtcagctggtgcatgtaggtcccagctctcccactgacgggcaagcagcccttgttgaactgcacagcatggaggttattcttaatgattccgaagagcaagaggagatgagaagtttctcaggacccttgattagggaagatgtacataaggtggatattatgacgttttgccagcagaaagcagctcagagctgcaaatctgagacactggggagcagagactcagctctactgtggcagctcttggttctcctttgtcgccagaatgggtccatggtggggtctgacatcgctgagctgctaatgcaagactgcaagaagctggagaagtacaagcggcagccccctgtggccaacctcatcaacctgaccgatgaggactggccagtgctgagctctgggaccccgaacctgctcacgggagagatcccccccagtgtggagacacctgcgcagatcgtggagaaattcactaggctgctctactatggaaggaagaaggaagccttggagtgggccatgaagaaccacttgtggggccatgctttgttcctgtccagcaagatggacccacagacctacagctgggtcatgagtggcttcaccagcacgctggcgctcaatgacccactgcagaccctcttccagctcatgtcggggaggattccacaggcagccacgtgttgtggagaaaagcagtggggagactggaggcctcacttggctgtgattctgtcgaatcaggctggggacccagagctgtatcagcgtgcgattgttgccattggggacaccctggctgggaaggggcttgtggaggcagctcacttctgctatctcatggctcacgtgccctttggccactacaccgtgaagacagaccatctggtcttgctgggcagcagccacaggtatgcgacctgggagaaaggaaacagtaaggacattttccaagggactgttttagcccttgtgatccanttttcattttctcatgtgaatttcagctaccgccggctcccttatttgggattgttatctgtgcaggtctgtgcaaggagatgccccgtgggccccacattacagcattggcgggggcctcaggccacaggtcctcctctgcaaagaggtgggctgatgcctttgtgtggtattgtgccctttggccactgggtggcaccctggctccacaagctaactttgttcctttaaaaaaacaacattttacatgtggaggcttgtgggtccgtgttaggcagccctgggcctgttctgagagcctacccaggcaaaactggaaaatggaagaagtttatgtttagtccctctttggggccctagcatccctacaatgacttggtgcacaagctacttagagtcccactggtgacattctctgttggccatagcattaggcttttcctgcaggaggccctcaatcagctctcagtgaatgaatgcatggacagaacgatttgctccctagaggccctccctgttctgtatctctctatccccctccccatacgtgttaagagtcactaagctcttacgttgtgccaggcattttctttgcactatttcctttaattattacacatttaccctatgaagaagtgaagtgaagcaaagattttaatcgtcacttatggaggaggaaaaccaaggcacagggagatgaaataacttgtctcagatggtacagtgagggtgtgggtgagttggantcngaatccaggcagtcagcctgcaaagcccttttaactgttgcaccacactgcctaccactgaggcagtgtacccagctcattgcctgttccttccaggttcctggtctctgatagcacatggctagcttgtcaaagaatcccttctgtgccaaatgtacaataagtgtgtatgggctaatatgtctcccctcctatgtttacgttggtttatgttgaatgaggaaattcttggaaataaagtcctacccccagg

SEQ ID NO: 31887 - DNA, 679 bp, Homo sapiens
acctccagagaggcccaacagggagctcgcgcggtcgtttggtctcggcggccgtagaagccgggcgcactggaccggagctgccccgccggggttgggtcgtggctgccagggcgcgtcgccaggaggcctcgcgggccgcccttccgctctcccggggctgggcggcgctgtccggctcttcctgccgcgctctggccactccccctcgcccctcgctgggcttggccttggcggccgtgctctgcaggcagtgcctccctcgggcgtgggtctgcaggagagccggacagggcagcggccggcactaccgcgctgcgatttgcgcagagctgaagaagcccctgaccattgaagaggtggcccccgccccgtcgggcctcacgaggtcagagttgatgtccatttctgtggagttaactttggtgatattttgatctgccgtgatcaatatcaggaaaggccccatcttcccttcacacctgggagatagagttattggcacaagaaactttaattgtatggctgaagaatgcgtcactgaccagaaggacctgtggcagattccagaaaaggtctccctataagaagctgctgtcctccctataacttatggcactgcgatttttgctcttgagcattgggcccgtacccagcctgggtaaggactgtgtagatg

SEQ ID NO: 31888 - DNA, 4351 bp, Homo sapiens
cgctgaaggaaggtgggaagccatcagagcaggaagataaaataactgcacaacttactcaaaacccaggacaaattcagagagtcaaggatggaactttgggctccccagaggctgccccagacacgagggaaggccacagcaccctcaaaggatccagaccgagggtttcggagagatggacatcatcggcctgtccctcactcttggcacaatggagagaggtttcaccaatggcaagacaaccgtgggagcccccagccacagcaggagcccagggcagaccatcagcagcagccccattatgcatccaggccaggggactggcatcagcctgtgtctggagttgactattacgaaggtggttatcgcaatcagttgtattcaaggccaggttatgagaattcatatcagagctatcagtctcccacaatgagggaggaatatgcttatggaagttattactatcatggacacccacagtggctgcaggaagaaagagtgccaaggcaacggagtccttatatctggcacgaagattaccgagagcaaaagtaccttgatgaacatcattatgaaaaccagcacagtccatttggaacaaatagtgagacccacttccaatctaacagtaggaacccttgtaaagacagccctgcttccaactctggacaggagtggccgggggagctgtttccagggagcctgcttgctgaggcccagaaaaataagccatcattggctagtgagtccaaccttctccagcagcgtgagtctggtctcagctccagcagctatgagctcagtcagtacatcagagatgccccggagcgggatgatcccccagcttcagcagcttggagtccagttcaggctgaagatgtctcctcagctggtcccaaagcacccatgaagttctacatccctcatgttcctgtgagtttcgggccaggaggtcagctggtgcatgtaggtcccagctctcccactgacgggcaagcagcccttgttgaactgcacagcatggaggttattcttaatgattccgaagagcaagaggagatgagaagtttctcaggacccttgattagggaagatgtacataaggtggatattatgacgttttgccagcagaaagcagctcagagctgcaaatctgagacactggggagcagagactcagctctactgtggcagctcttggttctcctttgtcgccagaatgggtccatggtggggtctgacatcgctgagctgctaatgcaagactgcaagaagctggagaagtacaagcggcagccccctgtggccaacctcatcaacctgaccgatgaggactggccagtgctgagctctgggaccccgaacctgctcacgggagagatcccccccagtgtggagacacctgcgcagatcgtggagaaattcactaggctgctctactatggaaggaagaaggaagccttggagtgggccatgaagaaccacttgtggggccatgctttgttcctgtccagcaagatggacccacagacctacagctgggtcatgagtggcttcaccagcacgctggcgctcaatgacccactgcagaccctcttccagctcatgtcggggaggattccacaggcagccacgtgttgtggagaaaagcagtggggagactggaggcctcacttggctgtgattctgtcgaatcaggctggggacccagagctgtatcagcgtgcgattgttgccattggggacaccctggctgggaaggggcttgtggaggcagctcacttctgctatctcatggctcacgtgccctttggccactacaccgtgaagacagaccatctggtcttgctgggcagcagccacagtcaagagtttttgaaatttgcaacaactgaggcaatccagaggacggaaatcttcgagtactgtcagatgctgggccgccccaaatccttcatcccttctttccaggtgtataagctcctttatgcttcccgtctggcagattatggcctcgtgtcccaggctttgcattactgcgaagccattggtgcagctgtcttgagccagggagagagcagtcaccctgtgctattagtggaactcatcaagctagcagagaaactgaagctgtcagatcctctggttttagaaagacgcagtggagacagggacctggagccagattggctagcgcaacttcggaggcagctggagcaaaaggtagcaggagacattggggatcctcatcctactcgctcagatatttcgggagccggaggaacaacaacagaaaacactttctaccaggacttttctggatgtcaaggctactctgaagcccctgggtaccgctcagctctgtggctgacacctgagcagacctgcctgctccagcccagcccacagcagccctttcccctccagccgggctcctacccagcaggagggggtgcagggcagacagggacaccgaggcctttttactcagttcctgagacccatctaccagggactggcagcagcgtggcagtgacagaggccactggaggaacagtctgggaggaaatgctgcagacacacctgggccctggagagaacacagtgtctcaagaaacttcccagcctcctgatggccaagaggtcatttccaaaccacagacaccattggctgctagagcacgaagtatttctgagagttccgccagttcagccaaggaggatgagaaggagtcctctgatgaggctgataaaaactctccccgaaatactgcccagagaggcaagctcggagatgggaaggagcatacaaagagctcagggtttggctggttcagctggtttcgatcgaagcccaccaagaacgcatcccccgctggagacgaggactcctcagacagccctgactctgaggagacccccagagcatcttctccccaccaggctggcctgggcctctcactgacaccttcccctgagtccccacctctgccggatgttagtgccttctccaggggcagaggtgggggtgaaggccgaggatccgcatccagcgggggagcagctgcgggcgctggggttggaggcttgtctggaccagagagtgtttcctttgagctctgctccaaccctggtgttcttcttcctccacctgccttaaaaggggctgttcctctttacaacccatctcaggtgcctcagctgcccacggccactagcctgaatcggccaaatcgcctagctcagcgtcgctatcccacccagccatgctgagaataaacacacgtcccaggctcatctcccaggactgaaactttcttgctctctttttctcaatctcccagcccctctctaccatattgggaccctcaagaggtttgtgctagcccgatgcctccaccgggcacttagaaggcaagaggacaggatctctcaagacacagcacaattcagtctcttaagattaacttcacaatgatggaaattatttcatcaggtggaaagtctgggtctaatagcagactgcacatgagcagagtgacatggtggtggcacttatggtggtggcttgagagccttggggaaattagggccctaacagctagaatcaaagatgataccgcagggccctgtagcaagaaatgggaagcagggggaggggcaggggctcagaacaatattctagaccaactttgactacttcctgtcttagtaatagaccaatacatggctctatttagcaaagtttttatactgaaacttgattattgctgccctttataatttcctcttcaatgatatttcagcagtttccctcttggtcctagttttgtgcacatttttttgaatgtggttcagattaattatatttctctcactttcttagctggtcctattttttcacattctggcatgtggctatcaagttagattgctgtaggcatcatattgtcatggtaactactgaacctaatgatgcagatggatggcacatcagtataataaatgatggaaaacggttcctaaaaattcatccctttcataagaggggaagaatgagtgcctgatattgttaatacctccctttctacctcaggcctttgcaaattgatgttcagagggtcactggagtgagagggaggaggggggcgtcttggaaatttccatttctcttttcaaacccaaaataggaatgactcttgctgtttgtcagatttgctgaaaattgctcctcacaaagaacatttttttttgtacatgtaattgtaaatacaggtttagtacgttaatgttctatagttctgatattgataataattaaacccagataattttatagcaaaagctt

SEQ ID NO: 31889 - DNA, 4297 bp, Homo sapiens
cgctgaaggaaggtgggaagccatcagagcaggaagataaaataactgcacaacttactcaaaacccaggacaaattcagagagtcaaggatggaactttgggctccccagaggctgccccagacacgagggaaggccacagcaccctcaaaggatccagaccgagggtttcggagagatggacatcatcggcctgtccctcactcttggcacaatggagagaggtttcaccaatggcaagacaaccgtgggagcccccagccacagcaggagcccagggcagaccatcagcagcagccccattatgcatccaggccaggggactggcatcagcctgtgtctggagttgactattacgaaggtggttatcgcaatcagttgtattcaaggccaggttatgagaattcatatcagagctatcagtctcccacaatgagggaggaatatgcttatggaagttattactatcatggacacccacagtggctgcaggaagaaagagtgccaaggcaacggagtccttatatctggcacgaagattaccgagagcaaaagtaccttgatgaacatcattatgaaaaccagcacagtccatttggaacaaatagtgagacccacttccaatctaacagtaggaacccttgtaaagacagccctgcttccaactctggacaggagtggccgggggagctgtttccagggagcctgcttgctgaggcccagaaaaataagccatcattggctagtgagtccaaccttctccagcagcgtgagtctggtctcagctccagcagctatgagctcagtcagtacatcagagatgccccggagcgggatgatcccccagcttcagcagcttggagtccagttcaggctgaagatgtctcctcagctggtcccaaagcacccatgaagttctacatccctcatgttcctgtgagtttcgggccaggaggtcagctggtgcatgtaggtcccagctctcccactgacgggcaagcagcccttgttgaactgcacagcatggaggttattcttaatgattccgaagagcaagaggagatgagaagtttctcaggacccttgattagggaagatgtacataaggtggatattatgacgttttgccagcagaaagcagctcagagctgcaaatctgagacactggggagcagagactcagctctactgtggcagctcttggttctcctttgtcgccagaatgggtccatggtggggtctgacatcgctgagctgctaatgcaagactgcaagaagctggagaagtacaagcggcagccccctgtggccaacctcatcaacctgaccgatgaggactggccagtgctgagctctgggaccccgaacctgctcacgggagagatcccccccagtgtggagacacctgcgcagatcgtggagaaattcactaggctgctctactatggaaggaagaaggaagccttggagtgggccatgaagaaccacttgtggggccatgctttgttcctgtccagcaagatggacccacagacctacagctgggtcatgagtggcttcaccagcacgctggcgctcaatgacccactgcagaccctcttccagctcatgtcggggaggattccacaggcagccacgtgttgtggagaaaagcagtggggagactggaggcctcacttggctgtgattctgtcgaatcaggctggggacccagagctgtatcagcgtgcgattgttgccattggggacaccctggctgggaaggggcttgtggaggcagctcacttctgctatctcatggctcacgtgccctttggccactacaccgtgaagacagaccatctggtcttgctgggcagcagccacagtcaagagtttttgaaatttgcaacaactgaggcaatccagaggacggaaatcttcgagtactgtcagatgctgggccgccccaaatccttcatcccttctttccaggtgtataagctcctttatgcttcccgtctggcagattatggcctcgtgtcccaggctttgcattactgcgaagccattggtgcagctgtcttgagccagggagagagcagtcaccctgtgctattagtggaactcatcaagctagcagagaaactgaagctgtcagatcctctggttttagaaagacgcagtggagacagggacctggagccagattggctagcgcaacttcggaggcagctggagcaaaaggtagcaggagacattggggatcctcatcctactcgctcagatatttcgggagccggaggaacaacaacagaaaacactttctaccaggacttttctggatgtcaaggctactctgaagcccctgggtaccgctcagctctgtggctgacacctgagcagacctgcctgctccagcccagcccacagcagccctttcccctccagccgggctcctacccagcaggagggggtgcagggcagacagggacaccgaggcctttttactcagttcctgagacccatctaccagggactggcagcagcgtggcagtgacagaggccactggaggaacagtctgggaggaaatgctgcagacacacctgggccctggagagaacacagtgtctcaagaaacttcccagcctcctgatggccaagaggtcatttccaaaccacagacaccattggctgctagagcacgaagtatttctgagagttccgccagttcagccaaggaggatgagaaggagtcctctgatgaggctgataaaaactctccccgaaatactgcccagagaggcaagctcggagatgggaaggagcatacaaagagctcagggtttggctggttcagctggtttcgatcgaagcccaccaagaacgcatcccccgctggagacgaggactcctcagacagccctgactctgaggagacccccagagcatcttctccccaccaggctggcctgggcctctcactgacaccttcccctgagtccccacctctgccggatgttagtgccttctccaggggcagaggtgggggtgaaggccgaggatccgcatccagcgggggagcagctgcgggcgctggggttggaggcttgtctggaccagagagtgtttcctttgagctctgctccaaccctggtgttcttcttcctccacctgccttaaaaggggctgttcctctttacaacccatctcaggtgcctcagctgcccacggccactagcctgaatcggccaaatcgcctagctcagcgtcgctatcccacccagccatgctgagaataaacacacgtcccaggctcatctcccaggactgaaactttcttgctctctttttctcaatctcccagcccctctctaccatattgggaccctcaagaggtttgtgctagcccgatgcctccaccgggcacttagaaggcaagaggacaggatctctcaagacacagcacaattcagtctcttaagattaacttcacaatgatggaaattatttcatcaggtggaaagtctgggtctaatagcagactgcacatgagcagagtgacatggtggtggcacttatggtggtggcttgagagccttggggaaattagggccctaacagctagaatcaaagatgataccgcagggccctgtagcaagaaatgggaagcagggggaggggcaggggctcagaacaatattctagaccaactttgactacttcctgtcttagtaatagaccaatacatggctctatttagcaaagtttttatactgaaacttgattattgctgccctttataatttcctcttcaatgatatttcagcagtttccctcttggtcctagttttgtgcacatttttttgaatgtggttcagattaattatatttctctcactttcttagctggtcctattttttcacattctggcatgtggctatcaagttagattgctgtaggcatcatattgtcatggtaactactgaacctaatgatgcagatggatggcacatcagtataataaatgatggaaaacggttcctactccctttctacctcaggcctttgcaaattgatgttcagagggtcactggagtgagagggaggaggggggcgtcttggaaatttccatttctcttttcaaacccaaaataggaatgactcttgctgtttgtcagatttgctgaaaattgctcctcacaaagaacatttttttttgtacatgtaattgtaaatacaggtttagtacgttaatgttctatagttctgatattgataataattaaacccagataattttatagcaaaagctt

SEQ ID NO: 31890 - DNA, 4347 bp, Homo sapiens
cgctgaaggaaggtgggaagccatcagagcaggaagataaaataactgcacaacttactcaaaacccaggacaaattcagagagtcaaggatggaactttgggctccccagaggctgccccagacacgagggaaggccacagcaccctcaaaggatccagaccgagggtttcggagagatggacatcatcggcctgtccctcactcttggcacaatggagagaggtttcaccaatggcaagacaaccgtgggagcccccagccacagcaggagcccagggcagaccatcagcagcagccccattatgcatccaggccaggggactggcatcagcctgtgtctggagttgactattacgaaggtggttatcgcaatcagttgtattcaaggccaggttatgagaattcatatcagagctatcagtctcccacaatgagggaggaatatgcttatggaagttattactatcatggacacccacagtggctgcaggaagaaagagtgccaaggcaacggagtccttatatctggcacgaagattaccgagagcaaaagtaccttgatgaacatcattatgaaaaccagcacagtccatttggaacaaatagtgagacccacttccaatctaacagtaggaacccttgtaaagacagccctgcttccaactctggacaggagtggccgggggagctgtttccagggagcctgcttgctgaggcccagaaaaataagccatcattggctagtgagtccaaccttctccagcagcgtgagtctggtctcagctccagcagctatgagctcagtcagtacatcagagatgccccggagcgggatgatcccccagcttcagcagcttggagtccagttcaggctgaagatgtctcctcagctggtcccaaagcacccatgaagttctacatccctcatgttcctgtgagtttcgggccaggaggtcagctggtgcatgtaggtcccagctctcccactgacgggcaagcagcccttgttgaactgcacagcatggaggttattcttaatgattccgaagagcaagaggagatgagaagtttctcaggacccttgattagggaagatgtacataaggtggatattatgacgttttgccagcagaaagcagctcagagctgcaaatctgagacactggggagcagagactcagctctactgtggcagctcttggttctcctttgtcgccagaatgggtccatggtggggtctgacatcgctgagctgctaatgcaagactgcaagaagctggagaagtacaagcggcagccccctgtggccaacctcatcaacctgaccgatgaggactggccagtgctgagctctgggaccccgaacctgctcacgggagagatcccccccagtgtggagacacctgcgcagatcgtggagaaattcactaggctgctctactatggaaggaagaaggaagccttggagtgggccatgaagaaccacttgtggggccatgctttgttcctgtccagcaagatggacccacagacctacagctgggtcatgagtggcttcaccagcacgctggcgctcaatgacccactgcagaccctcttccagctcatgtcggggaggattccacaggcagccacgtgttgtggagaaaagcagtggggagactggaggcctcacttggctgtgattctgtcgaatcaggctggggacccagagctgtatcagcgtgcgattgttgccattggggacaccctggctgggaaggggcttgtggaggcagctcacttctgctatctcatggctcacgtgccctttggccactacaccgtgaagacagaccatctggtcttgctgggcagcagccacagtcaagagtttttgaaatttgcaacaactgaggcaatccagaggacggaaatcttcgagtactgtcagatgctgggccgccccaaatccttcatcccttctttccaggtgtataagctcctttatgcttcccgtctggcagattatggcctcgtgtcccaggctttgcattactgcgaagccattggtgcagctgtcttgagccagggagagagcagtcaccctgtgctattagtggaactcatcaagctagcagagaaactgaagctgtcagatcctctggttttagaaagacgcagtggagacagggacctggagccagattggctagcgcaacttcggaggcagctggagcaaaaggtagcaggagacattggggatcctcatcctactcgctcagatatttcgggagccggaggaacaacaacagaaaacactttctaccaggacttttctggatgtcaaggctactctgaagcccctgggtaccgctcagctctgtggctgacacctgagcagacctgcctgctccagcccagcccacagcagccctttcccctccagccgggctcctacccagcaggagggggtgcagggcagacagggacaccgaggcctttttactcagttcctgagacccatctaccagggactggcagcagcgtggcagtgacagaggccactggaggaacagtctgggaggaaatgctgcagacacacctgggccctggagagaacacagtgtctcaagaaacttcccagcctcctgatggccaagaggtcatttccaaaccacagacaccattggctgctagagcacgaagtatttctgagagttccgccagttcagccaaggaggatgagaaggagtcctctgatgaggctgataaaaactctccccgaaatactgcccagagaggcaagctcggagatgggaaggagcatacaaagagctcagggtttggctggttcagctggtttcgatcgaagcccaccaagaacgcatcccccgctggagacgaggactcctcagacagccctgactctgaggagacccccagagcatcttctccccaccaggctggcctgggcctctcactgacaccttcccctgagtccccacctctgccggatgttagtgccttctccaggggcagaggtgggggtgaaggccgaggatccgcatccagcgggggagcagctgcgggcgctggggttggaggcttgtctggaccagagagtgtttcctttgagctctgctccaaccctggtgttcttcttcctccacctgccttaaaaggggctgttcctctttacaacccatctcaggtgcctcagctgcccacggccactagcctgaatcggccaaatcgcctagctcagcgtcgctatcccacccagccatgctgagaataaacacacgtcccaggctcatctcccaggactgaaactttcttgctctctttttctcaatctcccagcccctctctaccatattgggaccctcaagaggtttgtgctagcccgatgcctccaccgggcacttagaaggcaagaggacaggatctctcaagacacagcacaattcagtctcttaagattaacttcacaatgatggaaattatttcatcaggtggaaagtctgggtctaatagcagactgcacatgagcagagtgacatggtggtggcacttatggtggtggcttgagagccttggggaaattagggccctaacagctagaatcaaagatgataccgcagggccctgtagcaagaaatgggaagcagggggaggggcaggggctcagaacaatattctagaccaactttgactacttcctgtcttagtaatagaccaatacatggctctatttagcaaagtttttatactgaaacttgattattgctgccctttataatttcctcttcaatgatatttcagcagtttccctcttggtcctagttttgtgcacatttttttgaatgtggttcagattaattatatttctctcactttcttagctggtcctattttttcacattctggcatgtggctatcaagttagattgctgtaggcatcatattgtcatggtaactactgaacctaatgatgcagatggatggcacatcagtataataaatgatggaaaacggttcctaaaaattcatccctttcataagaggggaagaatgagtgcctgatattgttaatacctccctttctacctcaggcctttgcaaattgatgttcagagggtcactggagtgagagggaggaggggggcgtcttggaaatttccatttctcttttcaaacccaaaataggaatgactcttgctgatatgccattcttgctgcagcaagaatggcatatcagcgcaagtaggtcatacaagacgctacttcccctatcatagaagagctatcacctttatgatacgccctataatcattttcctatctgcttcactagtcctga

SEQ ID NO: 31891 - DNA, 6403 bp, Homo sapiens
  misc_feature (1978)..(1978): n is a, c, g, or t
  misc_feature (3066)..(3066): n is a, c, g, or t
acctccagagaggcccaacagggagctcgcgcggtcgtttggtctcggcggccgtagaagccgggcgcactggaccggagctgccccgccggggttgggtcgtggctgccagggcgcgtcgccaggaggcctcgcgggccgcccttccgctctcccggggctgggcggcgctgtccggctcttcctgccgcgctctggccactccccctcgcccctcgctgggcttggccttggcggccgtgctctgcaggcagtgcctccctcgggcgtgggtctgcaggagagccggacagggcagcggccggcactaccgcgctgcgatttgcgcagagctgaagaagcccctgaccattgaagaggtggcccccgccccgtcgggcctcacgaggtcagagttgatgtccatttctgtggagttaactttggtgatattttgatctgccgtgatcaatatcaggaaaggccccatcttcccttcacacctggaatggacttttctgggacagtattggagacaggcacagatgtcaggacagttaaagagggagatagagttattggcacaagaaactttaattgtatggctgaagaatgcgtcactgaccagaaggacctgtggcagattccagaaaaggtctccctataagaagctgctgtcctccctataacttatggcactgcgatttttgctcttgagcattgggcccgtacccagcctgggtaatatagctgctgctggaagtgacgagaagtgcaagctggcgatgcagaggggtgcgcagtccagcgtgaactacagtcagggcagcctgaaggatgcacctggcatgggagggcaggattgtggtggtgggatttgctggaggaaacattgcttctgaaccagccaaccttctgctcctgaagaatatctctgctatgggcctgtactgtggtcaatacaaagatatgaactttcccgtcttctccaagagcctatcttcagtgcttcagtactgccagcaagggtgcatccagctatatgtcagaatggttttcaagctggacgaggaagataaaataactgcacaacttactcaaaacccaggacaaattcagagagtcaaggatggaactttgggctccccagaggctgccccagacacgagggaaggccacagcaccctcaaaggatccagaccgagggtttcggagagatggacatcatcggcctgtccctcactcttggcacaatggagagaggtttcaccaatggcaagacaaccgtgggagcccccagccacagcaggagcccagggcagaccatcagcagcagccccattatgcatccaggccaggggactggcatcagcctgtgtctggagttgactattacgaaggtggttatcgcaatcagttgtattcaaggccaggttatgagaattcatatcagagctatcagtctcccacaatgagggaggaatatgcttatggaagttattactatcatggacacccacagtggctgcaggaagaaagagtgccaaggcaacggagtccttatatctggcacgaagattaccgagagcaaaagtaccttgatgaacatcattatgaaaaccagcacagtccatttggaacaaatagtgagacccacttccaatctaacagtaggaacccttgtaaagacagccctgcttccaactctggacaggagtggccgggggagctgtttccagggagcctgcttgctgaggcccagaaaaataagccatcattggctagtgagtccaaccttctccagcagcgtgagtctggtctcagctccagcagctatgagctcagtcagtacatcagagatgccccggagcgggatgatcccccagcttcagcagcttggagtccagttcaggctggtgggttctaaaatgatcagaagagttgattgaatctgatgtggaagggctgggtggcaagtctctgggaaagtcagccttangatggatcattgtccacctcatttgcttatgtaggtcacctgggcagagaggtcaactttggttccattttctctctttttgcttgtaatagtaattgcatcatagctgattcctggaagggaacactgcccctatccattatcaagttgggaaaggaggcactcagtggtgcttttaagaaagggaagaccagagagaattaggaaaagcaaaagcaagatgcaaagcttcattgctttgtctggatgtaggaactttgtcatgagtatagaggccatgaaagccagagactccttggcctctcagcatcactgagagtctgggctgagagcattatcatttggactgaatcatcaagcccacgcattgtattctgacaccttctcagaggcttaaatctgactggagcagggaacatgggcttcttctaattacacaacccacccagaatcttattttggttcaggcagaatttgggcagaaatacatctgtggcatattcctaaactaaagaaaagtgatggaagtaacgctaacaatgtccatctgtgtctgttggtcagaagatgtctcctcagctggtcccaaagcacccatgaagttctacatccctcatgttcctgtgagtttcgggccaggaggtcagctggtgcatgtaggtcccagctctcccactgacgggcaagcagcccttgttgaactgcacagcatggaggtaaagaagacccagtgtccctggaatgctggcacactgcttacccaactactcctaacatgcttaccttgctttcctgtgcctgagccggggcatctccaggaatgggatgctcttgcgggaaactgggccatgtaccccctggattaggagggtgcaggaatgggtggggctcttctctgaaagaattgatgctacagttgtgtttttcctgagatgtcaatgtctcatctttagcaacaaaattcacttttttctttctgctttctccacaaggccttgagccatatcctagccccacggccttggggtctgacactagacttgactgaaaggggcctagggtggccacagtcttaaacacaaaatctnattgttttattccaggttattcttaatgattccgaagagcaagaggagatgagaagtttctcaggacccttgattagggaagatgtacataaggtggatattatgacgttttgccagcagaaagcagctcagagctgcaaatctgagacactggggagcagagactcagctctactgtggcagctcttggttctcctttgtcgccagaatgggtccatggtggggtctgacatcgctgagctgctaatgcaagactgcaagaagctggagaagtacaagcggcagccccctgtggccaacctcatcaacctgaccgatgaggactggccagtgctgagctctgggaccccgaacctgctcacgggagagatcccccccagtgtggagacacctgcgcagatcgtggagaaattcactaggctgctctactatggaaggaagaaggaagccttggagtgggccatgaagaaccacttgtggggccatgctttgttcctgtccagcaagatggacccacagacctacagctgggtcatgagtggcttcaccagcacgctggcgctcaatgacccactgcagaccctcttccagctcatgtcggggaggattccacaggcagccacgtgttgtggagaaaagcagtggggagactggaggcctcacttggctgtgattctgtcgaatcaggctggggacccagagctgtatcagcgtgcgattgttgccattggggacaccctggctgggaaggggcttgtggaggcagctcacttctgctatctcatggctcacgtgccctttggccactacaccgtgaagacagaccatctggtcttgctgggcagcagccacagtcaagagtttttgaaatttgcaacaactgaggcaatccagaggacggaaatcttcgagtactgtcagatgctgggccgccccaaatccttcatcccttctttccaggtgtataagctcctttatgcttcccgtctggcagattatggcctcgtgtcccaggctttgcattactgcgaagccattggtgcagctgtcttgagccagggagagagcagtcaccctgtgctattagtggaactcatcaagctagcagagaaactgaagctgtcagatcctctggttttagaaagacgcagtggagacagggacctggagccagattggctagcgcaacttcggaggcagctggagcaaaaggtagcaggagacattggggatcctcatcctactcgctcagatatttcgggagccggaggaacaacaacagaaaacactttctaccaggacttttctggatgtcaaggctactctgaagcccctgggtaccgctcagctctgtggctgacacctgagcagacctgcctgctccagcccagcccacagcagccctttcccctccagccgggctcctacccagcaggagggggtgcagggcagacagggacaccgaggcctttttactcagttcctgagacccatctaccagggactggcagcagcgtggcagtgacagaggccactggaggaacagtctgggaggaaatgctgcagacacacctgggccctggagagaacacagtgtctcaagaaacttcccagcctcctgatggccaagaggtcatttccaaaccacagacaccattggctgctagagcacgaagtatttctgagagttccgccagttcagccaaggaggatgagaaggagtcctctgatgaggctgataaaaactctccccgaaatactgcccagagaggcaagctcggagatgggaaggagcatacaaagagctcagggtttggctggttcagctggtttcgatcgaagcccaccaagaacgcatcccccgctggagacgaggactcctcagacagccctgactctgaggagacccccagagcatcttctccccaccaggctggcctgggcctctcactgacaccttcccctgagtccccacctctgccggatgttagtgccttctccaggggcagaggtgggggtgaaggccgaggatccgcatccagcgggggagcagctgcgggcgctggggttggaggcttgtctggaccagagagtgtttcctttgagctctgctccaaccctggtgttcttcttcctccacctgccttaaaaggggctgttcctctttacaacccatctcaggtgcctcagctgcccacggccactagcctgaatcggccaaatcgcctagctcagcgtcgctatcccacccagccatgctgagaataaacacacgtcccaggctcatctcccaggactgaaactttcttgctctctttttctcaatctcccagcccctctctaccatattgggaccctcaagaggtttgtgctagcccgatgcctccaccgggcacttagaaggcaagaggacaggatctctcaagacacagcacaattcagtctcttaagattaacttcacaatgatggaaattatttcatcaggtggaaagtctgggtctaatagcagactgcacatgagcagagtgacatggtggtggcacttatggtggtggcttgagagccttggggaaattagggccctaacagctagaatcaaagatgataccgcagggccctgtagcaagaaatgggaagcagggggaggggcaggggctcagaacaatattctagaccaactttgactacttcctgtcttagtaatagaccaatacatggctctatttagcaaagtttttatactgaaacttgattattgctgccctttataatttcctcttcaatgatatttcagcagtttccctcttggtcctagttttgtgcacatttttttgaatgtggttcagattaattatatttctctcactttcttagctggtcctattttttcacattctggcatgtggctatcaagttagattgctgtaggcatcatattgtcatggtaactactgaacctaatgatgcagatggatggcacatcagtataataaatgatggaaaacggttcctaaaaattcatccctttcataagaggggaagaatgagtgcctgatattgttaatacctccctttctacctcaggcctttgcaaattgatgttcagagggtcactggagtgagagggaggaggggggcgtcttggaaatttccatttctcttttcaaacccaaaataggaatgactcttgctgtttgtcagatttgctgaaaattgctcctcacaaagaacatttttttttgtacatgtaattgtaaatacaggtttagtacgttaatgttctatagttctgatattgataataattaaacccagataattttatagcaaaagctt

SEQ ID NO: 31892 - DNA, 6215 bp, Homo sapiens
  misc_feature (13)..(13): n is a, c, g, or t
  misc_feature (40)..(40): n is a, c, g, or t
  misc_feature (1790)..(1790): n is a, c, g, or t
  misc_feature (2878)..(2878): n is a, c, g, or t
aaggctagtgtcntgggttaaaccccgcggctcccgtggnaagtccgggatggcggctctgcaggcagtgctcctcgggcgtgggtctgcaggagagccggacagggcagcggccggcactaccgcgctgcgatttgcgcagagctgaagaagcccctgaccattgaagaggtggcccccgccccgtcgggcctcacgaggtcagagttgatgtccatttctgtggagttaactttggtgatattttgatctgccgtgatcaatatcaggaaaggccccatcttcccttcacacctggaatggacttttctgggacagtattggagacaggcacagatgtcaggacagttaaagagggagatagagttattggcacaagaaactttaattgtatggctgaagaatgcgtcactgaccagaaggacctgtggcagattccagaaaaggtctccctataagaagctgctgtcctccctataacttatggcactgcgatttttgctcttgagcattgggcccgtacccagcctgggtaatatagctgctgctggaagtgacgagaagtgcaagctggcgatgcagaggggtgcgcagtccagcgtgaactacagtcagggcagcctgaaggatgcacctggcatgggagggcaggattgtggtggtgggatttgctggaggaaacattgcttctgaaccagccaaccttctgctcctgaagaatatctctgctatgggcctgtactgtggtcaatacaaagatatgaactttcccgtcttctccaagagcctatcttcagtgcttcagtactgccagcaagggtgcatccagctatatgtcagaatggttttcaagctggacgaggaagataaaataactgcacaacttactcaaaacccaggacaaattcagagagtcaaggatggaactttgggctccccagaggctgccccagacacgagggaaggccacagcaccctcaaaggatccagaccgagggtttcggagagatggacatcatcggcctgtccctcactcttggcacaatggagagaggtttcaccaatggcaagacaaccgtgggagcccccagccacagcaggagcccagggcagaccatcagcagcagccccattatgcatccaggccaggggactggcatcagcctgtgtctggagttgactattacgaaggtggttatcgcaatcagttgtattcaaggccaggttatgagaattcatatcagagctatcagtctcccacaatgagggaggaatatgcttatggaagttattactatcatggacacccacagtggctgcaggaagaaagagtgccaaggcaacggagtccttatatctggcacgaagattaccgagagcaaaagtaccttgatgaacatcattatgaaaaccagcacagtccatttggaacaaatagtgagacccacttccaatctaacagtaggaacccttgtaaagacagccctgcttccaactctggacaggagtggccgggggagctgtttccagggagcctgcttgctgaggcccagaaaaataagccatcattggctagtgagtccaaccttctccagcagcgtgagtctggtctcagctccagcagctatgagctcagtcagtacatcagagatgccccggagcgggatgatcccccagcttcagcagcttggagtccagttcaggctggtgggttctaaaatgatcagaagagttgattgaatctgatgtggaagggctgggtggcaagtctctgggaaagtcagccttangatggatcattgtccacctcatttgcttatgtaggtcacctgggcagagaggtcaactttggttccattttctctctttttgcttgtaatagtaattgcatcatagctgattcctggaagggaacactgcccctatccattatcaagttgggaaaggaggcactcagtggtgcttttaagaaagggaagaccagagagaattaggaaaagcaaaagcaagatgcaaagcttcattgctttgtctggatgtaggaactttgtcatgagtatagaggccatgaaagccagagactccttggcctctcagcatcactgagagtctgggctgagagcattatcatttggactgaatcatcaagcccacgcattgtattctgacaccttctcagaggcttaaatctgactggagcagggaacatgggcttcttctaattacacaacccacccagaatcttattttggttcaggcagaatttgggcagaaatacatctgtggcatattcctaaactaaagaaaagtgatggaagtaacgctaacaatgtccatctgtgtctgttggtcagaagatgtctcctcagctggtcccaaagcacccatgaagttctacatccctcatgttcctgtgagtttcgggccaggaggtcagctggtgcatgtaggtcccagctctcccactgacgggcaagcagcccttgttgaactgcacagcatggaggtaaagaagacccagtgtccctggaatgctggcacactgcttacccaactactcctaacatgcttaccttgctttcctgtgcctgagccggggcatctccaggaatgggatgctcttgcgggaaactgggccatgtaccccctggattaggagggtgcaggaatgggtggggctcttctctgaaagaattgatgctacagttgtgtttttcctgagatgtcaatgtctcatctttagcaacaaaattcacttttttctttctgctttctccacaaggccttgagccatatcctagccccacggccttggggtctgacactagacttgactgaaaggggcctagggtggccacagtcttaaacacaaaatctnattgttttattccaggttattcttaatgattccgaagagcaagaggagatgagaagtttctcaggacccttgattagggaagatgtacataaggtggatattatgacgttttgccagcagaaagcagctcagagctgcaaatctgagacactggggagcagagactcagctctactgtggcagctcttggttctcctttgtcgccagaatgggtccatggtggggtctgacatcgctgagctgctaatgcaagactgcaagaagctggagaagtacaagcggcagccccctgtggccaacctcatcaacctgaccgatgaggactggccagtgctgagctctgggaccccgaacctgctcacgggagagatcccccccagtgtggagacacctgcgcagatcgtggagaaattcactaggctgctctactatggaaggaagaaggaagccttggagtgggccatgaagaaccacttgtggggccatgctttgttcctgtccagcaagatggacccacagacctacagctgggtcatgagtggcttcaccagcacgctggcgctcaatgacccactgcagaccctcttccagctcatgtcggggaggattccacaggcagccacgtgttgtggagaaaagcagtggggagactggaggcctcacttggctgtgattctgtcgaatcaggctggggacccagagctgtatcagcgtgcgattgttgccattggggacaccctggctgggaaggggcttgtggaggcagctcacttctgctatctcatggctcacgtgccctttggccactacaccgtgaagacagaccatctggtcttgctgggcagcagccacagtcaagagtttttgaaatttgcaacaactgaggcaatccagaggacggaaatcttcgagtactgtcagatgctgggccgccccaaatccttcatcccttctttccaggtgtataagctcctttatgcttcccgtctggcagattatggcctcgtgtcccaggctttgcattactgcgaagccattggtgcagctgtcttgagccagggagagagcagtcaccctgtgctattagtggaactcatcaagctagcagagaaactgaagctgtcagatcctctggttttagaaagacgcagtggagacagggacctggagccagattggctagcgcaacttcggaggcagctggagcaaaaggtagcaggagacattggggatcctcatcctactcgctcagatatttcgggagccggaggaacaacaacagaaaacactttctaccaggacttttctggatgtcaaggctactctgaagcccctgggtaccgctcagctctgtggctgacacctgagcagacctgcctgctccagcccagcccacagcagccctttcccctccagccgggctcctacccagcaggagggggtgcagggcagacagggacaccgaggcctttttactcagttcctgagacccatctaccagggactggcagcagcgtggcagtgacagaggccactggaggaacagtctgggaggaaatgctgcagacacacctgggccctggagagaacacagtgtctcaagaaacttcccagcctcctgatggccaagaggtcatttccaaaccacagacaccattggctgctagagcacgaagtatttctgagagttccgccagttcagccaaggaggatgagaaggagtcctctgatgaggctgataaaaactctccccgaaatactgcccagagaggcaagctcggagatgggaaggagcatacaaagagctcagggtttggctggttcagctggtttcgatcgaagcccaccaagaacgcatcccccgctggagacgaggactcctcagacagccctgactctgaggagacccccagagcatcttctccccaccaggctggcctgggcctctcactgacaccttcccctgagtccccacctctgccggatgttagtgccttctccaggggcagaggtgggggtgaaggccgaggatccgcatccagcgggggagcagctgcgggcgctggggttggaggcttgtctggaccagagagtgtttcctttgagctctgctccaaccctggtgttcttcttcctccacctgccttaaaaggggctgttcctctttacaacccatctcaggtgcctcagctgcccacggccactagcctgaatcggccaaatcgcctagctcagcgtcgctatcccacccagccatgctgagaataaacacacgtcccaggctcatctcccaggactgaaactttcttgctctctttttctcaatctcccagcccctctctaccatattgggaccctcaagaggtttgtgctagcccgatgcctccaccgggcacttagaaggcaagaggacaggatctctcaagacacagcacaattcagtctcttaagattaacttcacaatgatggaaattatttcatcaggtggaaagtctgggtctaatagcagactgcacatgagcagagtgacatggtggtggcacttatggtggtggcttgagagccttggggaaattagggccctaacagctagaatcaaagatgataccgcagggccctgtagcaagaaatgggaagcagggggaggggcaggggctcagaacaatattctagaccaactttgactacttcctgtcttagtaatagaccaatacatggctctatttagcaaagtttttatactgaaacttgattattgctgccctttataatttcctcttcaatgatatttcagcagtttccctcttggtcctagttttgtgcacatttttttgaatgtggttcagattaattatatttctctcactttcttagctggtcctattttttcacattctggcatgtggctatcaagttagattgctgtaggcatcatattgtcatggtaactactgaacctaatgatgcagatggatggcacatcagtataataaatgatggaaaacggttcctaaaaattcatccctttcataagaggggaagaatgagtgcctgatattgttaatacctccctttctacctcaggcctttgcaaattgatgttcagagggtcactggagtgagagggaggaggggggcgtcttggaaatttccatttctcttttcaaacccaaaataggaatgactcttgctgtttgtcagatttgctgaaaattgctcctcacaaagaacatttttttttgtacatgtaattgtaaatacaggtttagtacgttaatgttctatagttctgatattgataataattaaacccagataattttatagcaaaagctt

SEQ ID NO: 31893 - DNA, 5377 bp, Homo sapiens
  misc_feature (952)..(952): n is a, c, g, or t
  misc_feature (2040)..(2040): n is a, c, g, or t
gtgggaatttggatgatttctcatgaagataaaataactgcacaacttactcaaaacccaggacaaattcagagagtcaaggatggaactttgggctccccagaggctgccccagacacgagggaaggccacagcaccctcaaaggatccagaccgagggtttcggagagatggacatcatcggcctgtccctcactcttggcacaatggagagaggtttcaccaatggcaagacaaccgtgggagcccccagccacagcaggagcccagggcagaccatcagcagcagccccattatgcatccaggccaggggactggcatcagcctgtgtctggagttgactattacgaaggtggttatcgcaatcagttgtattcaaggccaggttatgagaattcatatcagagctatcagtctcccacaatgagggaggaatatgcttatggaagttattactatcatggacacccacagtggctgcaggaagaaagagtgccaaggcaacggagtccttatatctggcacgaagattaccgagagcaaaagtaccttgatgaacatcattatgaaaaccagcacagtccatttggaacaaatagtgagacccacttccaatctaacagtaggaacccttgtaaagacagccctgcttccaactctggacaggagtggccgggggagctgtttccagggagcctgcttgctgaggcccagaaaaataagccatcattggctagtgagtccaaccttctccagcagcgtgagtctggtctcagctccagcagctatgagctcagtcagtacatcagagatgccccggagcgggatgatcccccagcttcagcagcttggagtccagttcaggctggtgggttctaaaatgatcagaagagttgattgaatctgatgtggaagggctgggtggcaagtctctgggaaagtcagccttangatggatcattgtccacctcatttgcttatgtaggtcacctgggcagagaggtcaactttggttccattttctctctttttgcttgtaatagtaattgcatcatagctgattcctggaagggaacactgcccctatccattatcaagttgggaaaggaggcactcagtggtgcttttaagaaagggaagaccagagagaattaggaaaagcaaaagcaagatgcaaagcttcattgctttgtctggatgtaggaactttgtcatgagtatagaggccatgaaagccagagactccttggcctctcagcatcactgagagtctgggctgagagcattatcatttggactgaatcatcaagcccacgcattgtattctgacaccttctcagaggcttaaatctgactggagcagggaacatgggcttcttctaattacacaacccacccagaatcttattttggttcaggcagaatttgggcagaaatacatctgtggcatattcctaaactaaagaaaagtgatggaagtaacgctaacaatgtccatctgtgtctgttggtcagaagatgtctcctcagctggtcccaaagcacccatgaagttctacatccctcatgttcctgtgagtttcgggccaggaggtcagctggtgcatgtaggtcccagctctcccactgacgggcaagcagcccttgttgaactgcacagcatggaggtaaagaagacccagtgtccctggaatgctggcacactgcttacccaactactcctaacatgcttaccttgctttcctgtgcctgagccggggcatctccaggaatgggatgctcttgcgggaaactgggccatgtaccccctggattaggagggtgcaggaatgggtggggctcttctctgaaagaattgatgctacagttgtgtttttcctgagatgtcaatgtctcatctttagcaacaaaattcacttttttctttctgctttctccacaaggccttgagccatatcctagccccacggccttggggtctgacactagacttgactgaaaggggcctagggtggccacagtcttaaacacaaaatctnattgttttattccaggttattcttaatgattccgaagagcaagaggagatgagaagtttctcaggacccttgattagggaagatgtacataaggtggatattatgacgttttgccagcagaaagcagctcagagctgcaaatctgagacactggggagcagagactcagctctactgtggcagctcttggttctcctttgtcgccagaatgggtccatggtggggtctgacatcgctgagctgctaatgcaagactgcaagaagctggagaagtacaagcggcagccccctgtggccaacctcatcaacctgaccgatgaggactggccagtgctgagctctgggaccccgaacctgctcacgggagagatcccccccagtgtggagacacctgcgcagatcgtggagaaattcactaggctgctctactatggaaggaagaaggaagccttggagtgggccatgaagaaccacttgtggggccatgctttgttcctgtccagcaagatggacccacagacctacagctgggtcatgagtggcttcaccagcacgctggcgctcaatgacccactgcagaccctcttccagctcatgtcggggaggattccacaggcagccacgtgttgtggagaaaagcagtggggagactggaggcctcacttggctgtgattctgtcgaatcaggctggggacccagagctgtatcagcgtgcgattgttgccattggggacaccctggctgggaaggggcttgtggaggcagctcacttctgctatctcatggctcacgtgccctttggccactacaccgtgaagacagaccatctggtcttgctgggcagcagccacagtcaagagtttttgaaatttgcaacaactgaggcaatccagaggacggaaatcttcgagtactgtcagatgctgggccgccccaaatccttcatcccttctttccaggtgtataagctcctttatgcttcccgtctggcagattatggcctcgtgtcccaggctttgcattactgcgaagccattggtgcagctgtcttgagccagggagagagcagtcaccctgtgctattagtggaactcatcaagctagcagagaaactgaagctgtcagatcctctggttttagaaagacgcagtggagacagggacctggagccagattggctagcgcaacttcggaggcagctggagcaaaaggtagcaggagacattggggatcctcatcctactcgctcagatatttcgggagccggaggaacaacaacagaaaacactttctaccaggacttttctggatgtcaaggctactctgaagcccctgggtaccgctcagctctgtggctgacacctgagcagacctgcctgctccagcccagcccacagcagccctttcccctccagccgggctcctacccagcaggagggggtgcagggcagacagggacaccgaggcctttttactcagttcctgagacccatctaccagggactggcagcagcgtggcagtgacagaggccactggaggaacagtctgggaggaaatgctgcagacacacctgggccctggagagaacacagtgtctcaagaaacttcccagcctcctgatggccaagaggtcatttccaaaccacagacaccattggctgctagagcacgaagtatttctgagagttccgccagttcagccaaggaggatgagaaggagtcctctgatgaggctgataaaaactctccccgaaatactgcccagagaggcaagctcggagatgggaaggagcatacaaagagctcagggtttggctggttcagctggtttcgatcgaagcccaccaagaacgcatcccccgctggagacgaggactcctcagacagccctgactctgaggagacccccagagcatcttctccccaccaggctggcctgggcctctcactgacaccttcccctgagtccccacctctgccggatgttagtgccttctccaggggcagaggtgggggtgaaggccgaggatccgcatccagcgggggagcagctgcgggcgctggggttggaggcttgtctggaccagagagtgtttcctttgagctctgctccaaccctggtgttcttcttcctccacctgccttaaaaggggctgttcctctttacaacccatctcaggtgcctcagctgcccacggccactagcctgaatcggccaaatcgcctagctcagcgtcgctatcccacccagccatgctgagaataaacacacgtcccaggctcatctcccaggactgaaactttcttgctctctttttctcaatctcccagcccctctctaccatattgggaccctcaagaggtttgtgctagcccgatgcctccaccgggcacttagaaggcaagaggacaggatctctcaagacacagcacaattcagtctcttaagattaacttcacaatgatggaaattatttcatcaggtggaaagtctgggtctaatagcagactgcacatgagcagagtgacatggtggtggcacttatggtggtggcttgagagccttggggaaattagggccctaacagctagaatcaaagatgataccgcagggccctgtagcaagaaatgggaagcagggggaggggcaggggctcagaacaatattctagaccaactttgactacttcctgtcttagtaatagaccaatacatggctctatttagcaaagtttttatactgaaacttgattattgctgccctttataatttcctcttcaatgatatttcagcagtttccctcttggtcctagttttgtgcacatttttttgaatgtggttcagattaattatatttctctcactttcttagctggtcctattttttcacattctggcatgtggctatcaagttagattgctgtaggcatcatattgtcatggtaactactgaacctaatgatgcagatggatggcacatcagtataataaatgatggaaaacggttcctaaaaattcatccctttcataagaggggaagaatgagtgcctgatattgttaatacctccctttctacctcaggcctttgcaaattgatgttcagagggtcactggagtgagagggaggaggggggcgtcttggaaatttccatttctcttttcaaacccaaaataggaatgactcttgctgtttgtcagatttgctgaaaattgctcctcacaaagaacatttttttttgtacatgtaattgtaaatacaggtttagtacgttaatgttctatagttctgatattgataataattaaacccagataattttatagcaaaagctt

SEQ ID NO: 31894 - DNA, 3181 bp, Homo sapiens
ggctgccagcctgaggactcataggattctccccagatgatcctctttgccttacagtccatggtggggtctgacatcgctgagctgctaatgcaagactgcaagaagctggagaagtacaagcggcagccccctgtggccaacctcatcaacctgaccgatgaggactggccagtgctgagctctgggaccccgaacctgctcacgggagagatcccccccagtgtggagacacctgcgcagatcgtggagaaattcactaggctgctctactatggaaggaagaaggaagccttggagtgggccatgaagaaccacttgtggggccatgctttgttcctgtccagcaagatggacccacagacctacagctgggtcatgagtggcttcaccagcacgctggcgctcaatgacccactgcagaccctcttccagctcatgtcggggaggattccacaggcagccacgtgttgtggagaaaagcagtggggagactggaggcctcacttggctgtgattctgtcgaatcaggctggggacccagagctgtatcagcgtgcgattgttgccattggggacaccctggctgggaaggggcttgtggaggcagctcacttctgctatctcatggctcacgtgccctttggccactacaccgtgaagacagaccatctggtcttgctgggcagcagccacagtcaagagtttttgaaatttgcaacaactgaggcaatccagaggacggaaatcttcgagtactgtcagatgctgggccgccccaaatccttcatcccttctttccaggtgtataagctcctttatgcttcccgtctggcagattatggcctcgtgtcccaggctttgcattactgcgaagccattggtgcagctgtcttgagccagggagagagcagtcaccctgtgctattagtggaactcatcaagctagcagagaaactgaagctgtcagatcctctggttttagaaagacgcagtggagacagggacctggagccagattggctagcgcaacttcggaggcagctggagcaaaaggtagcaggagacattggggatcctcatcctactcgctcagatatttcgggagccggaggaacaacaacagaaaacactttctaccaggacttttctggatgtcaaggctactctgaagcccctgggtaccgctcagctctgtggctgacacctgagcagacctgcctgctccagcccagcccacagcagccctttcccctccagccgggctcctacccagcaggagggggtgcagggcagacagggacaccgaggcctttttactcagttcctgagacccatctaccagggactggcagcagcgtggcagtgacagaggccactggaggaacagtctgggaggaaatgctgcagacacacctgggccctggagagaacacagtgtctcaagaaacttcccagcctcctgatggccaagaggtcatttccaaaccacagacaccattggctgctagagcacgaagtatttctgagagttccgccagttcagccaaggaggatgagaaggagtcctctgatgaggctgataaaaactctccccgaaatactgcccagagaggcaagctcggagatgggaaggagcatacaaagagctcagggtttggctggttcagctggtttcgatcgaagcccaccaagaacgcatcccccgctggagacgaggactcctcagacagccctgactctgaggagacccccagagcatcttctccccaccaggctggcctgggcctctcactgacaccttcccctgagtccccacctctgccggatgttagtgccttctccaggggcagaggtgggggtgaaggccgaggatccgcatccagcgggggagcagctgcgggcgctggggttggaggcttgtctggaccagagagtgtttcctttgagctctgctccaaccctggtgttcttcttcctccacctgccttaaaaggggctgttcctctttacaacccatctcaggtgcctcagctgcccacggccactagcctgaatcggccaaatcgcctagctcagcgtcgctatcccacccagccatgctgagaataaacacacgtcccaggctcatctcccaggactgaaactttcttgctctctttttctcaatctcccagcccctctctaccatattgggaccctcaagaggtttgtgctagcccgatgcctccaccgggcacttagaaggcaagaggacaggatctctcaagacacagcacaattcagtctcttaagattaacttcacaatgatggaaattatttcatcaggtggaaagtctgggtctaatagcagactgcacatgagcagagtgacatggtggtggcacttatggtggtggcttgagagccttggggaaattagggccctaacagctagaatcaaagatgataccgcagggccctgtagcaagaaatgggaagcagggggaggggcaggggctcagaacaatattctagaccaactttgactacttcctgtcttagtaatagaccaatacatggctctatttagcaaagtttttatactgaaacttgattattgctgccctttataatttcctcttcaatgatatttcagcagtttccctcttggtcctagttttgtgcacatttttttgaatgtggttcagattaattatatttctctcactttcttagctggtcctattttttcacattctggcatgtggctatcaagttagattgctgtaggcatcatattgtcatggtaactactgaacctaatgatgcagatggatggcacatcagtataataaatgatggaaaacggttcctaaaaattcatccctttcataagaggggaagaatgagtgcctgatattgttaatacctccctttctacctcaggcctttgcaaattgatgttcagagggtcactggagtgagagggaggaggggggcgtcttggaaatttccatttctcttttcaaacccaaaataggaatgactcttgctgtttgtcagatttgctgaaaattgctcctcacaaagaacatttttttttgtacatgtaattgtaaatacaggtttagtacgttaatgttctatagttctgatattgataataattaaacccagataattttatagcaaaagctt

SEQ ID NO: 31895 - DNA, 6017 bp, Homo sapiens
  misc_feature (1592)..(1592): n is a, c, g, or t
  misc_feature (2680)..(2680): n is a, c, g, or t
tccagatcaaaactccacatctttccccaaaacctgatttcccttctgtgtttccaaaggtgttaccactttccttactaatccaggtttaaaatcttggagtcacctttgattctgtttactaattgctcctaattaatatgattatatagtttattgtccaagagcctatcttcagtgcttcagtactgccagcaagggtgcatccagctatatgtcagaaggacctgtggcagattccagaaaaggtctccctataagaagctgctgtcctccctataacttatggcactgcgatttttgctcttgagcattgggcccgtacccagcctgggtaatatagctgctgctggaagtgacgagaagtgcaagctggcgatgcagaggggtgcgcagtccagcgtgaactacagtcagggcagcctgaaggatgcacctggcatgggagggcaggattgtggtggtgggatttgctggaggaaacattgcttctgaaccagccaaccttctgctcctgaagaatatctctgctatgggcctgtactgtggtcaatacaaagatatgaactttcccgtcttctccaagagcctatcttcagtgcttcagtactgccagcaagggtgcatccagctatatgtcagaatggttttcaagctggacgaggaagataaaataactgcacaacttactcaaaacccaggacaaattcagagagtcaaggatggaactttgggctccccagaggctgccccagacacgagggaaggccacagcaccctcaaaggatccagaccgagggtttcggagagatggacatcatcggcctgtccctcactcttggcacaatggagagaggtttcaccaatggcaagacaaccgtgggagcccccagccacagcaggagcccagggcagaccatcagcagcagccccattatgcatccaggccaggggactggcatcagcctgtgtctggagttgactattacgaaggtggttatcgcaatcagttgtattcaaggccaggttatgagaattcatatcagagctatcagtctcccacaatgagggaggaatatgcttatggaagttattactatcatggacacccacagtggctgcaggaagaaagagtgccaaggcaacggagtccttatatctggcacgaagattaccgagagcaaaagtaccttgatgaacatcattatgaaaaccagcacagtccatttggaacaaatagtgagacccacttccaatctaacagtaggaacccttgtaaagacagccctgcttccaactctggacaggagtggccgggggagctgtttccagggagcctgcttgctgaggcccagaaaaataagccatcattggctagtgagtccaaccttctccagcagcgtgagtctggtctcagctccagcagctatgagctcagtcagtacatcagagatgccccggagcgggatgatcccccagcttcagcagcttggagtccagttcaggctggtgggttctaaaatgatcagaagagttgattgaatctgatgtggaagggctgggtggcaagtctctgggaaagtcagccttangatggatcattgtccacctcatttgcttatgtaggtcacctgggcagagaggtcaactttggttccattttctctctttttgcttgtaatagtaattgcatcatagctgattcctggaagggaacactgcccctatccattatcaagttgggaaaggaggcactcagtggtgcttttaagaaagggaagaccagagagaattaggaaaagcaaaagcaagatgcaaagcttcattgctttgtctggatgtaggaactttgtcatgagtatagaggccatgaaagccagagactccttggcctctcagcatcactgagagtctgggctgagagcattatcatttggactgaatcatcaagcccacgcattgtattctgacaccttctcagaggcttaaatctgactggagcagggaacatgggcttcttctaattacacaacccacccagaatcttattttggttcaggcagaatttgggcagaaatacatctgtggcatattcctaaactaaagaaaagtgatggaagtaacgctaacaatgtccatctgtgtctgttggtcagaagatgtctcctcagctggtcccaaagcacccatgaagttctacatccctcatgttcctgtgagtttcgggccaggaggtcagctggtgcatgtaggtcccagctctcccactgacgggcaagcagcccttgttgaactgcacagcatggaggtaaagaagacccagtgtccctggaatgctggcacactgcttacccaactactcctaacatgcttaccttgctttcctgtgcctgagccggggcatctccaggaatgggatgctcttgcgggaaactgggccatgtaccccctggattaggagggtgcaggaatgggtggggctcttctctgaaagaattgatgctacagttgtgtttttcctgagatgtcaatgtctcatctttagcaacaaaattcacttttttctttctgctttctccacaaggccttgagccatatcctagccccacggccttggggtctgacactagacttgactgaaaggggcctagggtggccacagtcttaaacacaaaatctnattgttttattccaggttattcttaatgattccgaagagcaagaggagatgagaagtttctcaggacccttgattagggaagatgtacataaggtggatattatgacgttttgccagcagaaagcagctcagagctgcaaatctgagacactggggagcagagactcagctctactgtggcagctcttggttctcctttgtcgccagaatgggtccatggtggggtctgacatcgctgagctgctaatgcaagactgcaagaagctggagaagtacaagcggcagccccctgtggccaacctcatcaacctgaccgatgaggactggccagtgctgagctctgggaccccgaacctgctcacgggagagatcccccccagtgtggagacacctgcgcagatcgtggagaaattcactaggctgctctactatggaaggaagaaggaagccttggagtgggccatgaagaaccacttgtggggccatgctttgttcctgtccagcaagatggacccacagacctacagctgggtcatgagtggcttcaccagcacgctggcgctcaatgacccactgcagaccctcttccagctcatgtcggggaggattccacaggcagccacgtgttgtggagaaaagcagtggggagactggaggcctcacttggctgtgattctgtcgaatcaggctggggacccagagctgtatcagcgtgcgattgttgccattggggacaccctggctgggaaggggcttgtggaggcagctcacttctgctatctcatggctcacgtgccctttggccactacaccgtgaagacagaccatctggtcttgctgggcagcagccacagtcaagagtttttgaaatttgcaacaactgaggcaatccagaggacggaaatcttcgagtactgtcagatgctgggccgccccaaatccttcatcccttctttccaggtgtataagctcctttatgcttcccgtctggcagattatggcctcgtgtcccaggctttgcattactgcgaagccattggtgcagctgtcttgagccagggagagagcagtcaccctgtgctattagtggaactcatcaagctagcagagaaactgaagctgtcagatcctctggttttagaaagacgcagtggagacagggacctggagccagattggctagcgcaacttcggaggcagctggagcaaaaggtagcaggagacattggggatcctcatcctactcgctcagatatttcgggagccggaggaacaacaacagaaaacactttctaccaggacttttctggatgtcaaggctactctgaagcccctgggtaccgctcagctctgtggctgacacctgagcagacctgcctgctccagcccagcccacagcagccctttcccctccagccgggctcctacccagcaggagggggtgcagggcagacagggacaccgaggcctttttactcagttcctgagacccatctaccagggactggcagcagcgtggcagtgacagaggccactggaggaacagtctgggaggaaatgctgcagacacacctgggccctggagagaacacagtgtctcaagaaacttcccagcctcctgatggccaagaggtcatttccaaaccacagacaccattggctgctagagcacgaagtatttctgagagttccgccagttcagccaaggaggatgagaaggagtcctctgatgaggctgataaaaactctccccgaaatactgcccagagaggcaagctcggagatgggaaggagcatacaaagagctcagggtttggctggttcagctggtttcgatcgaagcccaccaagaacgcatcccccgctggagacgaggactcctcagacagccctgactctgaggagacccccagagcatcttctccccaccaggctggcctgggcctctcactgacaccttcccctgagtccccacctctgccggatgttagtgccttctccaggggcagaggtgggggtgaaggccgaggatccgcatccagcgggggagcagctgcgggcgctggggttggaggcttgtctggaccagagagtgtttcctttgagctctgctccaaccctggtgttcttcttcctccacctgccttaaaaggggctgttcctctttacaacccatctcaggtgcctcagctgcccacggccactagcctgaatcggccaaatcgcctagctcagcgtcgctatcccacccagccatgctgagaataaacacacgtcccaggctcatctcccaggactgaaactttcttgctctctttttctcaatctcccagcccctctctaccatattgggaccctcaagaggtttgtgctagcccgatgcctccaccgggcacttagaaggcaagaggacaggatctctcaagacacagcacaattcagtctcttaagattaacttcacaatgatggaaattatttcatcaggtggaaagtctgggtctaatagcagactgcacatgagcagagtgacatggtggtggcacttatggtggtggcttgagagccttggggaaattagggccctaacagctagaatcaaagatgataccgcagggccctgtagcaagaaatgggaagcagggggaggggcaggggctcagaacaatattctagaccaactttgactacttcctgtcttagtaatagaccaatacatggctctatttagcaaagtttttatactgaaacttgattattgctgccctttataatttcctcttcaatgatatttcagcagtttccctcttggtcctagttttgtgcacatttttttgaatgtggttcagattaattatatttctctcactttcttagctggtcctattttttcacattctggcatgtggctatcaagttagattgctgtaggcatcatattgtcatggtaactactgaacctaatgatgcagatggatggcacatcagtataataaatgatggaaaacggttcctaaaaattcatccctttcataagaggggaagaatgagtgcctgatattgttaatacctccctttctacctcaggcctttgcaaattgatgttcagagggtcactggagtgagagggaggaggggggcgtcttggaaatttccatttctcttttcaaacccaaaataggaatgactcttgctgtttgtcagatttgctgaaaattgctcctcacaaagaacatttttttttgtacatgtaattgtaaatacaggtttagtacgttaatgttctatagttctgatattgataataattaaacccagataattttatagcaaaagctt

SEQ ID NO: 31896 - DNA, 4904 bp, Homo sapiens
  misc_feature (1978)..(1978): n is a, c, g, or t
  misc_feature (3066)..(3066): n is a, c, g, or t
acctccagagaggcccaacagggagctcgcgcggtcgtttggtctcggcggccgtagaagccgggcgcactggaccggagctgccccgccggggttgggtcgtggctgccagggcgcgtcgccaggaggcctcgcgggccgcccttccgctctcccggggctgggcggcgctgtccggctcttcctgccgcgctctggccactccccctcgcccctcgctgggcttggccttggcggccgtgctctgcaggcagtgcctccctcgggcgtgggtctgcaggagagccggacagggcagcggccggcactaccgcgctgcgatttgcgcagagctgaagaagcccctgaccattgaagaggtggcccccgccccgtcgggcctcacgaggtcagagttgatgtccatttctgtggagttaactttggtgatattttgatctgccgtgatcaatatcaggaaaggccccatcttcccttcacacctggaatggacttttctgggacagtattggagacaggcacagatgtcaggacagttaaagagggagatagagttattggcacaagaaactttaattgtatggctgaagaatgcgtcactgaccagaaggacctgtggcagattccagaaaaggtctccctataagaagctgctgtcctccctataacttatggcactgcgatttttgctcttgagcattgggcccgtacccagcctgggtaatatagctgctgctggaagtgacgagaagtgcaagctggcgatgcagaggggtgcgcagtccagcgtgaactacagtcagggcagcctgaaggatgcacctggcatgggagggcaggattgtggtggtgggatttgctggaggaaacattgcttctgaaccagccaaccttctgctcctgaagaatatctctgctatgggcctgtactgtggtcaatacaaagatatgaactttcccgtcttctccaagagcctatcttcagtgcttcagtactgccagcaagggtgcatccagctatatgtcagaatggttttcaagctggacgaggaagataaaataactgcacaacttactcaaaacccaggacaaattcagagagtcaaggatggaactttgggctccccagaggctgccccagacacgagggaaggccacagcaccctcaaaggatccagaccgagggtttcggagagatggacatcatcggcctgtccctcactcttggcacaatggagagaggtttcaccaatggcaagacaaccgtgggagcccccagccacagcaggagcccagggcagaccatcagcagcagccccattatgcatccaggccaggggactggcatcagcctgtgtctggagttgactattacgaaggtggttatcgcaatcagttgtattcaaggccaggttatgagaattcatatcagagctatcagtctcccacaatgagggaggaatatgcttatggaagttattactatcatggacacccacagtggctgcaggaagaaagagtgccaaggcaacggagtccttatatctggcacgaagattaccgagagcaaaagtaccttgatgaacatcattatgaaaaccagcacagtccatttggaacaaatagtgagacccacttccaatctaacagtaggaacccttgtaaagacagccctgcttccaactctggacaggagtggccgggggagctgtttccagggagcctgcttgctgaggcccagaaaaataagccatcattggctagtgagtccaaccttctccagcagcgtgagtctggtctcagctccagcagctatgagctcagtcagtacatcagagatgccccggagcgggatgatcccccagcttcagcagcttggagtccagttcaggctggtgggttctaaaatgatcagaagagttgattgaatctgatgtggaagggctgggtggcaagtctctgggaaagtcagccttangatggatcattgtccacctcatttgcttatgtaggtcacctgggcagagaggtcaactttggttccattttctctctttttgcttgtaatagtaattgcatcatagctgattcctggaagggaacactgcccctatccattatcaagttgggaaaggaggcactcagtggtgcttttaagaaagggaagaccagagagaattaggaaaagcaaaagcaagatgcaaagcttcattgctttgtctggatgtaggaactttgtcatgagtatagaggccatgaaagccagagactccttggcctctcagcatcactgagagtctgggctgagagcattatcatttggactgaatcatcaagcccacgcattgtattctgacaccttctcagaggcttaaatctgactggagcagggaacatgggcttcttctaattacacaacccacccagaatcttattttggttcaggcagaatttgggcagaaatacatctgtggcatattcctaaactaaagaaaagtgatggaagtaacgctaacaatgtccatctgtgtctgttggtcagaagatgtctcctcagctggtcccaaagcacccatgaagttctacatccctcatgttcctgtgagtttcgggccaggaggtcagctggtgcatgtaggtcccagctctcccactgacgggcaagcagcccttgttgaactgcacagcatggaggtaaagaagacccagtgtccctggaatgctggcacactgcttacccaactactcctaacatgcttaccttgctttcctgtgcctgagccggggcatctccaggaatgggatgctcttgcgggaaactgggccatgtaccccctggattaggagggtgcaggaatgggtggggctcttctctgaaagaattgatgctacagttgtgtttttcctgagatgtcaatgtctcatctttagcaacaaaattcacttttttctttctgctttctccacaaggccttgagccatatcctagccccacggccttggggtctgacactagacttgactgaaaggggcctagggtggccacagtcttaaacacaaaatctnattgttttattccaggttattcttaatgattccgaagagcaagaggagatgagaagtttctcaggacccttgattagggaagatgtacataaggtggatattatgacgttttgccagcagaaagcagctcagagctgcaaatctgagacactggggagcagagactcagctctactgtggcagctcttggttctcctttgtcgccagaatgggtccatggtggggtctgacatcgctgagctgctaatgcaagactgcaagaagctggagaagtacaagcggcagccccctgtggccaacctcatcaacctgaccgatgaggactggccagtgctgagctctgggaccccgaacctgctcacgggagagatcccccccagtgtggagacacctgcgcagatcgtggagaaattcactaggctgctctactatggaaggaagaaggaagccttggagtgggccatgaagaaccacttgtggggccatgctttgttcctgtccagcaagatggacccacagacctacagctgggtcatgagtggcttcaccagcacgctggcgctcaatgacccactgcagaccctcttccagctcatgtcggggaggattccacaggcagccacgtgttcttcttcctccacctgccttaaaaggggctgttcctctttacaacccatctcaggtgcctcagctgcccacggccactagcctgaatcggccaaatcgcctagctcagcgtcgctatcccacccagccatgctgagaataaacacacgtcccaggctcatctcccaggactgaaactttcttgctctctttttctcaatctcccagcccctctctaccatattgggaccctcaagaggtttgtgctagcccgatgcctccaccgggcacttagaaggcaagaggacaggatctctcaagacacagcacaattcagtctcttaagattaacttcacaatgatggaaattatttcatcaggtggaaagtctgggtctaatagcagactgcacatgagcagagtgacatggtggtggcacttatggtggtggcttgagagccttggggaaattagggccctaacagctagaatcaaagatgataccgcagggccctgtagcaagaaatgggaagcagggggaggggcaggggctcagaacaatattctagaccaactttgactacttcctgtcttagtaatagaccaatacatggctctatttagcaaagtttttatactgaaacttgattattgctgccctttataatttcctcttcaatgatatttcagcagtttccctcttggtcctagttttgtgcacatttttttgaatgtggttcagattaattatatttctctcactttcttagctggtcctattttttcacattctggcatgtggctatcaagttagattgctgtaggcatcatattgtcatggtaactactgaacctaatgatgcagatggatggcacatcagtataataaatgatggaaaacggttcctaaaaattcatccctttcataagaggggaagaatgagtgcctgatattgttaatacctccctttctacctcaggcctttgcaaattgatgttcagagggtcactggagtgagagggaggaggggggcgtcttggaaatttccatttctcttttcaaacccaaaataggaatgactcttgctgtttgtcagatttgctgaaaattgctcctcacaaagaacatttttttttgtacatgtaattgtaaatacaggtttagtacgttaatgttctatagttctgatattgataataattaaacccagataattttatagcaaaagctt

SEQ ID NO: 31897 - DNA, 6350 bp, Homo sapiens
  misc_feature (1978)..(1978): n is a, c, g, or t
  misc_feature (3066)..(3066): n is a, c, g, or t
acctccagagaggcccaacagggagctcgcgcggtcgtttggtctcggcggccgtagaagccgggcgcactggaccggagctgccccgccggggttgggtcgtggctgccagggcgcgtcgccaggaggcctcgcgggccgcccttccgctctcccggggctgggcggcgctgtccggctcttcctgccgcgctctggccactccccctcgcccctcgctgggcttggccttggcggccgtgctctgcaggcagtgcctccctcgggcgtgggtctgcaggagagccggacagggcagcggccggcactaccgcgctgcgatttgcgcagagctgaagaagcccctgaccattgaagaggtggcccccgccccgtcgggcctcacgaggtcagagttgatgtccatttctgtggagttaactttggtgatattttgatctgccgtgatcaatatcaggaaaggccccatcttcccttcacacctggaatggacttttctgggacagtattggagacaggcacagatgtcaggacagttaaagagggagatagagttattggcacaagaaactttaattgtatggctgaagaatgcgtcactgaccagaaggacctgtggcagattccagaaaaggtctccctataagaagctgctgtcctccctataacttatggcactgcgatttttgctcttgagcattgggcccgtacccagcctgggtaatatagctgctgctggaagtgacgagaagtgcaagctggcgatgcagaggggtgcgcagtccagcgtgaactacagtcagggcagcctgaaggatgcacctggcatgggagggcaggattgtggtggtgggatttgctggaggaaacattgcttctgaaccagccaaccttctgctcctgaagaatatctctgctatgggcctgtactgtggtcaatacaaagatatgaactttcccgtcttctccaagagcctatcttcagtgcttcagtactgccagcaagggtgcatccagctatatgtcagaatggttttcaagctggacgaggaagataaaataactgcacaacttactcaaaacccaggacaaattcagagagtcaaggatggaactttgggctccccagaggctgccccagacacgagggaaggccacagcaccctcaaaggatccagaccgagggtttcggagagatggacatcatcggcctgtccctcactcttggcacaatggagagaggtttcaccaatggcaagacaaccgtgggagcccccagccacagcaggagcccagggcagaccatcagcagcagccccattatgcatccaggccaggggactggcatcagcctgtgtctggagttgactattacgaaggtggttatcgcaatcagttgtattcaaggccaggttatgagaattcatatcagagctatcagtctcccacaatgagggaggaatatgcttatggaagttattactatcatggacacccacagtggctgcaggaagaaagagtgccaaggcaacggagtccttatatctggcacgaagattaccgagagcaaaagtaccttgatgaacatcattatgaaaaccagcacagtccatttggaacaaatagtgagacccacttccaatctaacagtaggaacccttgtaaagacagccctgcttccaactctggacaggagtggccgggggagctgtttccagggagcctgcttgctgaggcccagaaaaataagccatcattggctagtgagtccaaccttctccagcagcgtgagtctggtctcagctccagcagctatgagctcagtcagtacatcagagatgccccggagcgggatgatcccccagcttcagcagcttggagtccagttcaggctggtgggttctaaaatgatcagaagagttgattgaatctgatgtggaagggctgggtggcaagtctctgggaaagtcagccttangatggatcattgtccacctcatttgcttatgtaggtcacctgggcagagaggtcaactttggttccattttctctctttttgcttgtaatagtaattgcatcatagctgattcctggaagggaacactgcccctatccattatcaagttgggaaaggaggcactcagtggtgcttttaagaaagggaagaccagagagaattaggaaaagcaaaagcaagatgcaaagcttcattgctttgtctggatgtaggaactttgtcatgagtatagaggccatgaaagccagagactccttggcctctcagcatcactgagagtctgggctgagagcattatcatttggactgaatcatcaagcccacgcattgtattctgacaccttctcagaggcttaaatctgactggagcagggaacatgggcttcttctaattacacaacccacccagaatcttattttggttcaggcagaatttgggcagaaatacatctgtggcatattcctaaactaaagaaaagtgatggaagtaacgctaacaatgtccatctgtgtctgttggtcagaagatgtctcctcagctggtcccaaagcacccatgaagttctacatccctcatgttcctgtgagtttcgggccaggaggtcagctggtgcatgtaggtcccagctctcccactgacgggcaagcagcccttgttgaactgcacagcatggaggtaaagaagacccagtgtccctggaatgctggcacactgcttacccaactactcctaacatgcttaccttgctttcctgtgcctgagccggggcatctccaggaatgggatgctcttgcgggaaactgggccatgtaccccctggattaggagggtgcaggaatgggtggggctcttctctgaaagaattgatgctacagttgtgtttttcctgagatgtcaatgtctcatctttagcaacaaaattcacttttttctttctgctttctccacaaggccttgagccatatcctagccccacggccttggggtctgacactagacttgactgaaaggggcctagggtggccacagtcttaaacacaaaatctnattgttttattccaggttattcttaatgattccgaagagcaagaggagatgagaagtttctcaggacccttgattagggaagatgtacataaggtggatattatgacgttttgccagcagaaagcagctcagagctgcaaatctgagacactggggagcagagactcagctctactgtggcagctcttggttctcctttgtcgccagaatgggtccatggtggggtctgacatcgctgagctgctaatgcaagactgcaagaagctggagaagtacaagcggcagccccctgtggccaacctcatcaacctgaccgatgaggactggccagtgctgagctctgggaccccgaacctgctcacgggagagatcccccccagtgtggagacacctgcgcagatcgtggagaaattcactaggctgctctactatggaaggaagaaggaagccttggagtgggccatgaagaaccacttgtggggccatgctttgttcctgtccagcaagatggacccacagacctacagctgggtcatgagtggcttcaccagcacgctggcgctcaatgacccactgcagaccctcttccagctcatgtcggggaggattccacaggcagccacgtgttgtggagaaaagcagtggggagactggaggcctcacttggctgtgattctgtcgaatcaggctggggacccagagctgtatcagcgtgcgattgttgccattggggacaccctggctgggaaggggcttgtggaggcagctcacttctgctatctcatggctcacgtgccctttggccactacaccgtgaagacagaccatctggtcttgctgggcagcagccacagtcaagagtttttgaaatttgcaacaactgaggcaatccagaggacggaaatcttcgagtactgtcagatgctgggccgccccaaatccttcatcccttctttccaggtgtataagctcctttatgcttcccgtctggcagattatggcctcgtgtcccaggctttgcattactgcgaagccattggtgcagctgtcttgagccagggagagagcagtcaccctgtgctattagtggaactcatcaagctagcagagaaactgaagctgtcagatcctctggttttagaaagacgcagtggagacagggacctggagccagattggctagcgcaacttcggaggcagctggagcaaaaggtagcaggagacattggggatcctcatcctactcgctcagatatttcgggagccggaggaacaacaacagaaaacactttctaccaggacttttctggatgtcaaggctactctgaagcccctgggtaccgctcagctctgtggctgacacctgagcagacctgcctgctccagcccagcccacagcagccctttcccctccagccgggctcctacccagcaggagggggtgcagggcagacagggacaccgaggcctttttactcagttcctgagacccatctaccagggactggcagcagcgtggcagtgacagaggccactggaggaacagtctgggaggaaatgctgcagacacacctgggccctggagagaacacagtgtctcaagaaacttcccagcctcctgatggccaagaggtcatttccaaaccacagacaccattggctgctagagcacgaagtatttctgagagttccgccagttcagccaaggaggatgagaaggagtcctctgatgaggctgataaaaactctccccgaaatactgcccagagaggcaagctcggagatgggaaggagcatacaaagagctcagggtttggctggttcagctggtttcgatcgaagcccaccaagaacgcatcccccgctggagacgaggactcctcagacagccctgactctgaggagacccccagagcatcttctccccaccaggctggcctgggcctctcactgacaccttcccctgagtccccacctctgccggatgttagtgccttctccaggggcagaggtgggggtgaaggccgaggatccgcatccagcgggggagcagctgcgggcgctggggttggaggcttgtctggaccagagagtgtttcctttgagctctgctccaaccctggtgttcttcttcctccacctgccttaaaaggggctgttcctctttacaacccatctcaggtgcctcagctgcccacggccactagcctgaatcggccaaatcgcctagctcagcgtcgctatcccacccagccatgctgagaataaacacacgtcccaggctcatctcccaggactgaaactttcttgctctctttttctcaatctcccagcccctctctaccatattgggaccctcaagaggtttgtgctagcccgatgcctccaccgggcacttagaaggcaagaggacaggatctctcaagacacagcacaattcagtctcttaagattaacttcacaatgatggagagtgacatggtggtggcacttatggtggtggcttgagagccttggggaaattagggccctaacagctagaatcaaagatgataccgcagggccctgtagcaagaaatgggaagcagggggaggggcaggggctcagaacaatattctagaccaactttgactacttcctgtcttagtaatagaccaatacatggctctatttagcaaagtttttatactgaaacttgattattgctgccctttataatttcctcttcaatgatatttcagcagtttccctcttggtcctagttttgtgcacatttttttgaatgtggttcagattaattatatttctctcactttcttagctggtcctattttttcacattctggcatgtggctatcaagttagattgctgtaggcatcatattgtcatggtaactactgaacctaatgatgcagatggatggcacatcagtataataaatgatggaaaacggttcctaaaaattcatccctttcataagaggggaagaatgagtgcctgatattgttaatacctccctttctacctcaggcctttgcaaattgatgttcagagggtcactggagtgagagggaggaggggggcgtcttggaaatttccatttctcttttcaaacccaaaataggaatgactcttgctgtttgtcagatttgctgaaaattgctcctcacaaagaacatttttttttgtacatgtaattgtaaatacaggtttagtacgttaatgttctatagttctgatattgataataattaaacccagataattttatagcaaaagctt

SEQ ID NO: 31898 - DNA, 3067 bp, Homo sapiens
acctccagagaggcccaacagggagctcgcgcggtcgtttggtctcggcggccgtagaagccgggcgcactggaccggagctgccccgccggggttgggtcgtggctgccagggcgcgtcgccaggaggcctcgcgggccgcccttccgctctcccggggctgggcggcgctgtccggctcttcctgccgcgctctggccactccccctcgcccctcgctgggcttggccttggcggccgtgctctgcaggcagtgcctccctcgggcgtgggtctgcaggagagccggacagggcagcggccggcactaccgcgctgcgatttgcgcagagctgaagaagcccctgaccattgaagaggtggcccccgccccgtcgggcctcacgaggtcagagttgatgtccatttctgtggagttaactttggtgatattttgatctgccgtgatcaatatcaggaaaggccccatcttcccttcacacctggaatggacttttctgggacagtattggagacaggcacagatgtcaggacagttaaagagggagatagagttattggcacaagaaactttaattgtatggctgaagaatgcgtcactgaccagaaggacctgtggcagattccagaaaaggtctccctataagaagctgctgtcctccctataacttatggcactgcgatttttgctcttgagcattgggcccgtacccagcctgggtaatatagctgctgctggaagtgacgagaagtgcaagctggcgatgcagaggggtgcgcagtccagcgtgaactacagtcagggcagcctgaaggatgcacctggcatgggagggcaggattgtggtggtgggatttgctggaggaaacattgcttctgaaccagccaaccttctgctcctgaagaatatctctgctatgggcctgtactgtggtcaatacaaagatatgaactttcccgtcttctccaagagcctatcttcagtgcttcagtactgccagcaagggtgcatccagctatatgtcagaatggttttcaagctggacgaggtcaatgatgccttccttcatgtgatacaggggaaatccgtgggcaaggtgcttctcgctcttaaataaatccttgcctgagcagcaaagttaacatgtccagatcaaaactccacatctttccccaaaacctgatttcccttctgtgtttccaaaggtgttaccactttccttactaatccaggtttaaaatcttggagtcacctttgattctgtttactaattgctcctaattaatatgattatatagtttattgtccaaaccttttcgagagtaaaagggtgccattagtaattacatcaggaaaacatatcccaggcaaaccaggatatatggtcagcctacttgatgcattatgaaatgcggtgattgccgagttctgtcattctcacctctaagatatctctcatgtccatatcctcttttccattctgactaattaagcctcaactgctattaccagtgaccttctaactgcttttcctacctttaagctattctcaccccctccatccttgtgatgcattattgccatcgtgatcttcccgaagcatagctctgactatggcccatctcagaaaacctacagtggctcaccattgcctgatggtggagttcagagcccttgagctagcatttcattatgaccgtgatttttccccgcaccactttccagccttgtggtccacaattccactgggccttaagtatgtactgaactttcctgcctccctcattttgctctgcttgtgcaattttttccaccctccatctctgtcaaacgtaagccttcctgacctctaagacctacctttgtcatgtacctttaccctcaggcaaggagcaatctcttctcttcctcttctaccttgctgtagcttctccccaaggatttatcacattctgccttgaatcatagggaacagcatgtgtagtggaatgaacacaggcctctgaatccaagatacgagtttaaatcccagctttggaggtggttacttaaagtctcagtgccttcattcttcttcctatataaagtagatattacaatatctaacttacagagtcattgggagctatacatgcagcgattgggtaaagcacctggcacatggcaagcgattagcaaatgctggttacttctacttctttctcttcccttttcccagtctatcataatttccttgagagcaggcaccatgtcttatttacccttgtatttcccacagtacttcccatagtgagttacccttagtaaatactcagtaagttgaattgaatttaaattacctgtaagtcttaaaatgtgggattaaattaagaatatattgtcctggaaatacccaaatgtctattgatggatgaatggataaacaaaatgtggtatacacataatggaatattattcagccttaaaaaggaatgaaattctgacatgtgctacaatatgatgaacctggaagacattatatgtgaaataagccagacagaaaaggacaaatactatatgattccacttatatgaagtacctagagtagtgtaattcatagaaacagaaagtacaggttgacatccaaaatctgaaatgagaaatgctccaaaaactgaaactttttcaatgccgacacgatgctcaaagaaaatgctaattggagcatttcagattttggatttttggatttgggatgctcaactggcataatgtgaatattccaaactctgaaaaaatctgaagtctaaaacacttctggtctcaaggattttggataaaggatactcaatgtgcaacatgtagaatggtggttgcaaggtgggaggagagaatggagagttactgtttaatgatacaatgtttccgtttgggaagatggaaagttttggagatgtgtgatggttatggttgcgcaacaatgggaaggtacttagtactgcttaactgtgcacacttaaaaatggtaaaaatgataaattttgtgtatgtcttaaaacaataaaagaagttttttaaaaaaaca

SEQ ID NO: 31899 - DNA, 2832 bp, Homo sapiens
acctccagagaggcccaacagggagctcgcgcggtcgtttggtctcggcggccgtagaagccgggcgcactggaccggagctgccccgccggggttgggtcgtggctgccagggcgcgtcgccaggaggcctcgcgggccgcccttccgctctcccggggctgggcggcgctgtccggctcttcctgccgcgctctggccactccccctcgcccctcgctgggcttggccttggcggccgtgctctgcaggcagtgcctccctcgggcgtgggtctgcaggagagccggacagggcagcggccggcactaccgcgctgcgatttgcgcagagctgaagaagcccctgaccattgaagaggtggcccccgccccgtcgggcctcacgaggtcagagttgatgtccatttctgtggagttaactttggtgatattttgatctgccgtgatcaatatcaggaaaggccccatcttcccttcacacctggtaatatagctgctgctggaagtgacgagaagtgcaagctggcgatgcagaggggtgcgcagtccagcgtgaactacagtcagggcagcctgaaggatgcacctggcatgggagggcaggattgtggtggtgggatttgctggaggaaacattgcttctgaaccagccaaccttctgctcctgaagaatatctctgctatgggcctgtactgtggtcaatacaaagatatgaactttcccgtcttctccaagagcctatcttcagtgcttcagtactgccagcaagggtgcatccagctatatgtcagaatggttttcaagctggacgaggtcaatgatgccttccttcatgtgatacaggggaaatccgtgggcaaggtgcttctcgctcttaaataaatccttgcctgagcagcaaagttaacatgtccagatcaaaactccacatctttccccaaaacctgatttcccttctgtgtttccaaaggtgttaccactttccttactaatccaggtttaaaatcttggagtcacctttgattctgtttactaattgctcctaattaatatgattatatagtttattgtccaaaccttttcgagagtaaaagggtgccattagtaattacatcaggaaaacatatcccaggcaaaccaggatatatggtcagcctacttgatgcattatgaaatgcggtgattgccgagttctgtcattctcacctctaagatatctctcatgtccatatcctcttttccattctgactaattaagcctcaactgctattaccagtgaccttctaactgcttttcctacctttaagctattctcaccccctccatccttgtgatgcattattgccatcgtgatcttcccgaagcatagctctgactatggcccatctcagaaaacctacagtggctcaccattgcctgatggtggagttcagagcccttgagctagcatttcattatgaccgtgatttttccccgcaccactttccagccttgtggtccacaattccactgggccttaagtatgtactgaactttcctgcctccctcattttgctctgcttgtgcaattttttccaccctccatctctgtcaaacgtaagccttcctgacctctaagacctacctttgtcatgtacctttaccctcaggcaaggagcaatctcttctcttcctcttctaccttgctgtagcttctccccaaggatttatcacattctgccttgaatcatagggaacagcatgtgtagtggaatgaacacaggcctctgaatccaagatacgagtttaaatcccagctttggaggtggttacttaaagtctcagtgccttcattcttcttcctatataaagtagatattacaatatctaacttacagagtcattgggagctatacatgcagcgattgggtaaagcacctggcacatggcaagcgattagcaaatgctggttacttctacttctttctcttcccttttcccagtctatcataatttccttgagagcaggcaccatgtcttatttacccttgtatttcccacagtacttcccatagtgagttacccttagtaaatactcagtaagttgaattgaatttaaattacctgtaagtcttaaaatgtgggattaaattaagaatatattgtcctggaaatacccaaatgtctattgatggatgaatggataaacaaaatgtggtatacacataatggaatattattcagccttaaaaaggaatgaaattctgacatgtgctacaatatgatgaacctggaagacattatatgtgaaataagccagacagaaaaggacaaatactatatgattccacttatatgaagtacctagagtagtgtaattcatagaaacagaaagtacaggttgacatccaaaatctgaaatgagaaatgctccaaaaactgaaactttttcaatgccgacacgatgctcaaagaaaatgctaattggagcatttcagattttggatttttggatttgggatgctcaactggcataatgtgaatattccaaactctgaaaaaatctgaagtctaaaacacttctggtctcaaggattttggataaaggatactcaatgtgcaacatgtagaatggtggttgcaaggtgggaggagagaatggagagttactgtttaatgatacaatgtttccgtttgggaagatggaaagttttggagatgtgtgatggttatggttgcgcaacaatgggaaggtacttagtactgcttaactgtgcacacttaaaaatggtaaaaatgataaattttgtgtatgtcttaaaacaataaaagaagttttttaaaaaaaca

SEQ ID NO: 31900 - DNA, 2549 bp, Homo sapiens
agtcactgaatcaaatcctaatatttactgagcagcctttacgacttaggtacatacactcaatctgtaagtcactgttatctcttttttaggacctgtggcagattccagaaaaggtctccctataagaagctgctgtcctccctataacttatggcactgcgatttttgctcttgagcattgggcccgtacccagcctgggtaatatagctgctgctggaagtgacgagaagtgcaagctggcgatgcagaggggtgcgcagtccagcgtgaactacagtcagggcagcctgaaggatgcacctggcatgggagggcaggattgtggtggtgggatttgctggaggaaacattgcttctgaaccagccaaccttctgctcctgaagaatatctctgctatgggcctgtactgtggtcaatacaaagatatgaactttcccgtcttctccaagagcctatcttcagtgcttcagtactgccagcaagggtgcatccagctatatgtcagaatggttttcaagctggacgaggtcaatgatgccttccttcatgtgatacaggggaaatccgtgggcaaggtgcttctcgctcttaaataaatccttgcctgagcagcaaagttaacatgtccagatcaaaactccacatctttccccaaaacctgatttcccttctgtgtttccaaaggtgttaccactttccttactaatccaggtttaaaatcttggagtcacctttgattctgtttactaattgctcctaattaatatgattatatagtttattgtccaaaccttttcgagagtaaaagggtgccattagtaattacatcaggaaaacatatcccaggcaaaccaggatatatggtcagcctacttgatgcattatgaaatgcggtgattgccgagttctgtcattctcacctctaagatatctctcatgtccatatcctcttttccattctgactaattaagcctcaactgctattaccagtgaccttctaactgcttttcctacctttaagctattctcaccccctccatccttgtgatgcattattgccatcgtgatcttcccgaagcatagctctgactatggcccatctcagaaaacctacagtggctcaccattgcctgatggtggagttcagagcccttgagctagcatttcattatgaccgtgatttttccccgcaccactttccagccttgtggtccacaattccactgggccttaagtatgtactgaactttcctgcctccctcattttgctctgcttgtgcaattttttccaccctccatctctgtcaaacgtaagccttcctgacctctaagacctacctttgtcatgtacctttaccctcaggcaaggagcaatctcttctcttcctcttctaccttgctgtagcttctccccaaggatttatcacattctgccttgaatcatagggaacagcatgtgtagtggaatgaacacaggcctctgaatccaagatacgagtttaaatcccagctttggaggtggttacttaaagtctcagtgccttcattcttcttcctatataaagtagatattacaatatctaacttacagagtcattgggagctatacatgcagcgattgggtaaagcacctggcacatggcaagcgattagcaaatgctggttacttctacttctttctcttcccttttcccagtctatcataatttccttgagagcaggcaccatgtcttatttacccttgtatttcccacagtacttcccatagtgagttacccttagtaaatactcagtaagttgaattgaatttaaattacctgtaagtcttaaaatgtgggattaaattaagaatatattgtcctggaaatacccaaatgtctattgatggatgaatggataaacaaaatgtggtatacacataatggaatattattcagccttaaaaaggaatgaaattctgacatgtgctacaatatgatgaacctggaagacattatatgtgaaataagccagacagaaaaggacaaatactatatgattccacttatatgaagtacctagagtagtgtaattcatagaaacagaaagtacaggttgacatccaaaatctgaaatgagaaatgctccaaaaactgaaactttttcaatgccgacacgatgctcaaagaaaatgctaattggagcatttcagattttggatttttggatttgggatgctcaactggcataatgtgaatattccaaactctgaaaaaatctgaagtctaaaacacttctggtctcaaggattttggataaaggatactcaatgtgcaacatgtagaatggtggttgcaaggtgggaggagagaatggagagttactgtttaatgatacaatgtttccgtttgggaagatggaaagttttggagatgtgtgatggttatggttgcgcaacaatgggaaggtacttagtactgcttaactgtgcacacttaaaaatggtaaaaatgataaattttgtgtatgtcttaaaacaataaaagaagttttttaaaaaaaca

SEQ ID NO: 31901 - DNA, 2488 bp, Homo sapiens
agtgatggtaaggtgatctaggatgaaaacaggacatgagggagaggagaaggcggtgaaggaagatatgccaatgtcttcaaacgacaaggcggagtgactgggaagtgaaaatggatgaggaagaatggagaagcagacagcttatgatagaagccccaggggtgtggggctggatgcaggtggggatattctgggagcactgggcttggcataaatgaaaaccagacagtctctcccagagggatccacctctttgtcttgactggattgtcctcaagacaaagagaaagcacccctataatcagcatcaaaaggggtcatgattcttcttggaggaggcaggatggtgtcattcactacaaagatatgaactttcccgtcttctccaagagcctatcttcagtgcttcagtactgccagcaagggtgcatccagctatatgtcagaatggttttcaagctggacgaggtcaatgatgccttccttcatgtgatacaggggaaatccgtgggcaaggtgcttctcgctcttaaataaatccttgcctgagcagcaaagttaacatgtccagatcaaaactccacatctttccccaaaacctgatttcccttctgtgtttccaaaggtgttaccactttccttactaatccaggtttaaaatcttggagtcacctttgattctgtttactaattgctcctaattaatatgattatatagtttattgtccaaaccttttcgagagtaaaagggtgccattagtaattacatcaggaaaacatatcccaggcaaaccaggatatatggtcagcctacttgatgcattatgaaatgcggtgattgccgagttctgtcattctcacctctaagatatctctcatgtccatatcctcttttccattctgactaattaagcctcaactgctattaccagtgaccttctaactgcttttcctacctttaagctattctcaccccctccatccttgtgatgcattattgccatcgtgatcttcccgaagcatagctctgactatggcccatctcagaaaacctacagtggctcaccattgcctgatggtggagttcagagcccttgagctagcatttcattatgaccgtgatttttccccgcaccactttccagccttgtggtccacaattccactgggccttaagtatgtactgaactttcctgcctccctcattttgctctgcttgtgcaattttttccaccctccatctctgtcaaacgtaagccttcctgacctctaagacctacctttgtcatgtacctttaccctcaggcaaggagcaatctcttctcttcctcttctaccttgctgtagcttctccccaaggatttatcacattctgccttgaatcatagggaacagcatgtgtagtggaatgaacacaggcctctgaatccaagatacgagtttaaatcccagctttggaggtggttacttaaagtctcagtgccttcattcttcttcctatataaagtagatattacaatatctaacttacagagtcattgggagctatacatgcagcgattgggtaaagcacctggcacatggcaagcgattagcaaatgctggttacttctacttctttctcttcccttttcccagtctatcataatttccttgagagcaggcaccatgtcttatttacccttgtatttcccacagtacttcccatagtgagttacccttagtaaatactcagtaagttgaattgaatttaaattacctgtaagtcttaaaatgtgggattaaattaagaatatattgtcctggaaatacccaaatgtctattgatggatgaatggataaacaaaatgtggtatacacataatggaatattattcagccttaaaaaggaatgaaattctgacatgtgctacaatatgatgaacctggaagacattatatgtgaaataagccagacagaaaaggacaaatactatatgattccacttatatgaagtacctagagtagtgtaattcatagaaacagaaagtacaggttgacatccaaaatctgaaatgagaaatgctccaaaaactgaaactttttcaatgccgacacgatgctcaaagaaaatgctaattggagcatttcagattttggatttttggatttgggatgctcaactggcataatgtgaatattccaaactctgaaaaaatctgaagtctaaaacacttctggtctcaaggattttggataaaggatactcaatgtgcaacatgtagaatggtggttgcaaggtgggaggagagaatggagagttactgtttaatgatacaatgtttccgtttgggaagatggaaagttttggagatgtgtgatggttatggttgcgcaacaatgggaaggtacttagtactgcttaactgtgcacacttaaaaatggtaaaaatgataaattttgtgtatgtcttaaaacaataaaagaagttttttaaaaaaaca

SEQ ID NO: 31902 - DNA, 3013 bp, Homo sapiens
acctccagagaggcccaacagggagctcgcgcggtcgtttggtctcggcggccgtagaagccgggcgcactggaccggagctgccccgccggggttgggtcgtggctgccagggcgcgtcgccaggaggcctcgcgggccgcccttccgctctcccggggctgggcggcgctgtccggctcttcctgccgcgctctggccactccccctcgcccctcgctgggcttggccttggcggccgtgctctgcaggcagtgcctccctcgggcgtgggtctgcaggagagccggacagggcagcggccggcactaccgcgctgcgatttgcgcagagctgaagaagcccctgaccattgaagaggtggcccccgccccgtcgggcctcacgaggtcagagttgatgtccatttctgtggagttaactttggtgatattttgatctgccgtgatcaatatcaggaaaggccccatcttcccttcacacctggaatggacttttctgggacagtattggagacaggcacagatgtcaggacagttaaagagggagatagagttattggcacaagaaactttaattgtatggctgaagaatgcgtcactgaccagaaggacctgtggcagattccagaaaaggtctccctataagaagctgctgtcctccctataacttatggcactgcgatttttgctcttgagcattgggcccgtacccagcctgggtaatatagctgctgctggaagtgacgagaagtgcaagctggcgatgcagaggggtgcgcagtccagcgtgaactacagtcagggcagcctgaaggatgcacctggcatgggagggcaggattgtggtggtgggatttgctggaggaaacattgcttctgaaccagccaaccttctgctcctgaagaatatctctgctatgggcctgtactgtggtcaatacaaagatatgaactttcccgtcttctccaagagcctatcttcagtgcttcagtactgccagcaagggtgcatccagctatatgtcagaatggttttcaagctggacgaggtcaatgatgccttccttcatgtgatacaggggaaatccgtgggcaaggtgcttctcgctcttaaataaatccttgcctgagcagcaaagttaacatgtccagatcaaaactccacatctttccccaaaacctgatttcccttctgtgtttccaaaggtgttaccactttccttactaatccaggtttaaaatcttggagtcacctttgattctgtttactaattgctcctaattaatatgattatatagtttattgtccaaaccttttcgagagtaaaagggtgccattagtaattacatcaggaaaacatatcccaggcaaaccaggatatatggtcagcctacttgatgcattatgaaatgcggtgattgccgagttctgtcattctcacctctaagatatctctcatgtccatatcctcttttccattctgactaattaagcctcaactgctattaccagtgaccttctaactgcttttcctacctttaagctattctcaccccctccatccttgtgatgcattattgccatcgtgatcttcccgaagcatagctctgactatggcccatctcagaaaacctacagtggctcaccattgcctgatggtggagttcagagcccttgagctagcatttcattatgaccgtgatttttccccgcaccactttccagccttgtggtccacaattccactgggccttaagtatgtactgaactttcctgcctccctcattttgctctgcttgtgcaattttttccaccctccatctctgtcaaacgtaagccttcctgacctctaagacctacctttgtcatgtacctttaccctcaggcaaggagcaatctcttctcttcctcttctaccttgctgtagcttctccccaaggatttatcacattctgccttgaatcatagggaacagcatgtgtagtggaatgaacacaggcctctgaatccaagatacgagtttaaatcccagctttggaggtggttacttaaagtctcagtgccttcattcttcttcctatataaagtagatattacaatatctaacttacagagtcattgggagctatacatgcagcgattggtttctcttcccttttcccagtctatcataatttccttgagagcaggcaccatgtcttatttacccttgtatttcccacagtacttcccatagtgagttacccttagtaaatactcagtaagttgaattgaatttaaattacctgtaagtcttaaaatgtgggattaaattaagaatatattgtcctggaaatacccaaatgtctattgatggatgaatggataaacaaaatgtggtatacacataatggaatattattcagccttaaaaaggaatgaaattctgacatgtgctacaatatgatgaacctggaagacattatatgtgaaataagccagacagaaaaggacaaatactatatgattccacttatatgaagtacctagagtagtgtaattcatagaaacagaaagtacaggttgacatccaaaatctgaaatgagaaatgctccaaaaactgaaactttttcaatgccgacacgatgctcaaagaaaatgctaattggagcatttcagattttggatttttggatttgggatgctcaactggcataatgtgaatattccaaactctgaaaaaatctgaagtctaaaacacttctggtctcaaggattttggataaaggatactcaatgtgcaacatgtagaatggtggttgcaaggtgggaggagagaatggagagttactgtttaatgatacaatgtttccgtttgggaagatggaaagttttggagatgtgtgatggttatggttgcgcaacaatgggaaggtacttagtactgcttaactgtgcacacttaaaaatggtaaaaatgataaattttgtgtatgtcttaaaacaataaaagaagttttttaaaaaaaca

SEQ ID NO: 31903 - DNA, 266 bp, Homo sapiens
gggttaggtggggtgcccctttcttgggacatgttctggataatcagatatcttgtgttcttgatgcaggtaatatagctgctgctggaagtgacgagaagtgcaagctggcgatgcagaggggtgcgcagtccagcgtgaactacagtcagggcagcctgaaggatgcagtaaggaagctggtgggcgagggcggggtgaatgtggccatcgacatggtgggaggagacatctgcctggaggctctccgcaggtgcatggggtgg

SEQ ID NO: 31904 - DNA, 436 bp, Homo sapiens
tcggtacccggtttaccccattctcctgcctcagcccccggagtagccgggaccacaggtgctggccaccacgcctagctaatttttgcatttttagtggagatggggtttcaccatgttgcccaggctggtctcgaactcctgatcgcaaatgatccacccgtctcagcctcccaaagtgctcggcttacaggcatgagtcactgcacccagcctgattcagccttaaaagggaaggatgtaacatgtcatgtgggtgaaccttgaggacattatggtacatgaaatcagccagtcacaaaaggggagatactgtgtgattccacttacatgaggcccctagcgtcaccagattcacacagagagaaagtagaatggtgggtgccaaaggagagggaacagggaattattgattattaggcatggattttcaggt

SEQ ID NO: 31905 - DNA, 432 bp, Homo sapiens
gcacgcaggcacacaagcggctggatgacaagaggggcacatgggcggaggaacacacaagcggctggatggcaggaatacaccaacaggcaccagcaggccatcgactggcgaaacaatgaggagtttggccagggcagtcagaaaagagacaggccgccgagtggcccaaatccagcggaaaaccatctcccttctggttcccccatctgctgagagctacttccaatcaataaaaccctggactaattctccaagcctacgtgtgatcaaattcttccggtatatcaaggcaagaaccctgggatacagaaagccctctgtccttgcaacaaggcaagggggtctaattgagctgactaacacaagctgcctatggacagctaaactgaaagagcactctgtaacacacacccactggggcttcagccg

SEQ ID NO: 31906 - DNA, 920 bp, Homo sapiens
gtttcctactcacattgtggctgtatgagaacacgatgggactgctttgctgttctctttactctgtccttggagaggtgtgaaaagctgtattgctacaggcaatttatttaataattggaagccatattgataatggatgtggtaatatttgtaaagtttaatctactttaagcggcagtaactaatggaatttttttccttgatcacatatgtagcacttttgttactttttaaagatatttatatttgataaatctttttttcattttgagaactcaaaataccaaacagtgaacttgcattctaaagtcaccctgtgatcaccttgtcatctagtagcaaaatgatgaactattcatgcatcaaagaaaattacatctgctggccttgtatgaaaatgatctcttggcatcccgattaaatgacacactgtcactgtgggtaagaggaaagagccttcaatgtagcacgacaggtgcgcctgaaagaggcacaactgctgtggattttctgcctcgctccatctctcctatgtataatgagcccttgtttaaaggggcatgtgggctgggatgttaagcacggcttctttttgtccattacctgaaaacaatttctaagataaaaggaaggtgccatttccttacctcttcacccatcctcctccaccaaatgtattcaacttaaaactgtgagagagagagactgaatgaccttcctcagttttccctttctcattcaggagatactgaatatccgccagtttgtagttggtttccttccacttaaggcacacgctgactgcatcatttccttatctgttaatcctgcttatgtgagtgtgaggaaagtctttgagagggcatgaaagtgccaccttatatatgtctgtgactttaaagagctatatgcagggc

SEQ ID NO: 31907 - DNA, 614 bp, Homo sapiens
gtttaaggggtccaatataaaattagaggtggcacaatctcagctcctgcagcctcgaccccctaggctcaagtgatactcctgcctcggcctccacagtagtaaacttgagtggtttttaaacagatcatacaagcacctggtaaaaaaataaaatgtaagcatgaaagggtaaatagtggaaagacagacgcggctcactcttgatccctgagaactctcatccccaccaaaggtcctcactgcacacagtcttcccatctcactgcacacagtcttcccatctcctccaggggtatttttcacacgcacaattcacacacagaggtctgtgcctatatacccttcctcatgacacagacgaggcagagcccacactttgcctgggaattttctttgcttttttccatgtaataatactgtttggacattgttctgtatctatgcatacacagagtgtctaaagtctggaggctgggcatggtggttcatgcctgtaatcccaacactttgagaggccatggtgggaggatcacttgagcccaggagtttgagaccagcctgggcaacatagcccacacctcatagcaagatctcatctctacaaaaaatac

SEQ ID NO: 31908 - DNA, 380 bp, Homo sapiens
agtactcagtatttacatgatctgtttctgaaaacagatcatgtaagcagaaaactgctattacgagctataataactagtattttcttaaaaagtataccctacgaatccaatgcatatgacaacagtgtttttgacagcacatttttattcaataaatatggtttgtcatattaaattgcatctgtgttttagtggggaaaaaatgatccatgcccttaaataataaaagcacatttaagaatatattataccagtttatccgtttcactgttcattatagcagcaaaaattagaaaatgaccttaatgtccatcaatttgagactgcttaaatggattatggtacatccatgttaaggaatatcacacaaccccagg

SEQ ID NO: 31909 - DNA, 415 bp, Homo sapiens
aatatgatttgcagatattttctgtcattctatatactgtcttttcacattcttgatgatatacttttcagcccaaatgtttttaacttgatggaatacaatttattttttcttttgttgcttgtgctttcagtcatatttgtgaaaactttgcttatcccacattacaaagatttactatttctaagtgatttataattttaccacctacctttaggtctccgatccattttgagttaatttttatgtgcgaggagggagtctaacttgattcttttacatgtggatatttagttgtcccaggaccatttgttgaattaatgcccagaacaagtacatctatatatagagaaagtagattagtggttgtcagagactgcaagaaggggggaattgcagagtgacagcccatagg

SEQ ID NO: 31910 - DNA, 400 bp, Homo sapiens
gagtcgacaacaagggtaggggcactggcacccagaggcaaggaggagtacaggtgggatgaatccagagtgggaggtggagactaccaccaggctatgcaggaccttataaccactttaaaaatttgagaagtctgggtgcagtggctcatgcctgtaatcccagcactttgggaggccaaggcgggcagatcacgaagtcaggagattgagaccatcctggctaacatggtgaaaccctgtgtctactaaaaacacacaaaaattagctgggcgtggtggcgtgccctgtagtcccagctactggggaggctaaggcaggagaatcgcttgaacccgggaggtggagtacagtggtgcaatctctgctcactgcaacctccgtcgacgcggccgcaat

SEQ ID NO: 31911 - DNA, 530 bp, Homo sapiens
ggaaactattcgcccccacagctggcccactgctgagttccccgggaggcttggagcagagggcagtgggcagcagcatcccactgagaactgcagaactctcagcacatgacaactctgtccaaacctctgaactaagagacttgaccaactctagattggcttttagcagcacaaggctgtatccctaggatggccccagcccctcttaaagtgctgtcttgagaaagctcagtgctgccagaaaaatttattatttgttccagccaacacctgatgataggcccctgacctcactttcttagaacatttggctcaaaatggcttgccattgtacatatgtatctcttgcaactcaaaagcatcaggtcttcctttaaaatctagtcatcaaggccaggcatggtggctcacgctgtaatcccagcactttgggaggctgaggcgggcagatcacttgaggccaggagttcaagaccagcttgggcaacatgccaaaactctgtctctactaaaaatacaaaaaaaaa

SEQ ID NO: 31912 - DNA, 911 bp, Homo sapiens
tttctagtaccattccgttccggggcgcgtgcccagtagtgtatggttaaacactggtctatcacccatgtttcactaccgagcatcctgtctcatgacatagttgctttgcctttctcacctaataaaagaagtccggcggaacaggcgatgcgttgtgacaccatgatccagtatggacgttgtctgacgtttcacttagctgggtactctatcgactcagtgcagtctcgacatcggacccttcgcagtatctataacttgacgttacccgatcgggcactttctgtgtctagtcatcttagtctactgtgctgaatacatcaatgaggcggctgcgatgaactggagattattttcgaaataccagtatttcgactccagggggatgttcatttctatagtattttcagccccactgctggtgaatgccatgatcattgtggttatgtgggtatggaagactttgaatgtgatgactgacctgaagaatgcacaagagagaagaaaggaaaagaaaaggagaaggaaagaagactgaggggcagcagctgcttggagtttgcgtccttcccgtccacccagtgcagctcccagtgctgcagtgtgcgtggcgtgggcatccttccagctgactcatggtttgaaaaaccgttgttttatttaaatatccacagtggtagggcacacactgaagttggcttttcagccagcactgaatgtatccatcaggacatgcgtcttcaggtgcctgatctttgtagtcaggctgtgggaacggtctctgcagagcttcataactgggaatttgatttgaagaagtccatgtcatatgtgtaactagtactaattataaatataaaatacacaatataaaatatgaaactcaataataaacagtgccacctgta

SEQ ID NO: 31913 - DNA, 2524 bp, Homo sapiens
atctaaattctaatatgacttgtaccttttttcagtcatcttagtctactgtgctgaatacatcaatgaggcggctgcgatgaactggagattattttcgaaataccagtatttcgactccagggggatgttcatttctatagtattttcagccccactgctggtgaatgccatgatcattgtggttatgtgggtatggaagactttgaatgtgatgactgacctgaagaatgcacaagagagaagaaaggaaaagaaaaggagaaggaaagaagactgaggggcagcagctgcttggagtttgcgtccttcccgtccacccagtgcagctcccagtgctgcagtgtgcgtggcgtgggcatccttccagctgactcatggtttgaaaaaccgttgttttatttaaatatccacagtggtagggcacacactgaagttggcttttcagccagcactgaatgtatccatcaggacatgcgtcttcaggtgcctgatctttgtagtcaggctgtgggaacggtctctgcagagcttcataactgggaatttgatttgaagaagtccatgtcatatgtgtaactagtactaattataaatataaaatacacaatataaaatatgaaactcaataataaacagtgccacctgtacatgggcaccatgccctcctcctcgtgctgtgttttctagtgcatgccacagttcgcagtagagggtgttttcaccttccaagacatggggcaaagtttggagacacctggttgtcactggagggggtggtgctcctggcttctcctgtggagcccggggtgatgcataaaatcctgtgtgcctgggtcagccgcatcacagacaatgacttgacatgaaatgtcagctgtgctggggcagagagaccttggaaggaagctcttggaaaatacgttgtatctcagtttgatgaaccaattcacaagaggctaggccctctctagcaaagttatgggctgctttactgaaaacagaatggaagccctgaagtcaacactccatggagaagcgtgtctttcctaatgtcctggtgttctgttgatttaggtgcttgggaacacaatgctcccagttctgttaggacaggcatactgttactttgcaatatccactttataaaatagctcctgcccagtggctcttggttcctgtcaaatgtggacctgtagtttaagaatgacaggtggttagagacccagatatttaaaaataggtgttcaataagggaatactgattgtgcattgtatctggatagcatgcctaattgtgcatttctgaaagttaccaattcaaaatgtaattggaacagttatctttgattagacaagcctgggaagagaatgttgaggtgcagagctcaccagccaagttcatgcccctctcgggcctttgtggctgagaagtgggacagaaagatgattaaggtaatgtgtcctccctgtagcattgtccagggccgttgtgtagatatttgacttcactgacagaaaagaaaccagggagtttgtagagactgtgcatttttagtataacattttcaccatctgatatggtttggctttgtgtccccacccaaattgcatctcaaattgtaatccccatgtgtcaagggagggacctgatgggaggtgatgggatcatgggggtggtttcccctatgttgttatcataatagagagggagttctcacaagatctgctggttttaaagacagcagtttcccctgctgtcactgtctctctcctgctgccttgtgaagaaggtgcttgtttctccctctgccatgattgtaagtttcccgaggcctccccggccatgtggaactgagtcaattaaacttcttgtttataaagtaatccaggtctcaggtagtatctttatagcagtgtgagaacagactaattaaacatctatatgttatttggacttaatatggggccgtgtgattgaatctcagtttgcctgtgataaagtagtgtaacagtattgctagctttgcatgaatttgatgctgatgacatgtcagtgtgaaaccatgacgtgtggtctttgattttcattctgcatgtgtgtgtctgtgttttggaacagttatattttggttttgtaaaaacaaccttcactttatttttaactgtgtagtaagtttatattcaatgccttaaagtgcattgttaacaattgtcttgatatgttgtcctcattttagggaaagtcatagaagccaaaatgatcagcagttgagtaatttacgaaagcacaggtgcaatcccactttaaagcactgggggttgcacagagcacactggtttcaggctccataaatgtggatgactcactggagagcttcatctgtttaagtagaacaaatgtttttactctactgataaagtacaggaaaggaggtttgggatcaaaattatttttcacattccaaacctgtgacaccttacgtttatcgattgctatgcaataaaatacatctttaataat

SEQ ID NO: 31914 - DNA, 2866 bp, Homo sapiens
tttctagtaccattccgttccggggcgcgtgcccagtagtgtatggttaaacactggtctatcacccatgtttcactaccgagcatcctgtctcatgacatagttgctttgcctttctcacctaataaaagaagtccggcggaacaggcgatgcgttgtgacaccatgatccagtatggacgttgtctgacgtttcacttagctgggtactctatcgactcagtgcagtctcgacatcggacccttcgcagtatctataacttgacgttacccgatcgggcactttctgtgtctagtcatcttagtctactgtgctgaatacatcaatgaggcggctgcgatgaactggagattattttcgaaataccagtatttcgactccagggggatgttcatttctatagtattttcagccccactgctggtgaatgccatgatcattgtggtacgtagatgacactttcagttgtctttcttcatgtgtatgtttttcaaatctaaacatgtctcaaacaattgtgtttaggttatgtgggtatggaagactttgaatgtgatgactgacctgaagaatgcacaagagagaagaaaggaaaagaaaaggagaaggaaagaagactgaggggcagcagctgcttggagtttgcgtccttcccgtccacccagtgcagctcccagtgctgcagtgtgcgtggcgtgggcatccttccagctgactcatggtttgaaaaaccgttgttttatttaaatatccacagtggtagggcacacactgaagttggcttttcagccagcactgaatgtatccatcaggacatgcgtcttcaggtgcctgatctttgtagtcaggctgtgggaacggtctctgcagagcttcataactgggaatttgatttgaagaagtccatgtcatatgtgtaactagtactaattataaatataaaatacacaatataaaatatgaaactcaataataaacagtgccacctgtacatgggcaccatgccctcctcctcgtgctgtgttttctagtgcatgccacagttcgcagtagagggtgttttcaccttccaagacatggggcaaagtttggagacacctggttgtcactggagggggtggtgctcctggcttctcctgtggagcccggggtgatgcataaaatcctgtgtgcctgggtcagccgcatcacagacaatgacttgacatgaaatgtcagctgtgctggggcagagagaccttggaaggaagctcttggaaaatacgttgtatctcagtttgatgaaccaattcacaagaggctaggccctctctagcaaagttatgggctgctttactgaaaacagaatggaagccctgaagtcaacactccatggagaagcgtgtctttcctaatgtcctggtgttctgttgatttaggtgcttgggaacacaatgctcccagttctgttaggacaggcatactgttactttgcaatatccactttataaaatagctcctgcccagtggctcttggttcctgtcaaatgtggacctgtagtttaagaatgacaggtggttagagacccagatatttaaaaataggtgttcaataagggaatactgattgtgcattgtatctggatagcatgcctaattgtgcatttctgaaagttaccaattcaaaatgtaattggaacagttatctttgattagacaagcctgggaagagaatgttgaggtgcagagctcaccagccaagttcatgcccctctcgggcctttgtggctgagaagtgggacagaaagatgattaaggtaatgtgtcctccctgtagcattgtccagggccgttgtgtagatatttgacttcactgacagaaaagaaaccagggagtttgtagagactgtgcatttttagtataacattttcaccatctgatatggtttggctttgtgtccccacccaaattgcatctcaaattgtaatccccatgtgtcaagggagggacctgatgggaggtgatgggatcatgggggtggtttcccctatgttgttatcataatagagagggagttctcacaagatctgctggttttaaagacagcagtttcccctgctgtcactgtctctctcctgctgccttgtgaagaaggtgcttgtttctccctctgccatgattgtaagtttcccgaggcctccccggccatgtggaactgagtcaattaaacttcttgtttataaagtaatccaggtctcaggtagtatctttatagcagtgtgagaacagactaattaaacatctatatgttatttggacttaatatggggccgtgtgattgaatctcagtttgcctgtgataaagtagtgtaacagtattgctagctttgcatgaatttgatgctgatgacatgtcagtgtgaaaccatgacgtgtggtctttgattttcattctgcatgtgtgtgtctgtgttttggaacagttatattttggttttgtaaaaacaaccttcactttatttttaactgtgtagtaagtttatattcaatgccttaaagtgcattgttaacaattgtcttgatatgttgtcctcattttagggaaagtcatagaagccaaaatgatcagcagttgagtaatttacgaaagcacaggtgcaatcccactttaaagcactgggggttgcacagagcacactggtttcaggctccataaatgtggatgactcactggagagcttcatctgtttaagtagaacaaatgtttttactctactgataaagtacaggaaaggaggtttgggatcaaaattatttttcacattccaaacctgtgacaccttacgtttatcgattgctatgcaataaaatacatctttaataat

SEQ ID NO: 31915 - DNA, 1262 bp, Homo sapiens
tttctagtaccattccgttccggggcgcgtgcccagtagtgtatggttaaacactggtctatcacccatgtttcactaccgagcatcctgtctcatgacatagttgctttgcctttctcacctaataaaagaagtccggcggaacaggcgatgcgttgtgacaccatgatccagtatggacgttgtctgacgtttcacttagctgggtactctatcgactcagtgcagtctcgacatcggacccttcgcagtatctataacttgacgttacccgatcgggcactttctgtgtctagtcatcttagtctactgtgctgaatacatcaatgaggcggctgcgatgaactggagattattttcgaaataccagtatttcgactccagggggatgttcatttctatagtattttcagccccactgctggtgaatgccatgatcattgtggttatgtgggtatggaagactttgaatgtgatgactgacctgaagaatgcacaagagagaagaaaggaaaagaaaaggagaaggaaagaagactgaggggcagcagctgcttggagtttgcgtccttcccgtccacccagtgcagctcccagtgctgcagtgtgcgtggcgtgggcatccttccagctgactcatggtttgaaaaaccgttgttttatttaaatatccacagtggtagggcacacactgaagttggcttttcagccagcactgaatgtatccatcaggacatgcgtcttcaggtgcctgatctttgtagtcaggctgtgggaacggtctctgcagagcttcataactgggaatttgatttgaagaagtccatgtcatatgtgtaactagtactaattataaatataaaatacacaatataaaatatgaaactcaataataaacagtgccacctgtaaaaaaaaaaaaaaaaaaccggcacagctcccccttttttagatgatcacatagttctgagcagagatgtggtcctcaaccctgcagttcctgcaggagctgctgctgctgggatggctgctggacagaggcctccatggagcccgctgtgctggtgtcatcagaaagagacgtaaaggaaacccgggatgagagctgctcaacggtcagagttgccaaagctgagctctggccagagttaggagagttcttgagcataaggtcagaagcaggtaagagggggcctagaagttttacaggacagaaagctgatccggttgggatgaaattaaccttgtttttgtcaggacat

SEQ ID NO: 31916 - DNA, 922 bp, Homo sapiens
tttctagtaccattccgttccggggcgcgtgcccagtagtgtatggttaaacactggtctatcacccatgtttcactaccgagcatcctgtctcatgacatagttgctttgcctttctcacctaataaaagaagtccggcggaacaggcgatgcgttgtgacaccatgatccagtatggacgttgtctgacgtttcacttagctgggtactctatcgactcagtgcagtctcgacatcggacccttcgcagtatctataacttgacgttacccgatcgggcactttctgtgtctagtcatcttagtctactgtgctgaatacatcaatgaggcggctgcgatgaactggagattattttcgaaataccagtatttcgactccagggggatgttcatttctatagtattttcagccccactgctggtgaatgccatgatcattgtggttatgtgggtatggaagactttgaatgtgatgactgacctgaagaatgcacaagagagaagaaaggaaaagaaaaggagaaggaaagaagactgaggggcagcagctgcttggagtttgcgtccttcccgtccacccagtgcagctcccagtgctgcagtgtgcgtggcgtgggcatccttccagctgactcatggtttgaaaaaccgttgttttatttaaatatccacagtggtagggcacacactgaagttggcttttcagccagcactgaatgtatccatcaggacatgcgtcttcaggtgcctgatctttgtagtcaggctgtgggaacggtctctgcagagcttcataactgggaatttgatttgaagaagtccatgtcatatgtgtaactagtactaattataaatataaaatacacaattaacgcatatgactccaatatacgcccttcggggcccggtgtgtgtgcgg

SEQ ID NO: 31917 - DNA, 2785 bp, Homo sapiens
tttctagtaccattccgttccggggcgcgtgcccagtagtgtatggttaaacactggtctatcacccatgtttcactaccgagcatcctgtctcatgacatagttgctttgcctttctcacctaataaaagaagtccggcggaacaggcgatgcgttgtgacaccatgatccagtatggacgttgtctgacgtttcacttagctgggtactctatcgactcagtgcagtctcgacatcggacccttcgcagtatctataacttgacgttacccgatcgggcactttctgtgtctagtcatcttagtctactgtgctgaatacatcaatgaggcggctgcgatgaactggagattattttcgaaataccagtatttcgactccagggggatgttcatttctatagtattttcagccccactgctggtgaatgccatgatcattgtggttatgtgggtatggaagactttgaatgtgatgactgacctgaagaatgcacaagagagaagaaaggaaaagaaaaggagaaggaaagaagactgaggggcagcagctgcttggagtttgcgtccttcccgtccacccagtgcagctcccagtgctgcagtgtgcgtggcgtgggcatccttccagctgactcatggtttgaaaaaccgttgttttatttaaatatccacagtggtagggcacacactgaagttggcttttcagccagcactgaatgtatccatcaggacatgcgtcttcaggtgcctgatctttgtagtcaggctgtgggaacggtctctgcagagcttcataactgggaatttgatttgaagaagtccatgtcatatgtgtaactagtactaattataaatataaaatacacaatataaaatatgaaactcaataataaacagtgccacctgtacatgggcaccatgccctcctcctcgtgctgtgttttctagtgcatgccacagttcgcagtagagggtgttttcaccttccaagacatggggcaaagtttggagacacctggttgtcactggagggggtggtgctcctggcttctcctgtggagcccggggtgatgcataaaatcctgtgtgcctgggtcagccgcatcacagacaatgacttgacatgaaatgtcagctgtgctggggcagagagaccttggaaggaagctcttggaaaatacgttgtatctcagtttgatgaaccaattcacaagaggctaggccctctctagcaaagttatgggctgctttactgaaaacagaatggaagccctgaagtcaacactccatggagaagcgtgtctttcctaatgtcctggtgttctgttgatttaggtgcttgggaacacaatgctcccagttctgttaggacaggcatactgttactttgcaatatccactttataaaatagctcctgcccagtggctcttggttcctgtcaaatgtggacctgtagtttaagaatgacaggtggttagagacccagatatttaaaaataggtgttcaataagggaatactgattgtgcattgtatctggatagcatgcctaattgtgcatttctgaaagttaccaattcaaaatgtaattggaacagttatctttgattagacaagcctgggaagagaatgttgaggtgcagagctcaccagccaagttcatgcccctctcgggcctttgtggctgagaagtgggacagaaagatgattaaggtaatgtgtcctccctgtagcattgtccagggccgttgtgtagatatttgacttcactgacagaaaagaaaccagggagtttgtagagactgtgcatttttagtataacattttcaccatctgatatggtttggctttgtgtccccacccaaattgcatctcaaattgtaatccccatgtgtcaagggagggacctgatgggaggtgatgggatcatgggggtggtttcccctatgttgttatcataatagagagggagttctcacaagatctgctggttttaaagacagcagtttcccctgctgtcactgtctctctcctgctgccttgtgaagaaggtgcttgtttctccctctgccatgattgtaagtttcccgaggcctccccggccatgtggaactgagtcaattaaacttcttgtttataaagtaatccaggtctcaggtagtatctttatagcagtgtgagaacagactaattaaacatctatatgttatttggacttaatatggggccgtgtgattgaatctcagtttgcctgtgataaagtagtgtaacagtattgctagctttgcatgaatttgatgctgatgacatgtcagtgtgaaaccatgacgtgtggtctttgattttcattctgcatgtgtgtgtctgtgttttggaacagttatattttggttttgtaaaaacaaccttcactttatttttaactgtgtagtaagtttatattcaatgccttaaagtgcattgttaacaattgtcttgatatgttgtcctcattttagggaaagtcatagaagccaaaatgatcagcagttgagtaatttacgaaagcacaggtgcaatcccactttaaagcactgggggttgcacagagcacactggtttcaggctccataaatgtggatgactcactggagagcttcatctgtttaagtagaacaaatgtttttactctactgataaagtacaggaaaggaggtttgggatcaaaattatttttcacattccaaacctgtgacaccttacgtttatcgattgctatgcaataaaatacatctttaataat

SEQ ID NO: 31918 - DNA, 992 bp, Homo sapiens
tttctagtaccattccgttccggggcgcgtgcccagtagtgtatggttaaacactggtctatcacccatgtttcactaccgagcatcctgtctcatgacatagttgctttgcctttctcacctaataaaagaagtccggcggaacaggcgatgcgttgtgacaccatgatccagtatggacgttgtctgacgtttcacttagctgggtactctatcgactcagtgcagtctcgacatcggacccttcgcagtatctataacttgacgttacccgatcgggcactttctgtgtctagtcatcttagtctactgtgctgaatacatcaatgaggcggctgcgatgaactggagattattttcgaaataccagtatttcgactccagggggatgttcatttctatagtattttcagccccactgctggtgaatgccatgatcattgtggtacgtagatgacactttcagttgtctttcttcatgtgtatgtttttcaaatctaaacatgtctcaaacaattgtgtttaggttatgtgggtatggaagactttgaatgtgatgactgacctgaagaatgcacaagagagaagaaaggaaaagaaaaggagaaggaaagaagactgaggggcagcagctgcttggagtttgcgtccttcccgtccacccagtgcagctcccagtgctgcagtgtgcgtggcgtgggcatccttccagctgactcatggtttgaaaaaccgttgttttatttaaatatccacagtggtagggcacacactgaagttggcttttcagccagcactgaatgtatccatcaggacatgcgtcttcaggtgcctgatctttgtagtcaggctgtgggaacggtctctgcagagcttcataactgggaatttgatttgaagaagtccatgtcatatgtgtaactagtactaattataaatataaaatacacaatataaaatatgaaactcaataataaacagtgccacctgta

SEQ ID NO: 31919 - DNA, 634 bp, Homo sapiens
ttaaatttggtaatcaacataaagcactgatcacattgcccagtgcatagtaagcgctctaaatatctgctatttttatcatgtagtgttggttgaaattggttttgtgttctccactcttagtttaaaaaatagtatgagtcgaatgtttcatattgccctgtctcaggggaaaaaaaaaattgctttttgcatagctctcagttgattcccactcactatgatggctatatagaacacaagttctctaccatttctgcagtattttaaaaattcctttaaaaaactaaatatttattgtgggacaaaatattatatgcttacttagaatattgggaagatggtaaagaatacaaagaaaaaaacaattgtacccctcattctagacacaacttgctgttcacgtctttggggtgtatttccattcctactagatggaaccatttatatgtttacctaattcggatcatgttgcatacagttttgttcccttcaaaattatactttgaggctaggcgcgcatagtggctcacacctgtaatcttagcactttgggaggccaagatgggggaggatcacttgagaccaggagtttgagaccagcctggtcaacatagtgagacctgtctctacc

SEQ ID NO: 31920 - DNA, 3262 bp, Homo sapiens
cccggaagctgccgaccacgtgattcgctggctcagctcacgtgacaaagctcccggaggtgggagccctgggccaaaatggcggcctacctgcagtggcggcgcttcgttttcttcgacaaggagctggtgaaggagccgctgagcaatgatggggccgctcccggggccacacctgcttctggatccgctgcttccaagttcctttgcctccctcctggcatcactgtctgcgactcaggccgagggagcctggtctttggagatatggaaggccagatctggttcttgccacgttccctacagcttacaggcttccaagcctacaaactacgggtgacacacctgtaccaactgaagcagcacaatattctggcatctgttggagaagatgaagagggcatcaaccccttggttaagatctggaacctggagaagagagatggtggcaatccactctgcactcgaatcttccctgctattccaggaacagagccaactgttgtatcttgtttgactgtccatgaaaatctcaactttatggccattggtttcacagatggcagtgttacattgaacaaaggagacatcacccgggaccggcatagcaagacccagattttgcacaagggcaactatcctgtaactggattggcctttcgccaagcaggaaagaccactcacttgtttgttgtgacaacagagaacgtccagtcctatatagtttctggaaaagactaccctcgcgtggagttggacacccatggttgtggcctgcgctgctcagccctaagtgacccttctcaggacctgcagttcattgtggccggggatgagtgtgtctacttgtaccagcctgatgaacgtgggccctgcttcgcctttgagggccataagctcattgcccactggtttagaggctaccttatcattgtctcccgtgaccggaaggtttctcccaagtcagagtttaccagcagggattcacagagctccgacaagcagattctaaacatctatgacctgtgcaacaagttcatagcctatagcaccgtctttgaggatgtagtggatgtgcttgctgagtggggctccctgtacgtgctgacgcgggatgggcgggtccacgcactgcaggagaaggacacacagaccaaactggagatgctgtttaagaagaacctatttgagatggcgattaaccttgccaagagccagcatctggacagtgatgggctggcccagattttcatgcagtatggagaccatctctacagcaagggcaaccacgatggggctgtccagcaatatatccgaaccattggaaagttggagccatcctacgtgatccgcaagtttctggatgcccagcgcattcacaacctgactgcctacctgcagaccctgcaccgacaatccctggccaatgccgaccataccaccctgctcctcaactgctataccaagctcaaggacagctcgaagctggaggagttcatcaagaaaaagagtgagagtgaagtccactttgatgtggagacagccatcaaggtcctccggcaggctggctactactcccatgccctgtatctggcggagaaccatgcacatcatgagtggtacctgaagatccagctagaagacattaagaattatcaggaagcccttcgatacatcggcaagctgccttttgagcaggcagagagcaacatgaagcgctacggcaagatcctcatgcaccacataccagagcagacaactcagttgctgaagggactttgtactgattatcggcccagcctcgaaggccgcagcgatagggaggccccaggctgcagggccaactctgaggagttcatccccatctttgccaataacccgcgagagctgaaagccttcctagagcacatgagtgaagtgcagccagactcaccccaggggatctacgacacactccttgagctgcgactgcagaactgggcccacgagaaggatccacaggtcaaagagaagcttcacgcagaggccatttccctgctgaagagtggtcgcttctgtgacgtctttgacaaggccctggtcctgtgccagatgcacgacttccaggatggtgtcctttacctttatgagcaggggaagctgttccagcagatcatgcactaccacatgcagcacgagcagtaccggcaggtcatcagcgtgtgtgagcgccatggggagcaggacccctccttgtgggagcaggccctcagctacttcgctcgcaaggaggaggactgcaaggagtatgtggcagctgtcctcaagcatatcgagaacaagaacctcatgccacctcttctagtggtgcagaccctggcccacaactccacagccacactctccgtcatcagggactacctggtccaaaaactacagaaacagagccagcagattgcacaggatgagctgcgggtgcggcggtaccgagaggagaccacccgtatccgccaggagatccaagagctcaaggccagtcctaagattttccaaaagaccaagtgcagcatctgtaacagtgccttggagttgccctcagtccacttcctgtgtggccactccttccaccaacactgctttgagagttactcggaaagtgatgctgactgccccacctgcctccctgaaaaccggaaggtcatggatatgatccgggcccaggaacagaaacgagatctccatgatcaattccagcatcagctcaagtgctccaatgacagcttttctgtgattgctgactactttggcagaggtgttttcaacaaattgactctgctgaccgaccctcccacagccagactgacctccagcctggaggctgggctgcaacgcgacctactcatgcactccaggaggggcacttaagcagcctggaggaagatgtgggcaacagtggaggaccaagagaacagacacaatgggacctgggcgggcgttacacagaaggctggctgacatgcccagggctccactctcatctaatgtcacagccctcagaactaaagcggactttctttccctgccttcttatttagtcagcttgccatccctcctcttcactagcagtgtagatcattccagatcagtgggggagggcacctcagcaacctctgagtgtggacaatagctgctttcttctctatccaagagcaccaggctgtgcttgggtccttgctctcagagtctataaataaaagaatataatgatttgggaaaaaaagga

SEQ ID NO: 31921 - DNA, 2511 bp, Homo sapiens
caacagagaacgtccagtcctatatagcttctggagccctaagtgacccttctcaggacctgcagttcattgtggccggggatgagtgtgtctacttgtaccagcctgatgaacgtgggccctgcttcgcctttgagggccataagctcattgcccactggtttagaggctaccttatcattgtctcccgtgaccggaaggtttctcccaagtcagagtttaccagcagggattcacagagctccgacaagcagattctaaacatctatgacctgtgcaacaagttcatagcctatagcaccgtctttgaggatgtagtggatgtgcttgctgagtggggctccctgtacgtgctgacgcgggatgggcgggtccacgcactgcaggagaaggacacacagaccaaactggagatgctgtttaagaagaacctatttgagatggcgattaaccttgccaagagccagcatctggacagtgatgggctggcccagattttcatgcagtatggagaccatctctacagcaagggcaaccacgatggggctgtccagcaatatatccgaaccattggaaagttggagccatcctacgtgatccgcaagtttctggatgcccagcgcattcacaacctgactgcctacctgcagaccctgcaccgacaatccctggccaatgccgaccataccaccctgctcctcaactgctataccaagctcaaggacagctcgaagctggaggagttcatcaagaaaaagagtgagagtgaagtccactttgatgtggagacagccatcaaggtcctccggcaggctggctactactcccatgccctgtatctggcggagaaccatgcacatcatgagtggtacctgaagatccagctagaagacattaagaattatcaggaagcccttcgatacatcggcaagctgccttttgagcaggcagagagcaacatgaagcgctacggcaagatcctcatgcaccacataccagagcagacaactcagttgctgaagggactttgtactgattatcggcccagcctcgaaggccgcagcgatagggaggccccaggctgcagggccaactctgaggagttcatccccatctttgccaataacccgcgagagctgaaagccttcctagagcacatgagtgaagtgcagccagactcaccccaggggatctacgacacactccttgagctgcgactgcagaactgggcccacgagaaggatccacaggtcaaagagaagcttcacgcagaggccatttccctgctgaagagtggtcgcttctgtgacgtctttgacaaggccctggtcctgtgccagatgcacgacttccaggatggtgtcctttacctttatgagcaggggaagctgttccagcagatcatgcactaccacatgcagcacgagcagtaccggcaggtcatcagcgtgtgtgagcgccatggggagcaggacccctccttgtgggagcaggccctcagctacttcgctcgcaaggaggaggactgcaaggagtatgtggcagctgtcctcaagcatatcgagaacaagaacctcatgccacctcttctagtggtgcagaccctggcccacaactccacagccacactctccgtcatcagggactacctggtccaaaaactacagaaacagagccagcagattgcacaggatgagctgcgggtgcggcggtaccgagaggagaccacccgtatccgccaggagatccaagagctcaaggccagtcctaagattttccaaaagaccaagtgcagcatctgtaacagtgccttggagttgccctcagtccacttcctgtgtggccactccttccaccaacactgctttgagagttactcggaaagtgatgctgactgccccacctgcctccctgaaaaccggaaggtcatggatatgatccgggcccaggaacagaaacgagatctccatgatcaattccagcatcagctcaagtgctccaatgacagcttttctgtgattgctgactactttggcagaggtgttttcaacaaattgactctgctgaccgaccctcccacagccagactgacctccagcctggaggctgggctgcaacgcgacctactcatgcactccaggaggggcacttaagcagcctggaggaagatgtgggcaacagtggaggaccaagagaacagacacaatgggacctgggcgggcgttacacagaaggctggctgacatgcccagggctccactctcatctaatgtcacagccctcagaactaaagcggactttctttccctgccttcttatttagtcagcttgccatccctcctcttcactagcagtgtagatcattccagatcagtgggggagggcacctcagcaacctctgagtgtggacaatagctgctttcttctctatccaagagcaccaggctgtgcttgggtccttgctctcagagtctataaataaaagaatataatgatttgggaaaaaaagga

SEQ ID NO: 31922 - DNA, 874 bp, Homo sapiens
cgatagcattgcgagacgctggagccggagcaccctatgtcgcagtatctgtctttgattcctgccccatcccattatttatcgcacctacgttcaatattacaggcgaacatacttactaaagtgtgttaattaattaatgcttgtaggacatagtaataacaattgaatgtctgcacagccgctttccacacagacatcataacaaaaaatttccaccaaacccccccctccccccgcttctggccacagcacttaaacacatctctgccaaaccccacaaagaaccctaactcgtgccgaattcggcacgaacagaaacgagatctccatgatcaattccagcatcagctcaagtgctccaatgacagcttttctgtgattgctgactactttggcagaggtgttttcaacaaattgactctgctgaccgaccctcccacagccagactgacctccagcctggaggctgggctgcaacgcgacctactcatgcactccaggaggggcacttaagcagcctggaggaagatgtgggcaacagtggaggaccaagagaacagacacaatgggacctgggcgggcgttacacagaaggctggctgacatgcccagggctccactctcatctaatgtcacagccctcagaactaaagcggactttctttccctgccttcttatttagtcagcttgccatccctcctcttcactagcagtgtagatcattccagatcagtgggggagggcacctcagcaacctctgagtgtggacaatagctgctttcttctctatccaagagcaccaggctgtgcttgggtccttgctctcagagtctataaataaaagaatataatgatttgggaaaaaaagga

SEQ ID NO: 31923 - DNA, 1941 bp, Homo sapiens
cccggaagctgccgaccacgtgattcgctggctcagctcacgtgacaaagctcccggaggtgggagccctgggccaaaatggcggcctacctgcagtggcggcgcttcgttttcttcgacaaggagctggtgaaggagccgctgagcaatgatggggccgctcccggggccacacctgcttctggatccgctgcttccaagttcctttgcctccctcctggcatcactgtctgcgactcaggccgagggagcctggtctttggagatatggaaggccagatctggttcttgccacgttccctacagcttacaggcttccaagcctacaaactacgggtgacacacctgtaccaactgaagcagcacaatattctggcatctgttggagaagatgaagagggcatcaaccccttggttaagatctggaacctggagaagagagatggtggcaatccactctgcactcgaatcttccctgctattccaggaacagagccaactgttgtatcttgtttgactgtccatgaaaatctcaactttatggccattggtttcacagatggcagtgttacattgaacaaaggagacatcacccgggaccggcatagcaagacccagattttgcacaagggcaactatcctgtaactggattggcctttcgccaagcaggaaagaccactcacttgtttgttgtgacaacagagaacgtccagtcctatatagtttctggaaaagactaccctcgcgtggagttggacacccatggttgtggcctgcgctgctcagccctaagtgacccttctcaggacctgcagttcattgtggccggggatgagtgtgtctacttgtaccagcctgatgaacgtgggccctgcttcgcctttgagggccataagctcattgcccactggtttagaggctaccttatcattgtctcccgtgaccggaaggtttctcccaagtcagagtttaccagcagggattcacagagctccgacaagcagattctaaacatctatgacctgtgcaacaagttcatagcctatagcaccgtctttgaggatgtagtggatgtgcttgctgagtggggctccctgtacgtgctgacgcgggatgggcgggtccacgcactgcaggagaaggacacacagaccaaactggagatgctgtttaagaagaacctatttgagatggcgattaaccttgccaagagccagcatctggacagtgatgggctggcccagattttcatgcagtatggagaccatctctacagcaagggcaaccacgatggggctgtccagcaatatatccgaaccattggaaagttggagccatcctacgtgatccgcaagtttctggatgcccagcgcattcacaacctgactgcctacctgcagaccctgcaccgacaatccctggccaatgccgaccataccaccctgctcctcaactgctataccaagctcaaggacagctcgaagctggaggagttcatcaagaaaaagagtgagagtgaagtccactttgatgtggagacagccatcaaggtcctccggcaggctggctactactcccatgccctgtatctggcggagaaccatgcacatcatgagtggtacctgaagatccagctagaagacattaagaattatcaggaagcccttcgatacatcggcaagctgccttttgagcaggcagagagcaacatgaagcgctacggcaagatcctcatgcaccacataccagagcagacaactcagttgctcctcttcactagcagtgtagatcattccagatcagtgggggagggcacctcagcaacctctgagtgtggacaatagctgctttcttctctatccaagagcaccaggctgtgcttgggtccttgctctcagagtctataaataaaagaatataatgatttgggaaaaaaagga

SEQ ID NO: 31924 - DNA, 131 bp, Homo sapiens
cttgtgggagcaggccctcagctacttcgctcgcaaggaggaggactgcaaggagtatgtggcagctgtcctcaagcatatcgagaacaagaacctcatgccacctcttctaggtacttgggaagacagat

SEQ ID NO: 31925 - DNA, 503 bp, Homo sapiens
ttcattcagttccaggcacagtgttttacatataccatgtattggattattattttctaaatgaatggatatgttagtgtacttaattttctaatctgttacttgggttaattgtaggatcctaaagggtaagatcaggtttatgtgttctctatgtacaactaccggcacagcgctgcatgttatgggatgagagggaccagagaggtgatttgtgctgggtgaaatgtgcaccaaagttatcatgggaaaggaaataggggagataagacagagatgtccaaacatctggtgctttttctttcctatgcaggtcagagtttaccagcagggattcacagagctccgacaagcagattctaaacatctatgacctgtgcaacaagttcatagcctatagcaccgtctttgaggatgtagtggatgtgcttgctgagtggggctccctgtacgtgctgacgcgggatgggcgggtccacgcactgcaggagaaggacacacag

SEQ ID NO: 31926 - DNA, 363 bp, Homo sapiens
ggaggtgggagccctgggccaaaatggcggcctacctgcagtggcggcgcttcgttttcttcgacaaggagctggtgaaggagccgctgagcaatgatggggccgctcccggggccacacctgcttctggatccgctgcttccaagttcctttgcctccctcctggcatcactgtctgcgactcaggccgagggagcctggtctttggagatatccttcgtttggagctgtcttttccctcccgggatcccgaagagatcgagttaggatgaaatctgtttgtcggaggggtccgtgccgcgcgcctctttggtttagctggtcatccagagttgttctgtggtctacgggaagaaagaagga

SEQ ID NO: 31927 - DNA, 3014 bp, Homo sapiens
cccggaagctgccgaccacgtgattcgctggctcagctcacgtgacaaagctcccggaggtgggagccctgggccaaaatggcggcctacctgcagtggcggcgcttcgttttcttcgacaaggagctggtgaaggagccgctgagcaatgatggggccgctcccggggccacacctgcttctggatccgctgcttccaagttcctttgcctccctcctggcatcactgtctgcgactcaggccgagggagcctggtctttggagatatggaaggccagatctggttcttgccacgttccctacagcttacaggcttccaagcctacaaactacgggtgacacacctgtaccaactgaagcagcacaatattctggcatctgttggagaagatgaagagggcatcaaccccttggttaagatctggaacctggagaagagagatggtggcaatccactctgcactcgaatcttccctgctattccaggaacagagccaactgttgtatcttgtttgactgtccatgaaaatctcaactttatggccattggtttcacagatggcagtgttacattgaacaaaggagacatcacccgggaccggcatagcaagacccagattttgcacaagggcaactatcctgtaactggattggcctttcgccaagcaggaaagaccactcacttgtttgttgtgacaacagagaacgtccaggtcagagtttaccagcagggattcacagagctccgacaagcagattctaaacatctatgacctgtgcaacaagttcatagcctatagcaccgtctttgaggatgtagtggatgtgcttgctgagtggggctccctgtacgtgctgacgcgggatgggcgggtccacgcactgcaggagaaggacacacagaccaaactggagatgctgtttaagaagaacctatttgagatggcgattaaccttgccaagagccagcatctggacagtgatgggctggcccagattttcatgcagtatggagaccatctctacagcaagggcaaccacgatggggctgtccagcaatatatccgaaccattggaaagttggagccatcctacgtgatccgcaagtttctggatgcccagcgcattcacaacctgactgcctacctgcagaccctgcaccgacaatccctggccaatgccgaccataccaccctgctcctcaactgctataccaagctcaaggacagctcgaagctggaggagttcatcaagaaaaagagtgagagtgaagtccactttgatgtggagacagccatcaaggtcctccggcaggctggctactactcccatgccctgtatctggcggagaaccatgcacatcatgagtggtacctgaagatccagctagaagacattaagaattatcaggaagcccttcgatacatcggcaagctgccttttgagcaggcagagagcaacatgaagcgctacggcaagatcctcatgcaccacataccagagcagacaactcagttgctgaagggactttgtactgattatcggcccagcctcgaaggccgcagcgatagggaggccccaggctgcagggccaactctgaggagttcatccccatctttgccaataacccgcgagagctgaaagccttcctagagcacatgagtgaagtgcagccagactcaccccaggggatctacgacacactccttgagctgcgactgcagaactgggcccacgagaaggatccacaggtcaaagagaagcttcacgcagaggccatttccctgctgaagagtggtcgcttctgtgacgtctttgacaaggccctggtcctgtgccagatgcacgacttccaggatggtgtcctttacctttatgagcaggggaagctgttccagcagatcatgcactaccacatgcagcacgagcagtaccggcaggtcatcagcgtgtgtgagcgccatggggagcaggacccctccttgtgggagcaggccctcagctacttcgctcgcaaggaggaggactgcaaggagtatgtggcagctgtcctcaagcatatcgagaacaagaacctcatgccacctcttctagtggtgcagaccctggcccacaactccacagccacactctccgtcatcagggactacctggtccaaaaactacagaaacagagccagcagattgcacaggatgagctgcgggtgcggcggtaccgagaggagaccacccgtatccgccaggagatccaagagctcaaggccagtcctaagattttccaaaagaccaagtgcagcatctgtaacagtgccttggagttgccctcagtccacttcctgtgtggccactccttccaccaacactgctttgagagttactcggaaagtgatgctgactgccccacctgcctccctgaaaaccggaaggtcatggatatgatccgggcccaggaacagaaacgagatctccatgatcaattccagcatcagctcaagtgctccaatgacagcttttctgtgattgctgactactttggcagaggtgttttcaacaaattgactctgctgaccgaccctcccacagccagactgacctccagcctggaggctgggctgcaacgcgacctactcatgcactccaggaggggcacttaagcagcctggaggaagatgtgggcaacagtggaggaccaagagaacagacacaatgggacctgggcgggcgttacacagaaggctggctgacatgcccagggctccactctcatctaatgtcacagccctcagaactaaagcggactttctttccctgccttcttatttagtcagcttgccatccctcctcttcactagcagtgtagatcattccagatcagtgggggagggcacctcagcaacctctgagtgtggacaatagctgctttcttctctatccaagagcaccaggctgtgcttgggtccttgctctcagagtctataaataaaagaatataatgatttgggaaaaaaagga

SEQ ID NO: 31928 - DNA, 2415 bp, Homo sapiens
  misc_feature (2145)..(2145): n is a, c, g, or t
  misc_feature (2153)..(2153): n is a, c, g, or t
  misc_feature (2159)..(2159): n is a, c, g, or t
  misc_feature (2162)..(2163): n is a, c, g, or t
  misc_feature (2165)..(2165): n is a, c, g, or t
  misc_feature (2172)..(2172): n is a, c, g, or t
  misc_feature (2174)..(2174): n is a, c, g, or t
  misc_feature (2184)..(2184): n is a, c, g, or t
  misc_feature (2191)..(2191): n is a, c, g, or t
  misc_feature (2193)..(2193): n is a, c, g, or t
  misc_feature (2202)..(2202): n is a, c, g, or t
  misc_feature (2204)..(2204): n is a, c, g, or t
  misc_feature (2219)..(2219): n is a, c, g, or t
  misc_feature (2225)..(2225): n is a, c, g, or t
  misc_feature (2237)..(2237): n is a, c, g, or t
  misc_feature (2246)..(2249): n is a, c, g, or t
  misc_feature (2252)..(2252): n is a, c, g, or t
  misc_feature (2255)..(2255): n is a, c, g, or t
  misc_feature (2265)..(2265): n is a, c, g, or t
  misc_feature (2280)..(2280): n is a, c, g, or t
  misc_feature (2291)..(2291): n is a, c, g, or t
  misc_feature (2297)..(2297): n is a, c, g, or t
  misc_feature (2308)..(2308): n is a, c, g, or t
  misc_feature (2322)..(2322): n is a, c, g, or t
  misc_feature (2339)..(2339): n is a, c, g, or t
  misc_feature (2370)..(2370): n is a, c, g, or t
cccggaagctgccgaccacgtgattcgctggctcagctcacgtgacaaagctcccggaggtgggagccctgggccaaaatggcggcctacctgcagtggcggcgcttcgttttcttcgacaaggagctggtgaaggagccgctgagcaatgatggggccgctcccggggccacacctgcttctggatccgctgcttccaagttcctttgcctccctcctggcatcactgtctgcgactcaggccgagggagcctggtctttggagatatggaaggccagatctggttcttgccacgttccctacagcttacaggcttccaagcctacaaactacgggtgacacacctgtaccaactgaagcagcacaatattctggcatctgttggagaagatgaagagggcatcaaccccttggttaagatctggaacctggagaagagagatggtggcaatccactctgcactcgaatcttccctgctattccaggaacagagccaactgttgtatcttgtttgactgtccatgaaaatctcaactttatggccattggtttcacagatggcagtgttacattgaacaaaggagacatcacccgggaccggcatagcaagacccagattttgcacaagggcaactatcctgtaactggattggcctttcgccaagcaggaaagaccactcacttgtttgttgtgacaacagagaacgtccagtcctatatagtttctggaaaagactaccctcgcgtggagttggacacccatggttgtggcctgcgctgctcagccctaagtgacccttctcaggacctgcagttcattgtggccggggatgagtgtgtctacttgtaccagcctgatgaacgtgggccctgcttcgcctttgagggccataagctcattgcccactggtttagaggctaccttatcattgtctcccgtgaccggaaggtttctcccaagtcagagtttaccagcagggattcacagagctccgacaagcagattctaaacatctatgacctgtgcaacaagttcatagcctatagcaccgtctttgaggatgtagtggatgtgcttgctgagtggggctccctgtacgtgctgacgcgggatgggcgggtccacgcactgcaggagaaggacacacagaccaaactggagatgctgtttaagaagaacctatttgagatggcgattaaccttgccaagagccagcatctggacagtgatgggctggcccagattttcatgcagtatggagaccatctctacagcaagggcaaccacgatggggctgtccagcaatatatccgaaccattggaaagttggagccatcctacgtgatccgcaagtttctggatgcccagcgcattcacaacctgactgcctacctgcagaccctgcaccgacaatccctggccaatgccgaccataccaccctgctcctcaactgctataccaagctcaaggacagctcgaagctggaggagttcatcaagaaaaagagtgagagtgaagtccactttgatgtggagacagccatcaaggtcctccggcaggctggctactactcccatgccctgtatctggcggagaaccatgcacatcatgagtggtacctgaagatccagctagaagacattaagaattatcaggaagcccttcgatacatcggcaagctgccttttgagcaggcagagagcaacatgaagcgctacggcaagatcctcatgcaccacataccagagcagacaactcagttgctgaagggactttgtactgattatcggcccagcctcgaaggccgcagcgatagggaggccccaggctgcagggccaactctgaggagttcatccccatctttgccaataacccgcgagagctgaaagccttcctagagcacatgagtgaagtgcagccagactcaccccaggggatctacgacacactccttgagctgcgactgcagaactgggcccacgagaaggatccacaggtcaaagagaagcttcacgcagaggccatttccctgctgaagagtggtcgcttctgcgacgtctttgacaaggcctggtcctgtgccagatgcacgacttccaggatggtgtcctttacctttatgagcaggggaagctgttcnagcagatnatgcantannanatgcagnangggcagtacnggcaggncnatcaaaatntntaaaaaaaaaggggngaaggnaaaataattgtnggggaaggnnnncgntcnttcgctcgcncgggggggggctgcncggggtttgtngccgcngttctcccgcntttcgcgcccccgnccctcctgccccccctnctcgtggtgcggccctggccccccctccccngccccctctccgtctccggggttcttgtccccccctccgccccgg

SEQ ID NO: 31929 - DNA, 384 bp, Homo sapiens
gaagcttcacgcagaggccatttccctgctgaagagtggtcgcttctgtgacgtctttgacaaggccctggtcctgtgccagatgcacgacttccaggatggtgtcctttacctttatgagcaggggaagctgtaagagtttggggaatttcagggaaaggggaagaatccaagtcattttccagagacagccactgaggtgtgcccttgccccggccgcaggttccagcagatcatgcactaccacatgcagcacgagcagtaccggcaggtcatcagcgtgtgtgagcgccatggggagcaggacccctccttgtgggagcaggccctcagctacttcgctcgcaaggaggaggactgcaaggagtatgtggcagctgtcct

SEQ ID NO: 31930 - DNA, 2188 bp, Homo sapiens
ttttttttttgtgtgtgtgtgtgtgtgtgtatgtgtcaggactggattatagcaccagaaggatacgctgcattttattgtgatggagaatgttcttttccacttaacgcccatatgaatgccaccaaccacgctatagttcagactctggttcatctgatgtttcctgaccacgtaccaaagccttgttgtgctccaaccaaattaaatgccatctctgttctgtactttgatgacagctccaatgtcattttgaaaaaatatagaaatatggtagtacgctcatgtggctgccactaatattaaataatattgataataacaaaaagatctgtattaaggtttatggctgcaataaaaagcatactttcagacaaacggggaatttcctaaaattagtctggctcattttgactcttttcctatgtacaatatcatgtatatagtcatttttatttatttaaacgtatatattctcttctgtggaggctttatcaataaaatctatttcataggccactacattatacaatagatcatctagtataattttcaatgggttatgctgagtccattcaattccatttcaacatttttttctaatacaattttacataattttctgagattagacagaactcctttgactgtttaatattgtggaaggaaattgaataatttagttatattgtgccaatgaaaaccatgatagaatatttatttagaaataagacttaaaaaaataacaacccaaacaaaaattcttggataaacacaatttctcttttagagttcctgcttcattagataaagtgaaatgttgaactggatttgaataaataaacggtaggcagaacatagaagctgaaagattgcacagaattgttttaactgtttgctttaacagaagtggtgtaactgtaggagcatgttcctttttggcttgtggattgtagattttgcaaagagctcaaagcttcaggagacaggcttgagcctgtgtccatagctttccaagttaacactaattgtagtacaaccttcttacctcaaataaatcatgtctgcctattatctagaacactactgctgcagaatttttttttcagatttaaaaacctagtccaaaataaagaaacatttacatgtgctccactttcctccccacaggcaagagtcactgcatgcgtaaaatgtacaagagcagaagatgccgaaagaaccattttctttagctctcctttataactgagtttgctgattgatgtgatgcaagggattttatttagaagtaaaagcactgaaactaaactggaggaaattaccaaaagtcccagaatggctttgacagaattgccatttctaaagaacagctgaaattcatttttcatatctttgagagtgagctcaatgaaaaccttattttgtaaaggcattttgtaaaccttcttccaagcacaaataattccaaacaggaaggttctgtttgtgtgtgtgtgtgtgtgtgtctgtgtgtgcatgtgtgttcttccctctaaaattaatttattttctctatctattagaatgccctctaaggcctttctttaacacacactgactttttgaagaatgatctttagattgataacttgctatttatggtgactctgtggttaggcttatttaccgttaatctaaagtattcataaagcaccatttattaatcatccttttggatctttcaaaccaaacgtataccaaaaatgtcttcaaaaatgttatggctttgtttgtaattcgggtatattaaaatgttgttttgaaatacagtttatcttaaagaaaatttgacagtaactatattaaggggtacattaagtaatatatttttaattaatggtgtaccattgagagaataagaaatggaagtctattgttttattctttaaatgtgctgtttaaatatatttccatattttaaaatatattaaacagatgctaatttctgctgttcttgatttggttctttatttaaaaggaatacaaaatgtaagtatatcataaattgagacaataagaatatttatcaaatgtaaactgtggatcacatgattctttatgttgttcttaattgccaaaattgttttttgtgttgttaataattatctcactattaaatgtgcaaagcaacaatccatgaattaaa

SEQ ID NO: 31931 - DNA, 3782 bp, Homo sapiens
tactctttagatctctcttgaagagggctggtatatttgtgcctgctggaggtggaattaacagtaagaaggagaaagggattgaatggacttacaggaaggatttcaagtaaattcagggaaacacatttacttgaatagtacaacctagagtattattttacactaagacgacacaaaagatgttaaagttatcaccaagctgccggacagatatatattccaacaccaaggtgcagatcagcatagatctgtgattcagaaatcaggatttgttttggaaagagctcaagggttgagaagaactcaaaagcaagtgaagattactttgggaactacagtttatcagaagatcaacttttgctaattcaaataccaaaggcctgattatcataaattcatataggaatgcataggtcatctgatcaaataatattagccgtcttctgctacatcaatgcagcaaaaactcttaacaactgtggataattggaaatctgagtttcagctttcttagaaataactactcttgacatattccaaaatatttaaaataggacaggaaaatcggtgaggatgttgtgctcagaaatgtcactgtcatgaaaaataggtaaatttgttttttcagctactgggaaactgtacctcctagaaccttaggttttttttttttttaagaggacaagaaggactaaaaatatcaacttttgcttttggacaaaaatgcatctgactgtatttttacttaagggtattgtgggtttcctctggagctgctgggttctagtgggttatgcaaaaggaggtttgggagacaatcatgttcactccagttttatttatagaagactacggaaccacgaaagacgggaaatacaaagggaaattctctctatcttgggtttgcctcacagacccagaccattttcacctggaaaacaagcgtcctctgcacctctctttatgctggatctctacaatgccatgaccaatgaagaaaatcctgaagagtcggattgaaagagacaaggatttttctcaccagcgaaggcattacaaagaatttcgatttgatcttacccaaattcctcatggagaggcagtgacagcagctgaattccggatatacaaggaccggagcaacaaccgatttgaaaatgaaacaattaagattagcatatatcaaatcatcaaggaatacacaaatagggatgcagatctgttcttgttagacacaagaaaggcccaagctttagatgtgggttggcttgtctttgatatcactgtgaccagcaatcattgggtgattaatccccagaataatttgggcttacagctctgtgcagaaacaggggatggacgcagtatcaacgtaaaatctgctggtcttgtgggaagacagggacctcagtcaaaacaaccattcatggtggccttcttcaaggcgagtgaggtacttcttcgatccgtgagagcagccaacaaacgaaaaaatcaaaaccgcaataaatccagctctcatcaggactcctccagaatgtccagtgttggagattataacacaagtgagcaaaaacaagcctgtaagaagcacgaactctatgtgagcttccgggatctgggatggcaggactggattatagcaccagaaggatacgctgcattttattgtgatggagaatgttcttttccacttaacgcccatatgaatgccaccaaccacgctatagttcagactctggttcatctgatgtttcctgaccacgtaccaaagccttgttgtgctccaaccaaattaaatgccatctctgttctgtactttgatgacagctccaatgtcattttgaaaaaatatagaaatatggtagtacgctcatgtggctgccactaatattaaataatattgataataacaaaaagatctgtattaaggtttatggctgcaataaaaagcatactttcagacaaacggggaatttcctaaaattagtctggctcattttgactcttttcctatgtacaatatcatgtatatagtcatttttatttatttaaacgtatatattctcttctgtggaggctttatcaataaaatctatttcataggccactacattatacaatagatcatctagtataattttcaatgggttatgctgagtccattcaattccatttcaacatttttttctaatacaattttacataattttctgagattagacagaactcctttgactgtttaatattgtggaaggaaattgaataatttagttatattgtgccaatgaaaaccatgatagaatatttatttagaaataagacttaaaaaaataacaacccaaacaaaaattcttggataaacacaatttctcttttagagttcctgcttcattagataaagtgaaatgttgaactggatttgaataaataaacggtaggcagaacatagaagctgaaagattgcacagaattgttttaactgtttgctttaacagaagtggtgtaactgtaggagcatgttcctttttggcttgtggattgtagattttgcaaagagctcaaagcttcaggagacaggcttgagcctgtgtccatagctttccaagttaacactaattgtagtacaaccttcttacctcaaataaatcatgtctgcctattatctagaacactactgctgcagaatttttttttcagatttaaaaacctagtccaaaataaagaaacatttacatgtgctccactttcctccccacaggcaagagtcactgcatgcgtaaaatgtacaagagcagaagatgccgaaagaaccattttctttagctctcctttataactgagtttgctgattgatgtgatgcaagggattttatttagaagtaaaagcactgaaactaaactggaggaaattaccaaaagtcccagaatggctttgacagaattgccatttctaaagaacagctgaaattcatttttcatatctttgagagtgagctcaatgaaaaccttattttgtaaaggcattttgtaaaccttcttccaagcacaaataattccaaacaggaaggttctgtttgtgtgtgtgtgtgtgtgtgtctgtgtgtgcatgtgtgttcttccctctaaaattaatttattttctctatctattagaatgccctctaaggcctttctttaacacacactgactttttgaagaatgatctttagattgataacttgctatttatggtgactctgtggttaggcttatttaccgttaatctaaagtattcataaagcaccatttattaatcatccttttggatctttcaaaccaaacgtataccaaaaatgtcttcaaaaatgttatggctttgtttgtaattcgggtatattaaaatgttgttttgaaatacagtttatcttaaagaaaatttgacagtaactatattaaggggtacattaagtaatatatttttaattaatggtgtaccattgagagaataagaaatggaagtctattgttttattctttaaatgtgctgtttaaatatatttccatattttaaaatatattaaacagatgctaatttctgctgttcttgatttggttctttatttaaaaggaatacaaaatgtaagtatatcataaattgagacaataagaatatttatcaaatgtaaactgtggatcacatgattctttatgttgttcttaattgccaaaattgttttttgtgttgttaataattatctcactattaaatgtgcaaagcaacaatccatgaattaaa

SEQ ID NO: 31932 - DNA, 3979 bp, Homo sapiens
tactctttagatctctcttgaagagggctggtatatttgtgcctgctggaggtggaattaacagtaagaaggagaaagggattgaatggacttacaggaaggatttcaagtaaattcagggaaacacatttacttgaatagtacaacctagagtattattttacactaagacgacacaaaagatgttaaagttatcaccaagctgccggacagatatatattccaacaccaaggtgcagatcagcatagatctgtgattcagaaatcaggatttgttttggaaagagctcaagggttgagaagaactcaaaagcaagtgaagattactttgggaactacagtttatcagaagatcaacttttgctaattcaaataccaaaggcctgattatcataaattcatataggaatgcataggtcatctgatcaaataatattagccgtcttctgctacatcaatgcagcaaaaactcttaacaactgtggataattggaaatctgagtttcagctttcttagaaataactactcttgacatattccaaaatatttaaaataggacaggaaaatcggtgaggatgttgtgctcagaaatgtcactgtcatgaaaaataggtaaatttgttttttcagctactgggaaactgtacctcctagaaccttaggttttttttttttttaagaggacaagaaggactaaaaatatcaacttttgcttttggacaaaaatgcatctgactgtatttttacttaagggtattgtgggtttcctctggagctgctgggttctagtgggttatgcaaaaggaggtttgggagacaatcatgttcactccagttttatttatagaagactacggaaccacgaaagacgggaaatacaaagggaaattctctctatcttgggtttgcctcacagacccagaccattttcacctggaaaacaagcgtcctctgcacctctctttatgctggatctctacaatgccatgaccaatgaagaaaatcctgaagagtcggagtactcagtaagggcatccttggcagaagagaccagaggggcaagaaagggatacccagcctctcccaatgggtatcctcgtcgcatacagttatctcggacgactcctctgaccacccagagtcctcctctagccagcctccatgataccaactttctgaatgatgctgacatggtcatgagctttgtcaacttagttgaaagagacaaggatttttctcaccagcgaaggcattacaaagaatttcgatttgatcttacccaaattcctcatggagaggcagtgacagcagctgaattccggatatacaaggaccggagcaacaaccgatttgaaaatgaaacaattaagattagcatatatcaaatcatcaaggaatacacaaatagggatgcagatctgttcttgttagacacaagaaaggcccaagctttagatgtgggttggcttgtctttgatatcactgtgaccagcaatcattgggtgattaatccccagaataatttgggcttacagctctgtgcagaaacaggggatggacgcagtatcaacgtaaaatctgctggtcttgtgggaagacagggacctcagtcaaaacaaccattcatggtggccttcttcaaggcgagtgaggtacttcttcgatccgtgagagcagccaacaaacgaaaaaatcaaaaccgcaataaatccagctctcatcaggactcctccagaatgtccagtgttggagattataacacaagtgagcaaaaacaagcctgtaagaagcacgaactctatgtgagcttccgggatctgggatggcaggactggattatagcaccagaaggatacgctgcattttattgtgatggagaatgttcttttccacttaacgcccatatgaatgccaccaaccacgctatagttcagactctggttcatctgatgtttcctgaccacgtaccaaagccttgttgtgctccaaccaaattaaatgccatctctgttctgtactttgatgacagctccaatgtcattttgaaaaaatatagaaatatggtagtacgctcatgtggctgccactaatattaaataatattgataataacaaaaagatctgtattaaggtttatggctgcaataaaaagcatactttcagacaaacggggaatttcctaaaattagtctggctcattttgactcttttcctatgtacaatatcatgtatatagtcatttttatttatttaaacgtatatattctcttctgtggaggctttatcaataaaatctatttcataggccactacattatacaatagatcatctagtataattttcaatgggttatgctgagtccattcaattccatttcaacatttttttctaatacaattttacataattttctgagattagacagaactcctttgactgtttaatattgtggaaggaaattgaataatttagttatattgtgccaatgaaaaccatgatagaatatttatttagaaataagacttaaaaaaataacaacccaaacaaaaattcttggataaacacaatttctcttttagagttcctgcttcattagataaagtgaaatgttgaactggatttgaataaataaacggtaggcagaacatagaagctgaaagattgcacagaattgttttaactgtttgctttaacagaagtggtgtaactgtaggagcatgttcctttttggcttgtggattgtagattttgcaaagagctcaaagcttcaggagacaggcttgagcctgtgtccatagctttccaagttaacactaattgtagtacaaccttcttacctcaaataaatcatgtctgcctattatctagaacactactgctgcagaatttttttttcagatttaaaaacctagtccaaaataaagaaacatttacatgtgctccactttcctccccacaggcaagagtcactgcatgcgtaaaatgtacaagagcagaagatgccgaaagaaccattttctttagctctcctttataactgagtttgctgattgatgtgatgcaagggattttatttagaagtaaaagcactgaaactaaactggaggaaattaccaaaagtcccagaatggctttgacagaattgccatttctaaagaacagctgaaattcatttttcatatctttgagagtgagctcaatgaaaaccttattttgtaaaggcattttgtaaaccttcttccaagcacaaataattccaaacaggaaggttctgtttgtgtgtgtgtgtgtgtgtgtctgtgtgtgcatgtgtgttcttccctctaaaattaatttattttctctatctattagaatgccctctaaggcctttctttaacacacactgactttttgaagaatgatctttagattgataacttgctatttatggtgactctgtggttaggcttatttaccgttaatctaaagtattcataaagcaccatttattaatcatccttttggatctttcaaaccaaacgtataccaaaaatgtcttcaaaaatgttatggctttgtttgtaattcgggtatattaaaatgttgttttgaaatacagtttatcttaaagaaaatttgacagtaactatattaaggggtacattaagtaatatatttttaattaatggtgtaccattgagagaataagaaatggaagtctattgttttattctttaaatgtgctgtttaaatatatttccatattttaaaatatattaaacagatgctaatttctgctgttcttgatttggttctttatttaaaaggaatacaaaatgtaagtatatcataaattgagacaataagaatatttatcaaatgtaaactgtggatcacatgattctttatgttgttcttaattgccaaaattgttttttgtgttgttaataattatctcactattaaatgtgcaaagcaacaatccatgaattaaa

SEQ ID NO: 31933 - DNA, 1869 bp, Homo sapiens
tactctttagatctctcttgaagagggctggtatatttgtgcctgctggaggtggaattaacagtaagaaggagaaagggattgaatggacttacaggaaggatttcaagtaaattcagggaaacacatttacttgaatagtacaacctagagtattattttacactaagacgacacaaaagatgttaaagttatcaccaagctgccggacagatatatattccaacaccaaggtgcagatcagcatagatctgtgattcagaaatcaggatttgttttggaaagagctcaagggttgagaagaactcaaaagcaagtgaagattactttgggaactacagtttatcagaagatcaacttttgctaattcaaataccaaaggcctgattatcataaattcatataggaatgcataggtcatctgatcaaataatattagccgtcttctgctacatcaatgcagcaaaaactcttaacaactgtggataattggaaatctgagtttcagctttcttagaaataactactcttgacatattccaaaatatttaaaataggacaggaaaatcggtgaggatgttgtgctcagaaatgtcactgtcatgaaaaataggtaaatttgttttttcagctactgggaaactgtacctcctagaaccttaggttttttttttttttaagaggacaagaaggactaaaaatatcaacttttgcttttggacaaaaatgcatctgactgtatttttacttaagggtattgtgggtttcctctggagctgctgggttctagtgggttatgcaaaaggaggtttgggagacaatcatgttcactccagttttatttatagaagactacggaaccacgaaagacgggaaatacaaagggaaattctctctatcttgggtttgcctcacagacccagaccattttcacctggaaaacaagcgtcctctgcacctctctttatgctggatctctacaatgccatgaccaatgaagaaaatcctgaagagtcggagtactcagtaagggcatccttggcagaagagaccagaggggcaagaaagggatacccagcctctcccaatgggtatcctcgtcgcatacagttatctcggacgactcctctgaccacccagagtcctcctctagccagcctccatgataccaactttctgaatgatgctgacatggtcatgagctttgtcaacttagttgaaagagacaaggatttttctcaccagcgaaggcattacaaagaatttcgatttgatcttacccaaattcctcatggagaggcagtgacagcagctgaattccggatatacaaggaccggagcaacaaccgatttgaaaatgaaacaattaagattagcatatatcaaatcatcaaggaatacacaaatagggatgcagatctgttcttgttagacacaagaaaggcccaagctttagatgtgggttggcttgtctttgatatcactgtgaccagcaatcattgggtgattaatccccagaataatttgggcttacagctctgtgcagaaacaggggatggacgcagtatcaacgtaaaatctgctggtcttgtgggaagacagggacctcagtcaaaacaaccattcatggtggccttcttcaaggcgagtgaggtacttcttcgatccgtgagagcagccaacaaacgaaaaaatcaaaaccgcaataaatccagctctcatcaggactcctccagaatgtccagtgttggaggtaagaataaacccgagcagcagttatgcacagagagttatggggtcgtatgctgcaaatcaagtagccacaataaatttaccctctatgtataccttcggatggtacattaaatc

SEQ ID NO: 31934 - DNA, 4104 bp, Homo sapiens
tggtcacaccgacctgcaccatctctcgcctgcctgtggggtttctgtcaactagtcgtggagggaaggagactctttaaagaataacatcttattgtggccatgccagaacccactaagaaagaggaaaatgaagtgccagccccagccccacccccggaagaaccaagtaaagagaaggaggccggaactacaccagcaaaagactggacccttgtcgaaactcctcctggggaggaacaagccaagcagaatgccaactcccagctgtccatcttgttcattgaaaaacctcaaggaggaacagtgaaagttggtgaagatatcaccttcatagccaaagtcaaggctgaagatcttctgagaaaacccactatcaaatggttcaaaggaaaatggatggacctggccagcaaagccgggaagcaccttcagctgaaggaaacctttgagaggcacagtcgggtgtacacatttgagatgcagatcatcaaggccaaagataactttgcaggaaattacagatgcgaggtcacctataaggataagtttgacagctgttcatttgatcttgaagtgcacgaatctactgggactactccaaacattgacatcagatctgctttcaagagaagtggagaaggtcaagaggatgcaggagaacttgactttagtggtctcctgaaacgtagggaggtgaagcagcaggaggaagaaccccaggtggacgtatgggagttgctgaagaacgcgaaacccagtgagtacgagaagatcgccttccagtatggaatcaccgacctgcgcggcatgctcaagcgactcaagcgcatgcgcagagaggagaagaagagcgcagcttttgcaaaaattcttgatcctgcatatcaggttgacaaaggaggcagagtgaggtttgttgtggagctggcagatccaaagttggaggtgaaatggtataaaaatggtcaagaaattcgacccagtaccaaatacatctttgaacacaaaggatgccagagaatcctgtttatcaataactgtcagatgacagatgattcagagtattatgtgacagccggtgatgagaaatgttccactgagctcttcgtaagagagcctccaattatggtgaccaaacagctggaagatacaactgcttattgtggggagagagtggaattagaatgtgaggtgtctgaagatgatgccaatgtaaaatggtttaagaatggtgaagagattatccctggtccaaaatcaagataccgaattagagttgagggtaaaaaacacatcttgatcatagagggagcaacaaaggctgatgctgcagaatattcagtaatgacaacaggaggacaatcatctgctaaacttagtgttgacttgaaacctctgaagattttgacacctctgactgatcagactgtaaatcttggaaaagaaatctgcctgaagtgtgaaatctctgaaaacataccaggaaaatggactaaaaatggcctacctgttcaggagagtgaccgtctaaaggtggttcacaagggaaggatccacaagttagtgatagccaatgccctcactgaagatgaaggtgattatgtatttgcacctgatgcctacaatgttactctgcctgccaaagttcatgttattgatcctcctaagatcatcctggatggtcttgatgctgacaacacagtgacagtgattgcaggaaacaagcttcgtcttgagatccccatcagcggagaaccacctcctaaagccatgtggagccggggagataaggctattatggaaggcagtggccggataagaacagaatcttaccctgatagcagcactctggtcattgatatagctgaaagagatgactctggtgtttaccacatcaatctgaaaaacgaagctggagaggcacatgcaagcatcaaggttaaagttgtggacttccctgatcctccagtggcaccgactgtgacagaggtgggagatgactggtgtatcatgaactgggagcctcctgcctacgacggaggctctccaatcctaggatattttattgagaggaagaagaaacaaagctccaggtggatgaggctgaattttgatctctgcaaagaaacaacttttgagcccaagaagatgattgaaggtgtggcctatgaggtccgcatctttgcagtcaatgccattggcatctccaagcccagtatgccctccaggccttttgttcctttggctgtaacaagccctcctactcttctgactgtggactctgtcactgacacgactgtcacgatgaggtggcgccccccagaccacattggtgcagcaggtttagatggctatgtgctagagtattgctttgaaggaactgaggactggatagttgcaaacaaagatctgattgacaagacgaagttcaccatcacaggtctgccaacagatgcaaagatctttgtgcgtgtgaaggctgttaatgcagctggtgccagcgagcccaagtactattctcagcccattctcgtgaaggaaatcatagaacctccaaagattcgcatcccaagacacctgaagcaaacctatatccgcagagttggagaagctgtcaatctggttatacctttccagggaaaaccaagaccagaattaacttggaagaaggatggtgcagaaattgataagaatcaaataaacattcgcaactctgagactgatacaatcatatttattagaaaagcagagaggagccactctgggaaatatgatctgcaagtcaaagtggacaaattcgtggagaccgcatcaattgacatccagatcattgaccgtccaggtccaccccaaattgtgaagattgaggatgtctggggagaaaatgtcgctctcacatggactccaccaaaggatgatggaaatgctgctatcacaggctataccattcagaaggctgacaagaagagcatggaatggtttactgtcattgagcattatcatcgaaccagtgccaccattactgaattggtcatagggaatgaatattacttccgggtcttttctgaaaacatgtgtggcctcagtgaggatgccaccatgactaaagagagtgcagtgatcgccagggatggtaaaatctacaaaaatccagtgtatgaagactttgatttctcagaggcacccatgtttactcagcctttggttaacacctatgccatagctggttacaatgccaccctaaactgcagtgtgagaggaaatcctaagcctaaaataacctggatgaaaaacaaagttgctattgtggatgatccaagatacaggatgttcagcaaccagggagtctgtaccctggaaattcgcaagcccagcccctatgatggaggcacttactgctgcaaagcagtcaatgaccttgggacagtggagattgaatgcaaactggaggtgaaagtcattgcacaataaggatttttgaatgtataatatcatctaaggtgggctctccttctgcagactcctcttgcaaggcgtacctccaaacataattgattcgtatctgcgagacttacactcaagcaatcctgaggaatactgagggagggcctggctactgtctctctgcactctgctgctttgaaatctggttgaaatgagaaaaagcattttctgttttcccaccaggcccccaagtgtggtctttttctttcctcctaatgttgaagagaaaaaaaaaaaaaaaagtttgcccagattgcttaattaaaaattgcaaacaaaatctcatttgaagtcagcactttggtcattattatctctgctcactgtattatactttacaaaaatgcaagtcatagaataagcaaaagcagttatttttgtttacatagtaggctataaatgctttttttttcctctcagagtaaaaaacataacacaatgcaccacgactggatcttgaaaacccatctttctcttgatctagtagatttttctaaccaaagcggagttgttgatgtcatacaggcctgcttcacaccaggatctgtgcctttttcttcttatttgaatgcaataaaacatttttaaaagtctaac

SEQ ID NO: 31935 - DNA, 1738 bp, Homo sapiens
ggcatatgaagcttatgactgtcataagccataccaagcctgtggagtatggcatgattttcattacataatccaatgaaaatagacttattttaaatccctaactttgtagttttaatttgtatttcactatcttgaaattaacagctagtacttatccatcacagcagtctcctactgacatgaagcaagttgttgaatgcagtagagcatgaatgaaagcatttaatgtagacaaaaatgggtgatacccaagcattctgaattatttgcatcaaggaatggacatgtacataagtggcatcatttctaccaatatgtgacttgagttgtttttttaaaaaaaggagaatgactttctcaaatttgcattaaagaagtttttaagaatgttcaaatggcatgctgctttgtctggacgtgaatttattagcaagtagtaaagcacttcactaaaggaccatgaatttttgtggtttcatggattctctcttgaagggtacttttatttttttaatataattcagaaactcagaaggtaggtatgaaatattggtaggtgtttctcgcaccttcagaaagtattggaccggtcttattattataattttaacaaaatatttccaatttttgtgcttttgacatgcataaatgaccaaagttaaagggagtagtttttatcttttctaatgtgcttgaatcgaaactctctgtgcctaattaaaaagaacattaacaaactggaagcagatcttcccactgatccataatgtggtatgcatttattctgctgttcagtcagaacatttaaatcatctatgaggaatcacaaaacctctcaaagagcaataaatactttccaaccacttgggaatttaaatgaagattgaacaatagtaggggaaaaactgctgtggttctactgggaacttgcttttccttctagatgccaagtgctttaaattctaaatgtactaaatccaggagaagattttccaagtagagactgaatgaatctttgtaactaatgggaacatgattagtcacatttccaggcagctagtcaagaagtattgtttcagcgatttttcaggtagatggttttgatttgtctgttttccttttggtcctctctaggtgggctctccttctgcagactcctcttgcaaggcgtacctccaaacataattgattcgtatctgcgagacttacactcaagcaatcctgaggaatactgagggagggcctggctactgtctctctgcactctgctgctttgaaatctggttgaaatgagaaaaagcattttctgttttcccaccaggcccccaagtgtggtctttttctttcctcctaatgttgaagagaaaaaaaaaaaaaaaagtttgcccagattgcttaattaaaaattgcaaacaaaatctcatttgaagtcagcactttggtcattattatctctgctcactgtattatactttacaaaaatgcaagtcatagaataagcaaaagcagttatttttgtttacatagtaggctataaatgctttttttttcctctcagagtaaaaaacataacacaatgcaccacgactggatcttgaaaacccatctttctcttgatctagtagatttttctaaccaaagcggagttgttgatgtcatacaggcctgcttcacaccaggatctgtgcctttttcttcttatttgaatgcaataaaacatttttaaaagtctaac

SEQ ID NO: 31936 - DNA, 642 bp, Homo sapiens
agcacttcagtatgtcaactctacggggaaacagaaagcttcagggaacactcttctgcttctcctcttgcaaggcgtacctccaaacataattgattcgtatctgcgagacttacactcaagcaatcctgaggaatactgagggagggcctggctactgtctctctgcactctgctgctttgaaatctggttgaaatgagaaaaagcattttctgttttcccaccaggcccccaagtgtggtctttttctttcctcctaatgttgaagagaaaaaaaaaaaaaaaagtttgcccagattgcttaattaaaaattgcaaacaaaatctcatttgaagtcagcactttggtcattattatctctgctcactgtattatactttacaaaaatgcaagtcatagaataagcaaaagcagttatttttgtttacatagtaggctataaatgctttttttttcctctcagagtaaaaaacataacacaatgcaccacgactggatcttgaaaacccatctttctcttgatctagtagatttttctaaccaaagcggagttgttgatgtcatacaggcctgcttcacaccaggatctgtgcctttttcttcttatttgaatgcaataaaacatttttaaaagtctaac

SEQ ID NO: 31937 - DNA, 447 bp, Homo sapiens
ttttttcacattcacagactctgtttattttcatcctattcaaaacagatacatctttgaacacaaaggatgccagagaatcctgtttatcaataactgtcagatgacagatgattcagagtattatgtgacagccggtgatgagaaatgttccactgagctcttcgtaagaggtaaaaatgaaatctcttattgtggtcaccaggagctgttggcttcttctcccagggataatgatcaaagtgaaagtaactgaggctcctctacactggcagctattatggatcctaatgagtcttctggtttgttgaagaagaattaatgctggaagtgttgtggcttgtgaactgttgtgaagcagtagaaagaggattattcaaaatctgatgagtagttgtgacctcagatgtaaatgggtgtggcttatatcacatggatgaactgagg

SEQ ID NO: 31938 - DNA, 575 bp, Homo sapiens
ttttttcacattcacagactctgtttattttcatcctattcaaaacagatacatctttgaacacaaaggatgccagagaatcctgtttatcaataactgtcagatgacagatgattcagagtattatgtgacagccggtgatgagaaatgttccactgagctcttcgtaagaggtaaaaatgaaatctcttattgtggtcaccaggagctgttggcttcttctcccagggataatgatcaaagtgaaagtaactgaggctcctctacactggcagctattatggatcctaatgagtcttctggtttgttgaagacctgatagcagcactctggtcattgatatagctgaaagagatgactctggtgtttaccacatcaatctgaaaaacgaagctggagaggcacatgcaagcatcaaggttaaagttgtgggtaagtcctccaggtaaacgcacttctagaatcaagctgacatgtcaagattcagagtagactttccttctttgtcctttccttccatttccttcctttgtctttcccttatcttctttttttttcttgcctagaggacaaat

SEQ ID NO: 31939 - DNA, 367 bp, Homo sapiens
  misc_feature (335)..(335): n is a, c, g, or t
ttttttcacattcacagactctgtttattttcatcctattcaaaacagatacatctttgaacacaaaggatgccagagaatcctgtttatcaataactgtcagatgacagatgattcagagtattatgtgacagccggtgatgagaaatgttccactgagctcttcgtaagaggtaaaaatgaaatctcttattgtggtcaccaggagctgttggcttcttctcccagggataatgatcaaagtgaaagtaactgaggctcctctacactggcagctattatggatcctaatgagtcttctggtttgttgaagagacgcataaggtggccgcggncaacccccgaccctcccaccaccttccacccc

SEQ ID NO: 31940 - DNA, 656 bp, Homo sapiens
tggtcacaccgacctgcaccatctctcgcctgcctgtggggtttctgtcaactagtcgtggagggaaggagactctttaaagaataacatcttattgtggccatgccagaacccactaagaaagaggaaaatgaagtgccagccccagccccacccccggaagaaccaagtaaagagaaggaggccggaactacaccagcaaaagatgaagaggaagtctccccgcctagcgccttgcctccaggtttgggtagtcgggccctggagagaaaagattcaggtgagcgcaagcccagagaaggcatcctgacctcatcctaatacaatcactaatgagctcatttcttgaagctgtattgattctaatccttgtcttattcagattgtagtttttacggcaatctttcattacgtttcctcttacaagaaaactaatgtattgagaaacaattaattttgcatgatacacacgcattcaaggatctagccaaaaataccacaggtttgttctatcatttttaatatttagcaaatacacagagatcaatcttcattttggggatgtactaaagttagataataattcacatttttatagaactttacatacagataataaaacattttcaaatgcatcctatcagctgtagctcctg

SEQ ID NO: 31941 - DNA, 649 bp, Homo sapiens
ttatatggagatagtctcattttagaaaataatcttaatcatatacttctgttactccatgaaatgctaattcctttgtctcaccatggaagaaatgattatcattactgaccatctgtcttaagctaaggagcattagtctttcatagagggaagtttcatgaaggtggattagacagctttgctgtatatgtttgtattgtcattttaaaagtgaaccttttatttgcataatgaataaaaaagtttaaattttggaataactatttcctgactgcaacaagaagtttctctttttcctggacactgctcaaaaccatgttaagtatctctttgttcttgatgtgtcatatttcattatctaatttctatgatattcttgtgtcctatacattagtaaaatacttttttctttctttcagtagattggattactttccttcagctaacttgaacttatgctctcataatgaacgcataacgttagtatactcactttgtccttgaccttcagtggctcccatggagagtaacatgaatactaatcctggccacgtgggcgcagtttgaaggttatttgcttatggaatgcagacagtgcaaactcctagaactccttccatgggatggtttcaaggaggtttgggca

SEQ ID NO: 31942 - DNA, 4179 bp, Homo sapiens
tggtcacaccgacctgcaccatctctcgcctgcctgtggggtttctgtcaactagtcgtggagggaaggagactctttaaagaataacatcttattgtggccatgccagaacccactaagaaagaggaaaatgaagtgccagccccagccccacccccggaagaaccaagtaaagagaaggaggccggaactacaccagcaaaagatgaagaggaagtctccccgcctagcgccttgcctccaggtttgggtagtcgggccctggagagaaaagattcagactggacccttgtcgaaactcctcctggggaggaacaagccaagcagaatgccaactcccagctgtccatcttgttcattgaaaaacctcaaggaggaacagtgaaagttggtgaagatatcaccttcatagccaaagtcaaggctgaagatcttctgagaaaacccactatcaaatggttcaaaggaaaatggatggacctggccagcaaagccgggaagcaccttcagctgaaggaaacctttgagaggcacagtcgggtgtacacatttgagatgcagatcatcaaggccaaagataactttgcaggaaattacagatgcgaggtcacctataaggataagtttgacagctgttcatttgatcttgaagtgcacgaatctactgggactactccaaacattgacatcagatctgctttcaagagaagtggagaaggtcaagaggatgcaggagaacttgactttagtggtctcctgaaacgtagggaggtgaagcagcaggaggaagaaccccaggtggacgtatgggagttgctgaagaacgcgaaacccagtgagtacgagaagatcgccttccagtatggaatcaccgacctgcgcggcatgctcaagcgactcaagcgcatgcgcagagaggagaagaagagcgcagcttttgcaaaaattcttgatcctgcatatcaggttgacaaaggaggcagagtgaggtttgttgtggagctggcagatccaaagttggaggtgaaatggtataaaaatggtcaagaaattcgacccagtaccaaatacatctttgaacacaaaggatgccagagaatcctgtttatcaataactgtcagatgacagatgattcagagtattatgtgacagccggtgatgagaaatgttccactgagctcttcgtaagagagcctccaattatggtgaccaaacagctggaagatacaactgcttattgtggggagagagtggaattagaatgtgaggtgtctgaagatgatgccaatgtaaaatggtttaagaatggtgaagagattatccctggtccaaaatcaagataccgaattagagttgagggtaaaaaacacatcttgatcatagagggagcaacaaaggctgatgctgcagaatattcagtaatgacaacaggaggacaatcatctgctaaacttagtgttgacttgaaacctctgaagattttgacacctctgactgatcagactgtaaatcttggaaaagaaatctgcctgaagtgtgaaatctctgaaaacataccaggaaaatggactaaaaatggcctacctgttcaggagagtgaccgtctaaaggtggttcacaagggaaggatccacaagttagtgatagccaatgccctcactgaagatgaaggtgattatgtatttgcacctgatgcctacaatgttactctgcctgccaaagttcatgttattgatcctcctaagatcatcctggatggtcttgatgctgacaacacagtgacagtgattgcaggaaacaagcttcgtcttgagatccccatcagcggagaaccacctcctaaagccatgtggagccggggagataaggctattatggaaggcagtggccggataagaacagaatcttaccctgatagcagcactctggtcattgatatagctgaaagagatgactctggtgtttaccacatcaatctgaaaaacgaagctggagaggcacatgcaagcatcaaggttaaagttgtggacttccctgatcctccagtggcaccgactgtgacagaggtgggagatgactggtgtatcatgaactgggagcctcctgcctacgacggaggctctccaatcctaggatattttattgagaggaagaagaaacaaagctccaggtggatgaggctgaattttgatctctgcaaagaaacaacttttgagcccaagaagatgattgaaggtgtggcctatgaggtccgcatctttgcagtcaatgccattggcatctccaagcccagtatgccctccaggccttttgttcctttggctgtaacaagccctcctactcttctgactgtggactctgtcactgacacgactgtcacgatgaggtggcgccccccagaccacattggtgcagcaggtttagatggctatgtgctagagtattgctttgaaggaactgaggactggatagttgcaaacaaagatctgattgacaagacgaagttcaccatcacaggtctgccaacagatgcaaagatctttgtgcgtgtgaaggctgttaatgcagctggtgccagcgagcccaagtactattctcagcccattctcgtgaaggaaatcatagaacctccaaagattcgcatcccaagacacctgaagcaaacctatatccgcagagttggagaagctgtcaatctggttatacctttccagggaaaaccaagaccagaattaacttggaagaaggatggtgcagaaattgataagaatcaaataaacattcgcaactctgagactgatacaatcatatttattagaaaagcagagaggagccactctgggaaatatgatctgcaagtcaaagtggacaaattcgtggagaccgcatcaattgacatccagatcattgaccgtccaggtccaccccaaattgtgaagattgaggatgtctggggagaaaatgtcgctctcacatggactccaccaaaggatgatggaaatgctgctatcacaggctataccattcagaaggctgacaagaagagcatggaatggtttactgtcattgagcattatcatcgaaccagtgccaccattactgaattggtcatagggaatgaatattacttccgggtcttttctgaaaacatgtgtggcctcagtgaggatgccaccatgactaaagagagtgcagtgatcgccagggatggtaaaatctacaaaaatccagtgtatgaagactttgatttctcagaggcacccatgtttactcagcctttggttaacacctatgccatagctggttacaatgccaccctaaactgcagtgtgagaggaaatcctaagcctaaaataacctggatgaaaaacaaagttgctattgtggatgatccaagatacaggatgttcagcaaccagggagtctgtaccctggaaattcgcaagcccagcccctatgatggaggcacttactgctgcaaagcagtcaatgaccttgggacagtggagattgaatgcaaactggaggtgaaagtcattgcacaataaggatttttgaatgtataatatcatctaaggtgggctctccttctgcagactcctcttgcaaggcgtacctccaaacataattgattcgtatctgcgagacttacactcaagcaatcctgaggaatactgagggagggcctggctactgtctctctgcactctgctgctttgaaatctggttgaaatgagaaaaagcattttctgttttcccaccaggcccccaagtgtggtctttttctttcctcctaatgttgaagagaaaaaaaaaaaaaaaagtttgcccagattgcttaattaaaaattgcaaacaaaatctcatttgaagtcagcactttggtcattattatctctgctcactgtattatactttacaaaaatgcaagtcatagaataagcaaaagcagttatttttgtttacatagtaggctataaatgctttttttttcctctcagagtaaaaaacataacacaatgcaccacgactggatcttgaaaacccatctttctcttgatctagtagatttttctaaccaaagcggagttgttgatgtcatacaggcctgcttcacaccaggatctgtgcctttttcttcttatttgaatgcaataaaacatttttaaaagtctaac

SEQ ID NO: 31943 - DNA, 4307 bp, Homo sapiens
aatgtagttgtatcgatgtggccttatagtccatcacctagaaaaacaccaagagtactgcttgaatacactggccaccattgtttacctgttaggggacaggcaagatggggaagcaaaggaattattgccatcaaagagagaataacagcttacctggaaagttccactatttctaagaattacataatgttcatttgccccatcatggaagagatacccctgtaagaatgggaatctgttcccctctactgatggctgctgggggcagaaagaatgatgttgtatttatctaggtttattagacaaagaaaagctacagcgttggtgagaacaacaaatccaggtaagactgcctaagaagagcctggccctgaaataatccttttcctcctttctgctcatcagactggacccttgtcgaaactcctcctggggaggaacaagccaagcagaatgccaactcccagctgtccatcttgttcattgaaaaacctcaaggaggaacagtgaaagttggtgaagatatcaccttcatagccaaagtcaaggctgaagatcttctgagaaaacccactatcaaatggttcaaaggaaaatggatggacctggccagcaaagccgggaagcaccttcagctgaaggaaacctttgagaggcacagtcgggtgtacacatttgagatgcagatcatcaaggccaaagataactttgcaggaaattacagatgcgaggtcacctataaggataagtttgacagctgttcatttgatcttgaagtgcacgaatctactgggactactccaaacattgacatcagatctgctttcaagagaagtggagaaggtcaagaggatgcaggagaacttgactttagtggtctcctgaaacgtagggaggtgaagcagcaggaggaagaaccccaggtggacgtatgggagttgctgaagaacgcgaaacccagtgagtacgagaagatcgccttccagtatggaatcaccgacctgcgcggcatgctcaagcgactcaagcgcatgcgcagagaggagaagaagagcgcagcttttgcaaaaattcttgatcctgcatatcaggttgacaaaggaggcagagtgaggtttgttgtggagctggcagatccaaagttggaggtgaaatggtataaaaatggtcaagaaattcgacccagtaccaaatacatctttgaacacaaaggatgccagagaatcctgtttatcaataactgtcagatgacagatgattcagagtattatgtgacagccggtgatgagaaatgttccactgagctcttcgtaagagagcctccaattatggtgaccaaacagctggaagatacaactgcttattgtggggagagagtggaattagaatgtgaggtgtctgaagatgatgccaatgtaaaatggtttaagaatggtgaagagattatccctggtccaaaatcaagataccgaattagagttgagggtaaaaaacacatcttgatcatagagggagcaacaaaggctgatgctgcagaatattcagtaatgacaacaggaggacaatcatctgctaaacttagtgttgacttgaaacctctgaagattttgacacctctgactgatcagactgtaaatcttggaaaagaaatctgcctgaagtgtgaaatctctgaaaacataccaggaaaatggactaaaaatggcctacctgttcaggagagtgaccgtctaaaggtggttcacaagggaaggatccacaagttagtgatagccaatgccctcactgaagatgaaggtgattatgtatttgcacctgatgcctacaatgttactctgcctgccaaagttcatgttattgatcctcctaagatcatcctggatggtcttgatgctgacaacacagtgacagtgattgcaggaaacaagcttcgtcttgagatccccatcagcggagaaccacctcctaaagccatgtggagccggggagataaggctattatggaaggcagtggccggataagaacagaatcttaccctgatagcagcactctggtcattgatatagctgaaagagatgactctggtgtttaccacatcaatctgaaaaacgaagctggagaggcacatgcaagcatcaaggttaaagttgtggacttccctgatcctccagtggcaccgactgtgacagaggtgggagatgactggtgtatcatgaactgggagcctcctgcctacgacggaggctctccaatcctaggatattttattgagaggaagaagaaacaaagctccaggtggatgaggctgaattttgatctctgcaaagaaacaacttttgagcccaagaagatgattgaaggtgtggcctatgaggtccgcatctttgcagtcaatgccattggcatctccaagcccagtatgccctccaggccttttgttcctttggctgtaacaagccctcctactcttctgactgtggactctgtcactgacacgactgtcacgatgaggtggcgccccccagaccacattggtgcagcaggtttagatggctatgtgctagagtattgctttgaaggaactgaggactggatagttgcaaacaaagatctgattgacaagacgaagttcaccatcacaggtctgccaacagatgcaaagatctttgtgcgtgtgaaggctgttaatgcagctggtgccagcgagcccaagtactattctcagcccattctcgtgaaggaaatcatagaacctccaaagattcgcatcccaagacacctgaagcaaacctatatccgcagagttggagaagctgtcaatctggttatacctttccagggaaaaccaagaccagaattaacttggaagaaggatggtgcagaaattgataagaatcaaataaacattcgcaactctgagactgatacaatcatatttattagaaaagcagagaggagccactctgggaaatatgatctgcaagtcaaagtggacaaattcgtggagaccgcatcaattgacatccagatcattgaccgtccaggtccaccccaaattgtgaagattgaggatgtctggggagaaaatgtcgctctcacatggactccaccaaaggatgatggaaatgctgctatcacaggctataccattcagaaggctgacaagaagagcatggaatggtttactgtcattgagcattatcatcgaaccagtgccaccattactgaattggtcatagggaatgaatattacttccgggtcttttctgaaaacatgtgtggcctcagtgaggatgccaccatgactaaagagagtgcagtgatcgccagggatggtaaaatctacaaaaatccagtgtatgaagactttgatttctcagaggcacccatgtttactcagcctttggttaacacctatgccatagctggttacaatgccaccctaaactgcagtgtgagaggaaatcctaagcctaaaataacctggatgaaaaacaaagttgctattgtggatgatccaagatacaggatgttcagcaaccagggagtctgtaccctggaaattcgcaagcccagcccctatgatggaggcacttactgctgcaaagcagtcaatgaccttgggacagtggagattgaatgcaaactggaggtgaaagtcattgcacaataaggatttttgaatgtataatatcatctaaggtgggctctccttctgcagactcctcttgcaaggcgtacctccaaacataattgattcgtatctgcgagacttacactcaagcaatcctgaggaatactgagggagggcctggctactgtctctctgcactctgctgctttgaaatctggttgaaatgagaaaaagcattttctgttttcccaccaggcccccaagtgtggtctttttctttcctcctaatgttgaagagaaaaaaaaaaaaaaaagtttgcccagattgcttaattaaaaattgcaaacaaaatctcatttgaagtcagcactttggtcattattatctctgctcactgtattatactttacaaaaatgcaagtcatagaataagcaaaagcagttatttttgtttacatagtaggctataaatgctttttttttcctctcagagtaaaaaacataacacaatgcaccacgactggatcttgaaaacccatctttctcttgatctagtagatttttctaaccaaagcggagttgttgatgtcatacaggcctgcttcacaccaggatctgtgcctttttcttcttatttgaatgcaataaaacatttttaaaagtctaac

SEQ ID NO: 31944 - DNA, 4026 bp, Homo sapiens
tggtcacaccgacctgcaccatctctcgcctgcctgtggggtttctgtcaactagtcgtggagggaaggagactctttaaagaataacatcttattgtggccatgccagaacccactaagaaagaggactggacccttgtcgaaactcctcctggggaggaacaagccaagcagaatgccaactcccagctgtccatcttgttcattgaaaaacctcaaggaggaacagtgaaagttggtgaagatatcaccttcatagccaaagtcaaggctgaagatcttctgagaaaacccactatcaaatggttcaaaggaaaatggatggacctggccagcaaagccgggaagcaccttcagctgaaggaaacctttgagaggcacagtcgggtgtacacatttgagatgcagatcatcaaggccaaagataactttgcaggaaattacagatgcgaggtcacctataaggataagtttgacagctgttcatttgatcttgaagtgcacgaatctactgggactactccaaacattgacatcagatctgctttcaagagaagtggagaaggtcaagaggatgcaggagaacttgactttagtggtctcctgaaacgtagggaggtgaagcagcaggaggaagaaccccaggtggacgtatgggagttgctgaagaacgcgaaacccagtgagtacgagaagatcgccttccagtatggaatcaccgacctgcgcggcatgctcaagcgactcaagcgcatgcgcagagaggagaagaagagcgcagcttttgcaaaaattcttgatcctgcatatcaggttgacaaaggaggcagagtgaggtttgttgtggagctggcagatccaaagttggaggtgaaatggtataaaaatggtcaagaaattcgacccagtaccaaatacatctttgaacacaaaggatgccagagaatcctgtttatcaataactgtcagatgacagatgattcagagtattatgtgacagccggtgatgagaaatgttccactgagctcttcgtaagagagcctccaattatggtgaccaaacagctggaagatacaactgcttattgtggggagagagtggaattagaatgtgaggtgtctgaagatgatgccaatgtaaaatggtttaagaatggtgaagagattatccctggtccaaaatcaagataccgaattagagttgagggtaaaaaacacatcttgatcatagagggagcaacaaaggctgatgctgcagaatattcagtaatgacaacaggaggacaatcatctgctaaacttagtgttgacttgaaacctctgaagattttgacacctctgactgatcagactgtaaatcttggaaaagaaatctgcctgaagtgtgaaatctctgaaaacataccaggaaaatggactaaaaatggcctacctgttcaggagagtgaccgtctaaaggtggttcacaagggaaggatccacaagttagtgatagccaatgccctcactgaagatgaaggtgattatgtatttgcacctgatgcctacaatgttactctgcctgccaaagttcatgttattgatcctcctaagatcatcctggatggtcttgatgctgacaacacagtgacagtgattgcaggaaacaagcttcgtcttgagatccccatcagcggagaaccacctcctaaagccatgtggagccggggagataaggctattatggaaggcagtggccggataagaacagaatcttaccctgatagcagcactctggtcattgatatagctgaaagagatgactctggtgtttaccacatcaatctgaaaaacgaagctggagaggcacatgcaagcatcaaggttaaagttgtggacttccctgatcctccagtggcaccgactgtgacagaggtgggagatgactggtgtatcatgaactgggagcctcctgcctacgacggaggctctccaatcctaggatattttattgagaggaagaagaaacaaagctccaggtggatgaggctgaattttgatctctgcaaagaaacaacttttgagcccaagaagatgattgaaggtgtggcctatgaggtccgcatctttgcagtcaatgccattggcatctccaagcccagtatgccctccaggccttttgttcctttggctgtaacaagccctcctactcttctgactgtggactctgtcactgacacgactgtcacgatgaggtggcgccccccagaccacattggtgcagcaggtttagatggctatgtgctagagtattgctttgaaggaactgaggactggatagttgcaaacaaagatctgattgacaagacgaagttcaccatcacaggtctgccaacagatgcaaagatctttgtgcgtgtgaaggctgttaatgcagctggtgccagcgagcccaagtactattctcagcccattctcgtgaaggaaatcatagaacctccaaagattcgcatcccaagacacctgaagcaaacctatatccgcagagttggagaagctgtcaatctggttatacctttccagggaaaaccaagaccagaattaacttggaagaaggatggtgcagaaattgataagaatcaaataaacattcgcaactctgagactgatacaatcatatttattagaaaagcagagaggagccactctgggaaatatgatctgcaagtcaaagtggacaaattcgtggagaccgcatcaattgacatccagatcattgaccgtccaggtccaccccaaattgtgaagattgaggatgtctggggagaaaatgtcgctctcacatggactccaccaaaggatgatggaaatgctgctatcacaggctataccattcagaaggctgacaagaagagcatggaatggtttactgtcattgagcattatcatcgaaccagtgccaccattactgaattggtcatagggaatgaatattacttccgggtcttttctgaaaacatgtgtggcctcagtgaggatgccaccatgactaaagagagtgcagtgatcgccagggatggtaaaatctacaaaaatccagtgtatgaagactttgatttctcagaggcacccatgtttactcagcctttggttaacacctatgccatagctggttacaatgccaccctaaactgcagtgtgagaggaaatcctaagcctaaaataacctggatgaaaaacaaagttgctattgtggatgatccaagatacaggatgttcagcaaccagggagtctgtaccctggaaattcgcaagcccagcccctatgatggaggcacttactgctgcaaagcagtcaatgaccttgggacagtggagattgaatgcaaactggaggtgaaagtcattgcacaataaggatttttgaatgtataatatcatctaaggtgggctctccttctgcagactcctcttgcaaggcgtacctccaaacataattgattcgtatctgcgagacttacactcaagcaatcctgaggaatactgagggagggcctggctactgtctctctgcactctgctgctttgaaatctggttgaaatgagaaaaagcattttctgttttcccaccaggcccccaagtgtggtctttttctttcctcctaatgttgaagagaaaaaaaaaaaaaaaagtttgcccagattgcttaattaaaaattgcaaacaaaatctcatttgaagtcagcactttggtcattattatctctgctcactgtattatactttacaaaaatgcaagtcatagaataagcaaaagcagttatttttgtttacatagtaggctataaatgctttttttttcctctcagagtaaaaaacataacacaatgcaccacgactggatcttgaaaacccatctttctcttgatctagtagatttttctaaccaaagcggagttgttgatgtcatacaggcctgcttcacaccaggatctgtgcctttttcttcttatttgaatgcaataaaacatttttaaaagtctaac

SEQ ID NO: 31945 - DNA, 3243 bp, Homo sapiens
cacatcaatctgaaaaacgaagctggagaggcacatgcaagcatcaaggtgaggtttgttgtggagctggcagatccaaagttggaggtgaaatggtataaaaatggtcaagaaattcgacccagtaccaaatacatctttgaacacaaaggatgccagagaatcctgtttatcaataactgtcagatgacagatgattcagagtattatgtgacagccggtgatgagaaatgttccactgagctcttcgtaagagagcctccaattatggtgaccaaacagctggaagatacaactgcttattgtggggagagagtggaattagaatgtgaggtgtctgaagatgatgccaatgtaaaatggtttaagaatggtgaagagattatccctggtccaaaatcaagataccgaattagagttgagggtaaaaaacacatcttgatcatagagggagcaacaaaggctgatgctgcagaatattcagtaatgacaacaggaggacaatcatctgctaaacttagtgttgacttgaaacctctgaagattttgacacctctgactgatcagactgtaaatcttggaaaagaaatctgcctgaagtgtgaaatctctgaaaacataccaggaaaatggactaaaaatggcctacctgttcaggagagtgaccgtctaaaggtggttcacaagggaaggatccacaagttagtgatagccaatgccctcactgaagatgaaggtgattatgtatttgcacctgatgcctacaatgttactctgcctgccaaagttcatgttattgatcctcctaagatcatcctggatggtcttgatgctgacaacacagtgacagtgattgcaggaaacaagcttcgtcttgagatccccatcagcggagaaccacctcctaaagccatgtggagccggggagataaggctattatggaaggcagtggccggataagaacagaatcttaccctgatagcagcactctggtcattgatatagctgaaagagatgactctggtgtttaccacatcaatctgaaaaacgaagctggagaggcacatgcaagcatcaaggttaaagttgtggacttccctgatcctccagtggcaccgactgtgacagaggtgggagatgactggtgtatcatgaactgggagcctcctgcctacgacggaggctctccaatcctaggatattttattgagaggaagaagaaacaaagctccaggtggatgaggctgaattttgatctctgcaaagaaacaacttttgagcccaagaagatgattgaaggtgtggcctatgaggtccgcatctttgcagtcaatgccattggcatctccaagcccagtatgccctccaggccttttgttcctttggctgtaacaagccctcctactcttctgactgtggactctgtcactgacacgactgtcacgatgaggtggcgccccccagaccacattggtgcagcaggtttagatggctatgtgctagagtattgctttgaaggaactgaggactggatagttgcaaacaaagatctgattgacaagacgaagttcaccatcacaggtctgccaacagatgcaaagatctttgtgcgtgtgaaggctgttaatgcagctggtgccagcgagcccaagtactattctcagcccattctcgtgaaggaaatcatagaacctccaaagattcgcatcccaagacacctgaagcaaacctatatccgcagagttggagaagctgtcaatctggttatacctttccagggaaaaccaagaccagaattaacttggaagaaggatggtgcagaaattgataagaatcaaataaacattcgcaactctgagactgatacaatcatatttattagaaaagcagagaggagccactctgggaaatatgatctgcaagtcaaagtggacaaattcgtggagaccgcatcaattgacatccagatcattgaccgtccaggtccaccccaaattgtgaagattgaggatgtctggggagaaaatgtcgctctcacatggactccaccaaaggatgatggaaatgctgctatcacaggctataccattcagaaggctgacaagaagagcatggaatggtttactgtcattgagcattatcatcgaaccagtgccaccattactgaattggtcatagggaatgaatattacttccgggtcttttctgaaaacatgtgtggcctcagtgaggatgccaccatgactaaagagagtgcagtgatcgccagggatggtaaaatctacaaaaatccagtgtatgaagactttgatttctcagaggcacccatgtttactcagcctttggttaacacctatgccatagctggttacaatgccaccctaaactgcagtgtgagaggaaatcctaagcctaaaataacctggatgaaaaacaaagttgctattgtggatgatccaagatacaggatgttcagcaaccagggagtctgtaccctggaaattcgcaagcccagcccctatgatggaggcacttactgctgcaaagcagtcaatgaccttgggacagtggagattgaatgcaaactggaggtgaaagtcattgcacaataaggatttttgaatgtataatatcatctaaggtgggctctccttctgcagactcctcttgcaaggcgtacctccaaacataattgattcgtatctgcgagacttacactcaagcaatcctgaggaatactgagggagggcctggctactgtctctctgcactctgctgctttgaaatctggttgaaatgagaaaaagcattttctgttttcccaccaggcccccaagtgtggtctttttctttcctcctaatgttgaagagaaaaaaaaaaaaaaaagtttgcccagattgcttaattaaaaattgcaaacaaaatctcatttgaagtcagcactttggtcattattatctctgctcactgtattatactttacaaaaatgcaagtcatagaataagcaaaagcagttatttttgtttacatagtaggctataaatgctttttttttcctctcagagtaaaaaacataacacaatgcaccacgactggatcttgaaaacccatctttctcttgatctagtagatttttctaaccaaagcggagttgttgatgtcatacaggcctgcttcacaccaggatctgtgcctttttcttcttatttgaatgcaataaaacatttttaaaagtctaac

SEQ ID NO: 31946 - DNA, 4136 bp, Homo sapiens
tggtcacaccgacctgcaccatctctcgcctgcctgtggggtttctgtcaactagtcgtggagggaaggagactctttaaagaataacatcttattgtggccatgccagaacccactaagaaagaggaaaatgaagtgccagccccagccccacccccggaagaaccaagtaaagagaaggaggccggaactacaccagcaaaagatgaagaggaagtctccccgcctagcgccttgcctccaggtttgggtagtcgggccctggagagaaaagattcagactggacccttgtcgaaactcctcctggggaggaacaagccaagcagaatgccaactcccagctgtccatcttgttcattgaaaaacctcaaggaggaacagtgaaagttggtgaagatatcaccttcatagccaaagtcaaggctgaagatcttctgagaaaacccactatcaaatggttcaaaggaaaatggatggacctggccagcaaagccgggaagcaccttcagctgaaggaaacctttgagaggcacagtcgggtgtacacatttgagatgcagatcatcaaggccaaagataactttgcaggaaattacagatgcgaggtcacctataaggataagtttgacagctgttcatttgatcttgaagtgcacgaatctactgggactactccaaacattgacatcagatctgctttcaagagaagtggagaaggtcaagaggatgcaggagaacttgactttagtggtctcctgaaacgtagggaggtgaagcagcaggaggaagaaccccaggtggacgtatgggagttgctgaagaacgcgaaacccagtgagtacgagaagatcgccttccagtatggaatcaccgacctgcgcggcatgctcaagcgactcaagcgcatgcgcagagaggagaagaagagcgcagcttttgcaaaaattcttgatcctgcatatcaggttgacaaaggaggcagagtgaggtttgttgtggagctggcagatccaaagttggaggtgaaatggtataaaaatggtcaagaaattcgacccagtaccaaatacatctttgaacacaaaggatgccagagaatcctgtttatcaataactgtcagatgacagatgattcagagtattatgtgacagccggtgatgagaaatgttccactgagctcttcgtaagagagcctccaattatggtgaccaaacagctggaagatacaactgcttattgtggggagagagtggaattagaatgtgaggtgtctgaagatgatgccaatgtaaaatggtttaagaatggtgaagagattatccctggtccaaaatcaagataccgaattagagttgagggtaaaaaacacatcttgatcatagagggagcaacaaaggctgatgctgcagaatattcagtaatgacaacaggaggacaatcatctgctaaacttagtgttgacttgaaacctctgaagattttgacacctctgactgatcagactgtaaatcttggaaaagaaatctgcctgaagtgtgaaatctctgaaaacataccaggaaaatggactaaaaatggcctacctgttcaggagagtgaccgtctaaaggtggttcacaagggaaggatccacaagttagtgatagccaatgccctcactgaagatgaaggtgattatgtatttgcacctgatgcctacaatgttactctgcctgccaaagttcatgttattgatcctcctaagatcatcctggatggtcttgatgctgacaacacagtgacagtgattgcaggaaacaagcttcgtcttgagatccccatcagcggagaaccacctcctaaagccatgtggagccggggagataaggctattatggaaggcagtggccggataagaacagaatcttaccctgatagcagcactctggtcattgatatagctgaaagagatgactctggtgtttaccacatcaatctgaaaaacgaagctggagaggcacatgcaagcatcaaggttaaagttgtggacttccctgatcctccagtggcaccgactgtgacagaggtgggagatgactggtgtatcatgaactgggagcctcctgcctacgacggaggctctccaatcctaggatattttattgagaggaagaagaaacaaagctccaggtggatgaggctgaattttgatctctgcaaagaaacaacttttgagcccaagaagatgattgaaggtgtggcctatgaggtccgcatctttgcagtcaatgccattggcatctccaagcccagtatgccctccaggccttttgttcctttggctgtaacaagccctcctactcttctgactgtggactctgtcactgacacgactgtcacgatgaggtggcgccccccagaccacattggtgcagcaggtttagatggctatgtgctagagtattgctttgaaggaactgaggactggatagttgcaaacaaagatctgattgacaagacgaagttcaccatcacaggtctgccaacagatgcaaagatctttgtgcgtgtgaaggctgttaatgcagctggtgccagcgagcccaagtactattctcagcccattctcgtgaaggaaatcatagaacctccaaagattcgcatcccaagacacctgaagcaaacctatatccgcagagttggagaagctgtcaatctggttatacctttccagggaaaaccaagaccagaattaacttggaagaaggatggtgcagaaattgataagaatcaaataaacattcgcaactctgagactgatacaatcatatttattagaaaagcagagaggagccactctgggaaatatgatctgcaagtcaaagtggacaaattcgtggagaccgcatcaattgacatccagatcattgaccgtccaggtccaccccaaattgtgaagattgaggatgtctggggagaaaatgtcgctctcacatggactccaccaaaggatgatggaaatgctgctatcacaggctataccattcagaaggctgacaagaagagcatggaatggtttactgtcattgagcattatcatcgaaccagtgccaccattactgaattggtcatagggaatgaatattacttccgggtcttttctgaaaacatgtgtggcctcagtgaggatgccaccatgactaaagagagtgcagtgatcgccagggatggtaaaatctacaaaaatccagtgtatgaagactttgatttctcagaggcacccatgtttactcagcctttggttaacacctatgccatagctggttacaatgccaccctaaactgcagtgtgagaggaaatcctaagcctaaaataacctggatgaaaaacaaagttgctattgtggatgatccaagatacaggatgttcagcaaccagggagtctgtaccctggaaattcgcaagcccagcccctatgatggaggcacttactgctgcaaagcagtcaatgaccttgggacagtggagattgaatgcaaactggaggtgaaaggtgggctctccttctgcagactcctcttgcaaggcgtacctccaaacataattgattcgtatctgcgagacttacactcaagcaatcctgaggaatactgagggagggcctggctactgtctctctgcactctgctgctttgaaatctggttgaaatgagaaaaagcattttctgttttcccaccaggcccccaagtgtggtctttttctttcctcctaatgttgaagagaaaaaaaaaaaaaaaagtttgcccagattgcttaattaaaaattgcaaacaaaatctcatttgaagtcagcactttggtcattattatctctgctcactgtattatactttacaaaaatgcaagtcatagaataagcaaaagcagttatttttgtttacatagtaggctataaatgctttttttttcctctcagagtaaaaaacataacacaatgcaccacgactggatcttgaaaacccatctttctcttgatctagtagatttttctaaccaaagcggagttgttgatgtcatacaggcctgcttcacaccaggatctgtgcctttttcttcttatttgaatgcaataaaacatttttaaaagtctaac

SEQ ID NO: 31947 - DNA, 2582 bp, Homo sapiens
ttttttcacattcacagactctgtttattttcatcctattcaaaacagatacatctttgaacacaaaggatgccagagaatcctgtttatcaataactgtcagatgacagatgattcagagtattatgtgacagccggtgatgagaaatgttccactgagctcttcgtaagaggtaaaaatgaaatctcttattgtggtcaccaggagctgttggcttcttctcccagggataatgatcaaagtgaaagtaactgaggctcctctacactggcagctattatggatcctaatgagtcttctggtttgttgaagacctgatagcagcactctggtcattgatatagctgaaagagatgactctggtgtttaccacatcaatctgaaaaacgaagctggagaggcacatgcaagcatcaaggttaaagttgtggacttccctgatcctccagtggcaccgactgtgacagaggtgggagatgactggtgtatcatgaactgggagcctcctgcctacgacggaggctctccaatcctaggatattttattgagaggaagaagaaacaaagctccaggtggatgaggctgaattttgatctctgcaaagaaacaacttttgagcccaagaagatgattgaaggtgtggcctatgaggtccgcatctttgcagtcaatgccattggcatctccaagcccagtatgccctccaggccttttgttcctttggctgtaacaagccctcctactcttctgactgtggactctgtcactgacacgactgtcacgatgaggtggcgccccccagaccacattggtgcagcaggtttagatggctatgtgctagagtattgctttgaaggaactgaggactggatagttgcaaacaaagatctgattgacaagacgaagttcaccatcacaggtctgccaacagatgcaaagatctttgtgcgtgtgaaggctgttaatgcagctggtgccagcgagcccaagtactattctcagcccattctcgtgaaggaaatcatagaacctccaaagattcgcatcccaagacacctgaagcaaacctatatccgcagagttggagaagctgtcaatctggttatacctttccagggaaaaccaagaccagaattaacttggaagaaggatggtgcagaaattgataagaatcaaataaacattcgcaactctgagactgatacaatcatatttattagaaaagcagagaggagccactctgggaaatatgatctgcaagtcaaagtggacaaattcgtggagaccgcatcaattgacatccagatcattgaccgtccaggtccaccccaaattgtgaagattgaggatgtctggggagaaaatgtcgctctcacatggactccaccaaaggatgatggaaatgctgctatcacaggctataccattcagaaggctgacaagaagagcatggaatggtttactgtcattgagcattatcatcgaaccagtgccaccattactgaattggtcatagggaatgaatattacttccgggtcttttctgaaaacatgtgtggcctcagtgaggatgccaccatgactaaagagagtgcagtgatcgccagggatggtaaaatctacaaaaatccagtgtatgaagactttgatttctcagaggcacccatgtttactcagcctttggttaacacctatgccatagctggttacaatgccaccctaaactgcagtgtgagaggaaatcctaagcctaaaataacctggatgaaaaacaaagttgctattgtggatgatccaagatacaggatgttcagcaaccagggagtctgtaccctggaaattcgcaagcccagcccctatgatggaggcacttactgctgcaaagcagtcaatgaccttgggacagtggagattgaatgcaaactggaggtgaaagtcattgcacaataaggatttttgaatgtataatatcatctaaggtgggctctccttctgcagactcctcttgcaaggcgtacctccaaacataattgattcgtatctgcgagacttacactcaagcaatcctgaggaatactgagggagggcctggctactgtctctctgcactctgctgctttgaaatctggttgaaatgagaaaaagcattttctgttttcccaccaggcccccaagtgtggtctttttctttcctcctaatgttgaagagaaaaaaaaaaaaaaaagtttgcccagattgcttaattaaaaattgcaaacaaaatctcatttgaagtcagcactttggtcattattatctctgctcactgtattatactttacaaaaatgcaagtcatagaataagcaaaagcagttatttttgtttacatagtaggctataaatgctttttttttcctctcagagtaaaaaacataacacaatgcaccacgactggatcttgaaaacccatctttctcttgatctagtagatttttctaaccaaagcggagttgttgatgtcatacaggcctgcttcacaccaggatctgtgcctttttcttcttatttgaatgcaataaaacatttttaaaagtctaac

SEQ ID NO: 31948 - DNA, 2540 bp, Homo sapiens
  misc_feature (2464)..(2464): n is a, c, g, or t
  misc_feature (2469)..(2469): n is a, c, g, or t
  misc_feature (2497)..(2497): n is a, c, g, or t
  misc_feature (2500)..(2500): n is a, c, g, or t
  misc_feature (2514)..(2514): n is a, c, g, or t
tggtcacaccgacctgcaccatctctcgcctgcctgtggggtttctgtcaactagtcgtggagggaaggagactctttaaagaataacatcttattgtggccatgccagaacccactaagaaagaggaaaatgaagtgccagccccagccccacccccggaagaaccaagtaaagagaaggaggccggaactacaccagcaaaagatgaagaggaagtctccccgcctagcgccttgcctccaggtttgggtagtcgggccctggagagaaaagattcagactggacccttgtcgaaactcctcctggggaggaacaagccaagcagaatgccaactcccagctgtccatcttgttcattgaaaaacctcaaggaggaacagtgaaagttggtgaagatatcaccttcatagccaaagtcaaggctgaagatcttctgagaaaacccactatcaaatggttcaaaggaaaatggatggacctggccagcaaagccgggaagcaccttcagctgaaggaaacctttgagaggcacagtcgggtgtacacatttgagatgcagatcatcaaggccaaagataactttgcaggaaattacagatgcgaggtcacctataaggataagtttgacagctgttcatttgatcttgaagtgcacgaatctactgggactactccaaacattgacatcagatctgctttcaagagaagtggagaaggtcaagaggatgcaggagaacttgactttagtggtctcctgaaacgtagggaggtgaagcagcaggaggaagaaccccaggtggacgtatgggagttgctgaagaacgcgaaacccagtgagtacgagaagatcgccttccagtatggaatcaccgacctgcgcggcatgctcaagcgactcaagcgcatgcgcagagaggagaagaagagcgcagcttttgcaaaaattcttgatcctgcatatcaggttgacaaaggaggcagagtgaggtttgttgtggagctggcagatccaaagttggaggtgaaatggtataaaaatggtcaagaaattcgacccagtaccaaatacatctttgaacacaaaggatgccagagaatcctgtttatcaataactgtcagatgacagatgattcagagtattatgtgacagccggtgatgagaaatgttccactgagctcttcgtaagagagcctccaattatggtgaccaaacagctggaagatacaactgcttattgtggggagagagtggaattagaatgtgaggtgtctgaagatgatgccaatgtaaaatggtttaagaatggtgaagagattatccctggtccaaaatcaagataccgaattagagttgagggtaaaaaacacatcttgatcatagagggagcaacaaaggctgatgctgcagaatattcagtaatgacaacaggaggacaatcatctgctaaacttagtgttgacttgaaacctctgaagattttgacacctctgactgatcagactgtaaatcttggaaaagaaatctgcctgaagtgtgaaatctctgaaaacataccaggaaaatggactaaaaatggcctacctgttcaggagagtgaccgtctaaaggtggttcacaagggaaggatccacaagttagtgatagccaatgccctcactgaagatgaaggtgattatgtatttgcacctgatgcctacaatgttactctgcctgccaaagttcatgttattgatcctcctaagatcatcctggatggtcttgatgctgacaacacagtgacagtgattgcaggaaacaagcttcgtcttgagatccccatcagcggagaaccacctcctaaagccatgtggagccggggagataaggctattatggaaggcagtggccggataagaacagaatcttaccctgatagcagcactctggtcattgatatagctgaaagagatgactctggtgtttaccacatcaatctgaaaaacgaagctggagaggcacatgcaagcatcaaggttaaagttgtggacttccctgatcctccagtggcaccgactgtgacagaggtgggagatgactggtgtatcatgaactgggagcctcctgcctacgacggaggctctccaatcctaggatattttattgagaggaagaagaaacaaagctccaggtggatgaggctgaattttgatctctgcaaagaaacaacttttgagcccaagaagatgattgaaggtgtggcctatgaggtccgcatctttgcagtcaatgccattggcatctccaagcccagtatgccctccaggccttttgttcctttggctgtaacaagccctcctactcttctgactgtggactctgtcactgacacgactgtcacgatgaggtggcgccccccagaccacattggtgcagcaggtttagatggctatgtgctagagtattgctttgaaggaagaggantgganagttgcaaatgtttatttgaatcttatnaanttctgcaccatccntcttccaagttaaatctggtcttggg

SEQ ID NO: 31949 - DNA, 1279 bp, Homo sapiens
tggtcacaccgacctgcaccatctctcgcctgcctgtggggtttctgtcaactagtcgtggagggaaggagactctttaaagaataacatcttattgtggccatgccagaacccactaagaaagaggaaaatgaagtgccagccccagccccacccccggaaggtgagtaaaaacactcactcacacacgtttgggctgcaaatacagagggtccatcccagcatgatttggcctccacgggtgctgtgagctgtgagctttaacctaactcctactgagaagttggatggtgaccattgtgataagttgagaataataaaaataatacactgtgtttatataatcctcttgtgttaatctaatttggatggcacttcatatatattagggggacaattcttatgaaacctttcaaattatgtaaaagttattatgtccgcattttacagtgtggaggctgagcctccatccaaggggctgaagaatttgtgaggctttttcctatatagtgaaggtcaaacaaacccacatcttctttatgagagtggggagtggatccatctctaccctggaagtgatatatcaaggagtaaatacccctggacaaccagtcttcctggaggggcagcaacagtcattgcacaataaggatttttgaatgtataatatcatctaaggtgggctctccttctgcagactcctcttgcaaggcgtacctccaaacataattgattcgtatctgcgagacttacactcaagcaatcctgaggaatactgagggagggcctggctactgtctctctgcactctgctgctttgaaatctggttgaaatgagaaaaagcattttctgttttcccaccaggcccccaagtgtggtctttttctttcctcctaatgttgaagagaaaaaaaaaaaaaaaagtttgcccagattgcttaattaaaaattgcaaacaaaatctcatttgaagtcagcactttggtcattattatctctgctcactgtattatactttacaaaaatgcaagtcatagaataagcaaaagcagttatttttgtttacatagtaggctataaatgctttttttttcctctcagagtaaaaaacataacacaatgcaccacgactggatcttgaaaacccatctttctcttgatctagtagatttttctaaccaaagcggagttgttgatgtcatacaggcctgcttcacaccaggatctgtgcctttttcttcttatttgaatgcaataaaacatttttaaaagtctaac

SEQ ID NO: 31950 - DNA, 1251 bp, Homo sapiens
aacagctttcaaaagaggaaaaaagtaaggttcttttttgaaagctttgtagattgtatatagaatagctttgtaacataaggttttgtgtctatttagatcagtcatatatattccatgcagaatacaatattatagaatacactagtctaatatttgtacttgataattttgccttttagaatttcaacatatatatatgtacactaacactttgtctattgtctatgtttttcttttgttgaaaaacacgatatatatatgttgtagggttttggtttttgtatttgttttaagctaatggtttggaagctcttaccatagatattcactatacaatcagaatgactttgccacctattcaggcaaagtagttgtgcatattaataaatgttttacatattaatgatccttttgacgtgactggatccccacccttcatttcatgtgcttctattttcctacatcttttacatgactaaggattaatgaaatcacctcttcataatcatgaccataatttcatccaacaagtactcaagtttggtgttagcactttattaatgcttacgacttctctctctctccctctttctcttttccttagtcattgcacaataaggatttttgaatgtataatatcatctaaggtgggctctccttctgcagactcctcttgcaaggcgtacctccaaacataattgattcgtatctgcgagacttacactcaagcaatcctgaggaatactgagggagggcctggctactgtctctctgcactctgctgctttgaaatctggttgaaatgagaaaaagcattttctgttttcccaccaggcccccaagtgtggtctttttctttcctcctaatgttgaagagaaaaaaaaaaaaaaaagtttgcccagattgcttaattaaaaattgcaaacaaaatctcatttgaagtcagcactttggtcattattatctctgctcactgtattatactttacaaaaatgcaagtcatagaataagcaaaagcagttatttttgtttacatagtaggctataaatgctttttttttcctctcagagtaaaaaacataacacaatgcaccacgactggatcttgaaaacccatctttctcttgatctagtagatttttctaaccaaagcggagttgttgatgtcatacaggcctgcttcacaccaggatctgtgcctttttcttcttatttgaatgcaataaaacatttttaaaagtctaac

SEQ ID NO: 31951 - DNA, 783 bp, Homo sapiens
  misc_feature (46)..(46): n is a, c, g, or t
  misc_feature (51)..(51): n is a, c, g, or t
  misc_feature (75)..(75): n is a, c, g, or t
gaggggggtgaggctgagaccttcgagcagcaggcaatgttcttgnacagngcagattgaatgcaaactggaggngaaagtgatatatcaaggagtaaatacccctggacaaccagtcttcctggaggggcagcaacagtcattgcacaataaggatttttgaatgtataatatcatctaaggtgggctctccttctgcagactcctcttgcaaggcgtacctccaaacataattgattcgtatctgcgagacttacactcaagcaatcctgaggaatactgagggagggcctggctactgtctctctgcactctgctgctttgaaatctggttgaaatgagaaaaagcattttctgttttcccaccaggcccccaagtgtggtctttttctttcctcctaatgttgaagagaaaaaaaaaaaaaaaagtttgcccagattgcttaattaaaaattgcaaacaaaatctcatttgaagtcagcactttggtcattattatctctgctcactgtattatactttacaaaaatgcaagtcatagaataagcaaaagcagttatttttgtttacatagtaggctataaatgctttttttttcctctcagagtaaaaaacataacacaatgcaccacgactggatcttgaaaacccatctttctcttgatctagtagatttttctaaccaaagcggagttgttgatgtcatacaggcctgcttcacaccaggatctgtgcctttttcttcttatttgaatgcaataaaacatttttaaaagtctaac

SEQ ID NO: 31952 - DNA, 1426 bp, Homo sapiens
tggtcacaccgacctgcaccatctctcgcctgcctgtggggtttctgtcaactagtcgtggagggaaggagactctttaaagaataacatcttattgtggccatgccagaacccactaagaaagaggaaaatgaagtgccagccccagccccacccccggaagaaccaagtaaagagaaggaggccggaactacaccagcaaaagatgaagaggaagtctccccgcctagcgccttgcctccaggtttgggtagtcgggccctggagagaaaagattcagactggacccttgtcgaaactcctcctggggaggaacaagccaagcagaatgccaactcccagctgtccatcttgttcattgaaaaacctcaaggaggaacagtgaaagttggtgaagatatcaccttcatagccaaagtcaaggctgaagatcttctgagaaaacccactatcaaatggttcaaaggaaaatggatggacctggccagcaaagccgggaagcaccttcagctgaaggaaacctttgagaggcacagtcgggtgtacacatttgagatgcagatcatcaaggccaaagataactttgcaggaaattacagatgcgaggtcacctataaggataagtttgacagctgttcatttgatcttgaagtgcacgaatctactgggactactccaaacattgacatcagatctgctttcaagagaagtggagaaggtcaagaggatgcaggagaacttgactttagtggtctcctgaaacgtagggaggtgaagcagcaggaggaagaaccccaggtggacgtatgggagttgctgaagaacgcgaaacccagtgagtacgagaagatcgccttccagtatggaatcaccgacctgcgcggcatgctcaagcgactcaagcgcatgcgcagagaggagaagaagagcgcagcttttgcaaaaattcttgatcctgcatatcaggttgacaaaggaggcagagtgaggtttgttgtggagctggcagatccaaagttggaggtgaaatggtataaaaatggtcaagaaattcgacccagtaccaaatacatctttgaacacaaaggatgccagagaatcctgtttatcaataactgtcagatgacagatgattcagagtattatgtgacagccggtgatgagaaatgttccactgagctcttcgtaagagagcctccaattatggtgaccaaacagctggaagatacaactgcttattgtggggagagagtggaattagaatgtgaggtgtctgaagatgatgccaatgtaaaatggtttaagaatggtgaagagattatccctggtccaaaatcaagataccgaattagagttgagggtaaaaaacacatcttgatcatagagggagcaacaaagtcaaaattttaaaacgggagtctggtgg

SEQ ID NO: 31953 - DNA, 1466 bp, Homo sapiens
tggtcacaccgacctgcaccatctctcgcctgcctgtggggtttctgtcaactagtcgtggagggaaggagactctttaaagaataacatcttattgtggccatgccagaacccactaagaaagaggaaaatgaagtgccagccccagccccacccccggaagaaccaagtaaagagaaggaggccggaactacaccagcaaaagatgaagaggaagtctccccgcctagcgccttgcctccaggtttgggtagtcgggccctggagagaaaagattcagactggacccttgtcgaaactcctcctggggaggaacaagccaagcagaatgccaactcccagctgtccatcttgttcattgaaaaacctcaaggaggaacagtgaaagttggtgaagatatcaccttcatagccaaagtcaaggctgaagatcttctgagaaaacccactatcaaatggttcaaaggaaaatggatggacctggccagcaaagccgggaagcaccttcagctgaaggaaacctttgagaggcacagtcgggtgtacacatttgagatgcagatcatcaaggccaaagataactttgcaggaaattacagatgcgaggtcacctataaggataagtttgacagctgttcatttgatcttgaagtgcacgaatctactgggactactccaaacattgacatcagatctgctttcaagagaagtggagaaggtcaagaggatgcaggagaacttgactttagtggtctcctgaaacgtagggaggtgaagcagcaggaggaagaaccccaggtggacgtatgggagttgctgaagaacgcgaaacccagtgagtacgagaagatcgccttccagtatggaatcaccgacctgcgcggcatgctcaagcgactcaagcgcatgcgcagagaggagaagaagagcgcagcttttgcaaaaattcttgatcctgcatatcaggttgacaaaggaggcagagtgaggtttgttgtggagctggcagatccaaagttggaggtgaaatggtataaaaatggtcaagaaattcgacccagtaccaaatacatctttgaacacaaaggatgccagagaatcctgtttatcaataactgtcagatgacagatgattcagagtattatgtgacagccggtgatgagaaatgttccactgagctcttcgtaagaggtaaaaatgaaatctcttattgtggtcaccaggagctgttggcttcttctcccagggataatgatcaaagtgaaagtaactgaggctcctctacactggcagctattatggatcctaatgagtcttctggtttgttgaagaagaattaatgctggaagtgttgtggcttgtgaactgttgtgaagcagtagaaagaggattattcaaaatctgatgagtagttgtgacctcagatgtaaatgggtgtggcttatatcacatggatgaactgagg

SEQ ID NO: 31954 - DNA, 1190 bp, Homo sapiens
tggtcacaccgacctgcaccatctctcgcctgcctgtggggtttctgtcaactagtcgtggagggaaggagactctttaaagaataacatcttattgtggccatgccagaacccactaagaaagaggaaaatgaagtgccagccccagccccacccccggaagaaccaagtaaagagaaggaggccggaactacaccagcaaaagatgaagaggaagtctccccgcctagcgccttgcctccaggtttgggtagtcgggccctggagagaaaagattcagactggacccttgtcgaaactcctcctggggaggaacaagccaagcagaatgccaactcccagctgtccatcttgttcattgaaaaacctcaaggaggaacagtgaaagttggtgaagatatcaccttcatagccaaagtcaaggctgaagatcttctgagaaaacccactatcaaatggttcaaaggaaaatggatggacctggccagcaaagccgggaagcaccttcagctgaaggaaacctttgagaggcacagtcgggtgtacacatttgagatgcagatcatcaaggccaaagataactttgcaggaaattacagatgcgaggtcacctataaggataagtttgacagctgttcatttgatcttgaagtgcacgaatctactgggactactccaaacattgacatcagatctgctttcaagagaagtggagaaggtcaagaggatgcaggagaacttgactttagtggtctcctgaaacgtaggtgagaacaaagtgatggagtgagacattgtggcctggaagtctttcagacacccactcagagaagtcaagtttaaagtggatgttcttcagagaatttttcatttctgaaaatgtgttttgcttatagaatataacagagttgactagaaagagagaaacaactgcatactaatcttttaaagcctttaacagttgcttttaaactttctttttaaatgtttcatgactcttcacctatttttttttaaatggggacgaagagatatgaaaactgagacataagacaaatacctagaaacctctaagactgcacatatgattttggtagaagtctgaaggtatacacattgtaagaggcagacctactttaatgtattatttatgatgtactgtatttctgcaagtctaagacaccactgct

SEQ ID NO: 31955 - DNA, 666 bp, Homo sapiens
tatgcttgtactttctacacagaaccaagtaaagagaaggaggccggaactacaccagcaaaaggtgagttggagggagggagagtgaggctgaagtcaacaaaattagaagcagaaagaagtcagtaatgattgtcatggtggctccatagaatttctctgcattatctttcgttctgcctttgcatcttatctgcaagtcccaatcagtataatgacaaatggtgcattgctaagtttccattacatgtatttctaaaagaaaaacaacaatgataaaaatatcacaagcacttgttgagatgccagcaaattaattggtagtttccaagtttcgacatgcatgctaagaaagagaggtgtttggtcttcttaggattatatcaattgggaaaattatctgaattacccggtttttttttaaattaaatgttttcatgttattgtgtgaactgttccagggttcactaataattttgaaggctagcatctcactttgtaacactgactatgtattcatgtagatttatataatgatttctacagatacacaatataacattaagaagacatgttgccccttcttgaactggaaactattcctgtaatattatcctatttttactttatatggagatagtctcattttagaaaataatcttaatc

SEQ ID NO: 31956 - DNA, 446 bp, Homo sapiens
taaatggggacgaagagatatgaaaactgagacataagacaaatacctagaaacctctaagactgcacatatgattccgtctcatgactgaataaatgaagccttcattctcttacctttgatatttagtcaaaaaatcagttttacgattttggtagaagtctgaaggtatacacattgtaagaggcagacctactttaatgtattatttatgatgtactgtatttctgcaagtctaagacaccactgctattaagatacaccagcactttataaatcactaagcaatgaaaaaattgttccaaatggtttgacacaccattgattataagatgcattgtcatttcagaggtctttaaaatgcctcaaaaatgtgttttagaagtgacaaaatggaaataaaagtttagtatcatcacacactgacacttttcattgttctctcc

SEQ ID NO: 31957 - DNA, 418 bp, Homo sapiens
aggatgccagagaatcctgtttatcaataactgtcagatgacagatgattcagagtattatgtgacagccggtgatgagaaatgttccactgagctcttcgtaagaggtaaaaatgaaatctcttattgtggtcaccaggagctgttggcttcttctcccagggataatgatcaaagtgaaagtaactgaggctcctctacactggcagctattatggatcctaatgagtcttctggtttgttgaagagactagaacagcagaggggagaaagagaacctgttgagtacaaatgcctcatgttttgactcaagccaagcactatcttgcaaaaataattattctagttatagctttgaaacccaacagattttactggataatccttgtttcacacactcaactgatcacaaataggt

SEQ ID NO: 31958 - DNA, 368 bp, Homo sapiens
agactctgaagtagccctgtttattgtgtaaatcatgccacattttgtttctccacttcttaggctattatggaaggcagtggccggataagaacagaatcttaccctgatagcagcactctggtcattgatatagctgaaagagatgactctggtgtttaccacatcaatctgaaaaacgaagctggagaggcacatgcaagcatcaaggttaaagttgtgggtaagtcctccaggtaaacgcacttctagaatcaagctgacatgtcaagattcagagtagactttccttctttgtcctttccttccatttccttcctttgtctttcccttatcttctttttttttcttgcctagaggacaaatca

SEQ ID NO: 31959 - DNA, 290 bp, Homo sapiens
tactggtacaaatattctgattctgcagtgatatatcaaggagtaaatacccctggacaaccagtcttcctggaggggcagcaacagaggtttaaaaagtttatatcccactggatattctactttccgttccattcctcttacatgaaaatgcaccttgcatgtaaagcttgactttctcatttgcttttaattgtaccccttagcagctcatggcatacagtgcttatgccatgaacaaggaaggccaaattattcaaggatattaagtaatgtagaaactaagtttt

SEQ ID NO: 31960 - DNA, 533 bp, Homo sapiens
tggtcacaccgacctgcaccatctctcgcctgcctgtggggtttctgtcaactagtcgtggagggaaggagactctttaaagaataacatcttattgtggccatgccagaacccactaagaaagaggaaaatgaagtgccagccccagccccacccccggaagaaccaagtaaagagaaggaggccggaactacaccagcaaaagatgaagaggaagtctccccgcctagcgccttgcctccaggtttgggtagtcgggccctggagagaaaagattcagactggacccttgtcgaaactcctcctggggaggaacaagccaagcagaatgccaactcccagctgtccatcttgttcattgaaaaacctcaaggaggaacagtgaaagttgccaacattgcacagccaggctgggagcagcctagggagagcccccatcatgcccaccacccactctggcactggcttcatcctttacctatccccttccaccctcctttgctgcttaataaattctgaacttggtctccaaa

SEQ ID NO: 31961 - DNA, 4158 bp, Homo sapiens
tggtcacaccgacctgcaccatctctcgcctgcctgtggggtttctgtcaactagtcgtggagggaaggagactctttaaagaataacatcttattgtggccatgccagaacccactaagaaagaggaaaatgaagtgccagccccagccccacccccggaagaaccaagtaaagagaaggaggccggaactacaccagcaaaagactggacccttgtcgaaactcctcctggggaggaacaagccaagcagaatgccaactcccagctgtccatcttgttcattgaaaaacctcaaggaggaacagtgaaagttggtgaagatatcaccttcatagccaaagtcaaggctgaagatcttctgagaaaacccactatcaaatggttcaaaggaaaatggatggacctggccagcaaagccgggaagcaccttcagctgaaggaaacctttgagaggcacagtcgggtgtacacatttgagatgcagatcatcaaggccaaagataactttgcaggaaattacagatgcgaggtcacctataaggataagtttgacagctgttcatttgatcttgaagtgcacgaatctactgggactactccaaacattgacatcagatctgctttcaagagaagtggagaaggtcaagaggatgcaggagaacttgactttagtggtctcctgaaacgtagggaggtgaagcagcaggaggaagaaccccaggtggacgtatgggagttgctgaagaacgcgaaacccagtgagtacgagaagatcgccttccagtatggaatcaccgacctgcgcggcatgctcaagcgactcaagcgcatgcgcagagaggagaagaagagcgcagcttttgcaaaaattcttgatcctgcatatcaggttgacaaaggaggcagagtgaggtttgttgtggagctggcagatccaaagttggaggtgaaatggtataaaaatggtcaagaaattcgacccagtaccaaatacatctttgaacacaaaggatgccagagaatcctgtttatcaataactgtcagatgacagatgattcagagtattatgtgacagccggtgatgagaaatgttccactgagctcttcgtaagagagcctccaattatggtgaccaaacagctggaagatacaactgcttattgtggggagagagtggaattagaatgtgaggtgtctgaagatgatgccaatgtaaaatggtttaagaatggtgaagagattatccctggtccaaaatcaagataccgaattagagttgagggtaaaaaacacatcttgatcatagagggagcaacaaaggctgatgctgcagaatattcagtaatgacaacaggaggacaatcatctgctaaacttagtgttgacttgaaacctctgaagattttgacacctctgactgatcagactgtaaatcttggaaaagaaatctgcctgaagtgtgaaatctctgaaaacataccaggaaaatggactaaaaatggcctacctgttcaggagagtgaccgtctaaaggtggttcacaagggaaggatccacaagttagtgatagccaatgccctcactgaagatgaaggtgattatgtatttgcacctgatgcctacaatgttactctgcctgccaaagttcatgttattgatcctcctaagatcatcctggatggtcttgatgctgacaacacagtgacagtgattgcaggaaacaagcttcgtcttgagatccccatcagcggagaaccacctcctaaagccatgtggagccggggagataaggctattatggaaggcagtggccggataagaacagaatcttaccctgatagcagcactctggtcattgatatagctgaaagagatgactctggtgtttaccacatcaatctgaaaaacgaagctggagaggcacatgcaagcatcaaggttaaagttgtggacttccctgatcctccagtggcaccgactgtgacagaggtgggagatgactggtgtatcatgaactgggagcctcctgcctacgacggaggctctccaatcctaggatattttattgagaggaagaagaaacaaagctccaggtggatgaggctgaattttgatctctgcaaagaaacaacttttgagcccaagaagatgattgaaggtgtggcctatgaggtccgcatctttgcagtcaatgccattggcatctccaagcccagtatgccctccaggccttttgttcctttggctgtaacaagccctcctactcttctgactgtggactctgtcactgacacgactgtcacgatgaggtggcgccccccagaccacattggtgcagcaggtttagatggctatgtgctagagtattgctttgaaggaagtacatcagcaaaacagtctgatgaaaatggggaggctgcctatgatctgccagctgaggactggatagttgcaaacaaagatctgattgacaagacgaagttcaccatcacaggtctgccaacagatgcaaagatctttgtgcgtgtgaaggctgttaatgcagctggtgccagcgagcccaagtactattctcagcccattctcgtgaaggaaatcatagaacctccaaagattcgcatcccaagacacctgaagcaaacctatatccgcagagttggagaagctgtcaatctggttatacctttccagggaaaaccaagaccagaattaacttggaagaaggatggtgcagaaattgataagaatcaaataaacattcgcaactctgagactgatacaatcatatttattagaaaagcagagaggagccactctgggaaatatgatctgcaagtcaaagtggacaaattcgtggagaccgcatcaattgacatccagatcattgaccgtccaggtccaccccaaattgtgaagattgaggatgtctggggagaaaatgtcgctctcacatggactccaccaaaggatgatggaaatgctgctatcacaggctataccattcagaaggctgacaagaagagcatggaatggtttactgtcattgagcattatcatcgaaccagtgccaccattactgaattggtcatagggaatgaatattacttccgggtcttttctgaaaacatgtgtggcctcagtgaggatgccaccatgactaaagagagtgcagtgatcgccagggatggtaaaatctacaaaaatccagtgtatgaagactttgatttctcagaggcacccatgtttactcagcctttggttaacacctatgccatagctggttacaatgccaccctaaactgcagtgtgagaggaaatcctaagcctaaaataacctggatgaaaaacaaagttgctattgtggatgatccaagatacaggatgttcagcaaccagggagtctgtaccctggaaattcgcaagcccagcccctatgatggaggcacttactgctgcaaagcagtcaatgaccttgggacagtggagattgaatgcaaactggaggtgaaagtcattgcacaataaggatttttgaatgtataatatcatctaaggtgggctctccttctgcagactcctcttgcaaggcgtacctccaaacataattgattcgtatctgcgagacttacactcaagcaatcctgaggaatactgagggagggcctggctactgtctctctgcactctgctgctttgaaatctggttgaaatgagaaaaagcattttctgttttcccaccaggcccccaagtgtggtctttttctttcctcctaatgttgaagagaaaaaaaaaaaaaaaagtttgcccagattgcttaattaaaaattgcaaacaaaatctcatttgaagtcagcactttggtcattattatctctgctcactgtattatactttacaaaaatgcaagtcatagaataagcaaaagcagttatttttgtttacatagtaggctataaatgctttttttttcctctcagagtaaaaaacataacacaatgcaccacgactggatcttgaaaacccatctttctcttgatctagtagatttttctaaccaaagcggagttgttgatgtcatacaggcctgcttcacaccaggatctgtgcctttttcttcttatttgaatgcaataaaacatttttaaaagtctaac

SEQ ID NO: 31962 - DNA, 4238 bp, Homo sapiens
tggtcacaccgacctgcaccatctctcgcctgcctgtggggtttctgtcaactagtcgtggagggaaggagactctttaaagaataacatcttattgtggccatgccagaacccactaagaaagaggaaaatgaagtgccagccccagccccacccccggaagaaccaagtaaagagaaggaggccggaactacaccagcaaaagatgaagaggaagtctccccgcctagcgccttgcctccaggtttgggtagtcgggccctggagagaaaagattcagactggacccttgtcgaaactcctcctggggaggaacaagccaagcagaatgccaactcccagctgtccatcttgttcattgaaaaacctcaaggaggaacagtgaaagttggtgaagatatcaccttcatagccaaagtcaaggctgaagatcttctgagaaaacccactatcaaatggttcaaaggaaaatggatggacctggccagcaaagccgggaagcaccttcagctgaaggaaacctttgagaggcacagtcgggtgtacacatttgagatgcagatcatcaaggccaaagataactttgcaggaaattacagatgcgaggtcacctataaggataagtttgacagctgttcatttgatcttgaagtgcacgaatctactgggactactccaaacattgacatcagatctgctttcaagagaagtggagaaggtcaagaggatgcaggagaacttgactttagtggtctcctgaaacgtagggaggtgaagcagcaggaggaagaaccccaggtggacgtatgggagttgctgaagaacgcgaaacccagtgagtacgagaagatcgccttccagtatggaatcaccgacctgcgcggcatgctcaagcgactcaagcgcatgcgcagagaggagaagaagagcgcagcttttgcaaaaattcttgatcctgcatatcaggttgacaaaggaggcagagtgaggtttgttgtggagctggcagatccaaagttggaggtgaaatggtataaaaatggtcaagaaattcgacccagtaccaaatacatctttgaacacaaaggatgccagagaatcctgtttatcaataactgtcagatgacagatgattcagagtattatgtgacagccggtgatgagaaatgttccactgagctcttcgtaagagagcctccaattatggtgaccaaacagctggaagatacaactgcttattgtggggagagagtggaattagaatgtgaggtgtctgaagatgatgccaatgtaaaatggtttaagaatggtgaagagattatccctggtccaaaatcaagataccgaattagagttgagggtaaaaaacacatcttgatcatagagggagcaacaaaggctgatgctgcagaatattcagtaatgacaacaggaggacaatcatctgctaaacttagtgttgacttgaaacctctgaagattttgacacctctgactgatcagactgtaaatcttggaaaagaaatctgcctgaagtgtgaaatctctgaaaacataccaggaaaatggactaaaaatggcctacctgttcaggagagtgaccgtctaaaggtggttcacaagggaaggatccacaagttagtgatagccaatgccctcactgaagatgaaggtgattatgtatttgcacctgatgcctacaatgttactctgcctgccaaagttcatgttattgatcctcctaagatcatcctggatggtcttgatgctgacaacacagtgacagtgattgcaggaaacaagcttcgtcttgagatccccatcagcggagaaccacctcctaaagccatgtggagccggggagataaggctattatggaaggcagtggccggataagaacagaatcttaccctgatagcagcactctggtcattgatatagctgaaagagatgactctggtgtttaccacatcaatctgaaaaacgaagctggagaggcacatgcaagcatcaaggttaaagttgtggacttccctgatcctccagtggcaccgactgtgacagaggtgggagatgactggtgtatcatgaactgggagcctcctgcctacgacggaggctctccaatcctaggatattttattgagaggaagaagaaacaaagctccaggtggatgaggctgaattttgatctctgcaaagaaacaacttttgagcccaagaagatgattgaaggtgtggcctatgaggtccgcatctttgcagtcaatgccattggcatctccaagcccagtatgccctccaggccttttgttcctttggctgtaacaagccctcctactcttctgactgtggactctgtcactgacacgactgtcacgatgaggtggcgccccccagaccacattggtgcagcaggtttagatggctatgtgctagagtattgctttgaaggaactgaggactggatagttgcaaacaaagatctgattgacaagacgaagttcaccatcacaggtctgccaacagatgcaaagatctttgtgcgtgtgaaggctgttaatgcagctggtgccagcgagcccaagtactattctcagcccattctcgtgaaggaaatcatagaacctccaaagattcgcatcccaagacacctgaagcaaacctatatccgcagagttggagaagctgtcaatctggttatacctttccagggaaaaccaagaccagaattaacttggaagaaggatggtgcagaaattgataagaatcaaataaacattcgcaactctgagactgatacaatcatatttattagaaaagcagagaggagccactctgggaaatatgatctgcaagtcaaagtggacaaattcgtggagaccgcatcaattgacatccagatcattgaccgtccaggtccaccccaaattgtgaagattgaggatgtctggggagaaaatgtcgctctcacatggactccaccaaaggatgatggaaatgctgctatcacaggctataccattcagaaggctgacaagaagagcatggaatggtttactgtcattgagcattatcatcgaaccagtgccaccattactgaattggtcatagggaatgaatattacttccgggtcttttctgaaaacatgtgtggcctcagtgaggatgccaccatgactaaagagagtgcagtgatcgccagggatggtaaaatctacaaaaatccagtgtatgaagactttgatttctcagaggcacccatgtttactcagcctttggttaacacctatgccatagctggttacaatgccaccctaaactgcagtgtgagaggaaatcctaagcctaaaataacctggatgaaaaacaaagttgctattgtggatgatccaagatacaggatgttcagcaaccagggagtctgtaccctggaaattcgcaagcccagcccctatgatggaggcacttactgctgcaaagcagtcaatgaccttgggacagtggagattgaatgcaaactggaggtgaaagtgatatatcaaggagtaaatacccctggacaaccagtcttcctggaggggcagcaacagtcattgcacaataaggatttttgaatgtataatatcatctaaggtgggctctccttctgcagactcctcttgcaaggcgtacctccaaacataattgattcgtatctgcgagacttacactcaagcaatcctgaggaatactgagggagggcctggctactgtctctctgcactctgctgctttgaaatctggttgaaatgagaaaaagcattttctgttttcccaccaggcccccaagtgtggtctttttctttcctcctaatgttgaagagaaaaaaaaaaaaaaaagtttgcccagattgcttaattaaaaattgcaaacaaaatctcatttgaagtcagcactttggtcattattatctctgctcactgtattatactttacaaaaatgcaagtcatagaataagcaaaagcagttatttttgtttacatagtaggctataaatgctttttttttcctctcagagtaaaaaacataacacaatgcaccacgactggatcttgaaaacccatctttctcttgatctagtagatttttctaaccaaagcggagttgttgatgtcatacaggcctgcttcacaccaggatctgtgcctttttcttcttatttgaatgcaataaaacatttttaaaagtctaac

SEQ ID NO: 31963 - DNA, 4062 bp, Homo sapiens
tggtcacaccgacctgcaccatctctcgcctgcctgtggggtttctgtcaactagtcgtggagggaaggagactctttaaagaataacatcttattgtggccatgccagaacccactaagaaagaggaaaatgaagtgccagccccagccccacccccggaagactggacccttgtcgaaactcctcctggggaggaacaagccaagcagaatgccaactcccagctgtccatcttgttcattgaaaaacctcaaggaggaacagtgaaagttggtgaagatatcaccttcatagccaaagtcaaggctgaagatcttctgagaaaacccactatcaaatggttcaaaggaaaatggatggacctggccagcaaagccgggaagcaccttcagctgaaggaaacctttgagaggcacagtcgggtgtacacatttgagatgcagatcatcaaggccaaagataactttgcaggaaattacagatgcgaggtcacctataaggataagtttgacagctgttcatttgatcttgaagtgcacgaatctactgggactactccaaacattgacatcagatctgctttcaagagaagtggagaaggtcaagaggatgcaggagaacttgactttagtggtctcctgaaacgtagggaggtgaagcagcaggaggaagaaccccaggtggacgtatgggagttgctgaagaacgcgaaacccagtgagtacgagaagatcgccttccagtatggaatcaccgacctgcgcggcatgctcaagcgactcaagcgcatgcgcagagaggagaagaagagcgcagcttttgcaaaaattcttgatcctgcatatcaggttgacaaaggaggcagagtgaggtttgttgtggagctggcagatccaaagttggaggtgaaatggtataaaaatggtcaagaaattcgacccagtaccaaatacatctttgaacacaaaggatgccagagaatcctgtttatcaataactgtcagatgacagatgattcagagtattatgtgacagccggtgatgagaaatgttccactgagctcttcgtaagagagcctccaattatggtgaccaaacagctggaagatacaactgcttattgtggggagagagtggaattagaatgtgaggtgtctgaagatgatgccaatgtaaaatggtttaagaatggtgaagagattatccctggtccaaaatcaagataccgaattagagttgagggtaaaaaacacatcttgatcatagagggagcaacaaaggctgatgctgcagaatattcagtaatgacaacaggaggacaatcatctgctaaacttagtgttgacttgaaacctctgaagattttgacacctctgactgatcagactgtaaatcttggaaaagaaatctgcctgaagtgtgaaatctctgaaaacataccaggaaaatggactaaaaatggcctacctgttcaggagagtgaccgtctaaaggtggttcacaagggaaggatccacaagttagtgatagccaatgccctcactgaagatgaaggtgattatgtatttgcacctgatgcctacaatgttactctgcctgccaaagttcatgttattgatcctcctaagatcatcctggatggtcttgatgctgacaacacagtgacagtgattgcaggaaacaagcttcgtcttgagatccccatcagcggagaaccacctcctaaagccatgtggagccggggagataaggctattatggaaggcagtggccggataagaacagaatcttaccctgatagcagcactctggtcattgatatagctgaaagagatgactctggtgtttaccacatcaatctgaaaaacgaagctggagaggcacatgcaagcatcaaggttaaagttgtggacttccctgatcctccagtggcaccgactgtgacagaggtgggagatgactggtgtatcatgaactgggagcctcctgcctacgacggaggctctccaatcctaggatattttattgagaggaagaagaaacaaagctccaggtggatgaggctgaattttgatctctgcaaagaaacaacttttgagcccaagaagatgattgaaggtgtggcctatgaggtccgcatctttgcagtcaatgccattggcatctccaagcccagtatgccctccaggccttttgttcctttggctgtaacaagccctcctactcttctgactgtggactctgtcactgacacgactgtcacgatgaggtggcgccccccagaccacattggtgcagcaggtttagatggctatgtgctagagtattgctttgaaggaactgaggactggatagttgcaaacaaagatctgattgacaagacgaagttcaccatcacaggtctgccaacagatgcaaagatctttgtgcgtgtgaaggctgttaatgcagctggtgccagcgagcccaagtactattctcagcccattctcgtgaaggaaatcatagaacctccaaagattcgcatcccaagacacctgaagcaaacctatatccgcagagttggagaagctgtcaatctggttatacctttccagggaaaaccaagaccagaattaacttggaagaaggatggtgcagaaattgataagaatcaaataaacattcgcaactctgagactgatacaatcatatttattagaaaagcagagaggagccactctgggaaatatgatctgcaagtcaaagtggacaaattcgtggagaccgcatcaattgacatccagatcattgaccgtccaggtccaccccaaattgtgaagattgaggatgtctggggagaaaatgtcgctctcacatggactccaccaaaggatgatggaaatgctgctatcacaggctataccattcagaaggctgacaagaagagcatggaatggtttactgtcattgagcattatcatcgaaccagtgccaccattactgaattggtcatagggaatgaatattacttccgggtcttttctgaaaacatgtgtggcctcagtgaggatgccaccatgactaaagagagtgcagtgatcgccagggatggtaaaatctacaaaaatccagtgtatgaagactttgatttctcagaggcacccatgtttactcagcctttggttaacacctatgccatagctggttacaatgccaccctaaactgcagtgtgagaggaaatcctaagcctaaaataacctggatgaaaaacaaagttgctattgtggatgatccaagatacaggatgttcagcaaccagggagtctgtaccctggaaattcgcaagcccagcccctatgatggaggcacttactgctgcaaagcagtcaatgaccttgggacagtggagattgaatgcaaactggaggtgaaagtcattgcacaataaggatttttgaatgtataatatcatctaaggtgggctctccttctgcagactcctcttgcaaggcgtacctccaaacataattgattcgtatctgcgagacttacactcaagcaatcctgaggaatactgagggagggcctggctactgtctctctgcactctgctgctttgaaatctggttgaaatgagaaaaagcattttctgttttcccaccaggcccccaagtgtggtctttttctttcctcctaatgttgaagagaaaaaaaaaaaaaaaagtttgcccagattgcttaattaaaaattgcaaacaaaatctcatttgaagtcagcactttggtcattattatctctgctcactgtattatactttacaaaaatgcaagtcatagaataagcaaaagcagttatttttgtttacatagtaggctataaatgctttttttttcctctcagagtaaaaaacataacacaatgcaccacgactggatcttgaaaacccatctttctcttgatctagtagatttttctaaccaaagcggagttgttgatgtcatacaggcctgcttcacaccaggatctgtgcctttttcttcttatttgaatgcaataaaacatttttaaaagtctaac

SEQ ID NO: 31964 - DNA, 3338 bp, Homo sapiens
tgctgttgcagttctcagataaaaagtgcaaacttgattctttggtatatctgactcagttgtgtggtgtcctttagttgcattgtaactgaagataacatggaacacatcagtggtgtggggttaggtctgtaatttgtcaggtgaggtttgttgtggagctggcagatccaaagttggaggtgaaatggtataaaaatggtcaagaaattcgacccagtaccaaatacatctttgaacacaaaggatgccagagaatcctgtttatcaataactgtcagatgacagatgattcagagtattatgtgacagccggtgatgagaaatgttccactgagctcttcgtaagagagcctccaattatggtgaccaaacagctggaagatacaactgcttattgtggggagagagtggaattagaatgtgaggtgtctgaagatgatgccaatgtaaaatggtttaagaatggtgaagagattatccctggtccaaaatcaagataccgaattagagttgagggtaaaaaacacatcttgatcatagagggagcaacaaaggctgatgctgcagaatattcagtaatgacaacaggaggacaatcatctgctaaacttagtgttgacttgaaacctctgaagattttgacacctctgactgatcagactgtaaatcttggaaaagaaatctgcctgaagtgtgaaatctctgaaaacataccaggaaaatggactaaaaatggcctacctgttcaggagagtgaccgtctaaaggtggttcacaagggaaggatccacaagttagtgatagccaatgccctcactgaagatgaaggtgattatgtatttgcacctgatgcctacaatgttactctgcctgccaaagttcatgttattgatcctcctaagatcatcctggatggtcttgatgctgacaacacagtgacagtgattgcaggaaacaagcttcgtcttgagatccccatcagcggagaaccacctcctaaagccatgtggagccggggagataaggctattatggaaggcagtggccggataagaacagaatcttaccctgatagcagcactctggtcattgatatagctgaaagagatgactctggtgtttaccacatcaatctgaaaaacgaagctggagaggcacatgcaagcatcaaggttaaagttgtggacttccctgatcctccagtggcaccgactgtgacagaggtgggagatgactggtgtatcatgaactgggagcctcctgcctacgacggaggctctccaatcctaggatattttattgagaggaagaagaaacaaagctccaggtggatgaggctgaattttgatctctgcaaagaaacaacttttgagcccaagaagatgattgaaggtgtggcctatgaggtccgcatctttgcagtcaatgccattggcatctccaagcccagtatgccctccaggccttttgttcctttggctgtaacaagccctcctactcttctgactgtggactctgtcactgacacgactgtcacgatgaggtggcgccccccagaccacattggtgcagcaggtttagatggctatgtgctagagtattgctttgaaggaactgaggactggatagttgcaaacaaagatctgattgacaagacgaagttcaccatcacaggtctgccaacagatgcaaagatctttgtgcgtgtgaaggctgttaatgcagctggtgccagcgagcccaagtactattctcagcccattctcgtgaaggaaatcatagaacctccaaagattcgcatcccaagacacctgaagcaaacctatatccgcagagttggagaagctgtcaatctggttatacctttccagggaaaaccaagaccagaattaacttggaagaaggatggtgcagaaattgataagaatcaaataaacattcgcaactctgagactgatacaatcatatttattagaaaagcagagaggagccactctgggaaatatgatctgcaagtcaaagtggacaaattcgtggagaccgcatcaattgacatccagatcattgaccgtccaggtccaccccaaattgtgaagattgaggatgtctggggagaaaatgtcgctctcacatggactccaccaaaggatgatggaaatgctgctatcacaggctataccattcagaaggctgacaagaagagcatggaatggtttactgtcattgagcattatcatcgaaccagtgccaccattactgaattggtcatagggaatgaatattacttccgggtcttttctgaaaacatgtgtggcctcagtgaggatgccaccatgactaaagagagtgcagtgatcgccagggatggtaaaatctacaaaaatccagtgtatgaagactttgatttctcagaggcacccatgtttactcagcctttggttaacacctatgccatagctggttacaatgccaccctaaactgcagtgtgagaggaaatcctaagcctaaaataacctggatgaaaaacaaagttgctattgtggatgatccaagatacaggatgttcagcaaccagggagtctgtaccctggaaattcgcaagcccagcccctatgatggaggcacttactgctgcaaagcagtcaatgaccttgggacagtggagattgaatgcaaactggaggtgaaagtcattgcacaataaggatttttgaatgtataatatcatctaaggtgggctctccttctgcagactcctcttgcaaggcgtacctccaaacataattgattcgtatctgcgagacttacactcaagcaatcctgaggaatactgagggagggcctggctactgtctctctgcactctgctgctttgaaatctggttgaaatgagaaaaagcattttctgttttcccaccaggcccccaagtgtggtctttttctttcctcctaatgttgaagagaaaaaaaaaaaaaaaagtttgcccagattgcttaattaaaaattgcaaacaaaatctcatttgaagtcagcactttggtcattattatctctgctcactgtattatactttacaaaaatgcaagtcatagaataagcaaaagcagttatttttgtttacatagtaggctataaatgctttttttttcctctcagagtaaaaaacataacacaatgcaccacgactggatcttgaaaacccatctttctcttgatctagtagatttttctaaccaaagcggagttgttgatgtcatacaggcctgcttcacaccaggatctgtgcctttttcttcttatttgaatgcaataaaacatttttaaaagtctaac

SEQ ID NO: 31965 - DNA, 2225 bp, Homo sapiens
ccgtgttccctggggacccaagagaatcctcccctgctggggtggcagagacaggcacaaggatagactgtctcactgtgcgctgctcccccgcagattccaggacctgctcctctgttttcttcagggtcttgctttgttcttctctatctcttcttcccaccactggaggtgtcccagcctcctttctcctcttctctattcttttcttttttctcctcttctctgtggcaggtgcctcaggtcagaagccacagtctgcacagagcaggctgtgctctcctgaggaacccccctaacaccgtttggtctcttccgtcactgctctgaggacaaatctctttgcacactttgcatactttactaacagagaatgctgactgctgatacgatattattctggtgtgaaagtgggtgtctttaattaattttaatgacggattctcaaaggtacatcagcaaaacagtctgatgaaaatggggaggctgcctatgatctgccagctgaggactggatagttgcaaacaaagatctgattgacaagacgaagttcaccatcacaggtctgccaacagatgcaaagatctttgtgcgtgtgaaggctgttaatgcagctggtgccagcgagcccaagtactattctcagcccattctcgtgaaggaaatcatagaacctccaaagattcgcatcccaagacacctgaagcaaacctatatccgcagagttggagaagctgtcaatctggttatacctttccagggaaaaccaagaccagaattaacttggaagaaggatggtgcagaaattgataagaatcaaataaacattcgcaactctgagactgatacaatcatatttattagaaaagcagagaggagccactctgggaaatatgatctgcaagtcaaagtggacaaattcgtggagaccgcatcaattgacatccagatcattgaccgtccaggtccaccccaaattgtgaagattgaggatgtctggggagaaaatgtcgctctcacatggactccaccaaaggatgatggaaatgctgctatcacaggctataccattcagaaggctgacaagaagagcatggaatggtttactgtcattgagcattatcatcgaaccagtgccaccattactgaattggtcatagggaatgaatattacttccgggtcttttctgaaaacatgtgtggcctcagtgaggatgccaccatgactaaagagagtgcagtgatcgccagggatggtaaaatctacaaaaatccagtgtatgaagactttgatttctcagaggcacccatgtttactcagcctttggttaacacctatgccatagctggttacaatgccaccctaaactgcagtgtgagaggaaatcctaagcctaaaataacctggatgaaaaacaaagttgctattgtggatgatccaagatacaggatgttcagcaaccagggagtctgtaccctggaaattcgcaagcccagcccctatgatggaggcacttactgctgcaaagcagtcaatgaccttgggacagtggagattgaatgcaaactggaggtgaaagtcattgcacaataaggatttttgaatgtataatatcatctaaggtgggctctccttctgcagactcctcttgcaaggcgtacctccaaacataattgattcgtatctgcgagacttacactcaagcaatcctgaggaatactgagggagggcctggctactgtctctctgcactctgctgctttgaaatctggttgaaatgagaaaaagcattttctgttttcccaccaggcccccaagtgtggtctttttctttcctcctaatgttgaagagaaaaaaaaaaaaaaaagtttgcccagattgcttaattaaaaattgcaaacaaaatctcatttgaagtcagcactttggtcattattatctctgctcactgtattatactttacaaaaatgcaagtcatagaataagcaaaagcagttatttttgtttacatagtaggctataaatgctttttttttcctctcagagtaaaaaacataacacaatgcaccacgactggatcttgaaaacccatctttctcttgatctagtagatttttctaaccaaagcggagttgttgatgtcatacaggcctgcttcacaccaggatctgtgcctttttcttcttatttgaatgcaataaaacatttttaaaagtctaac

SEQ ID NO: 31966 - DNA, 1484 bp, Homo sapiens
ttgctgtcttctcctttcagggaaaaccaagaccagaattaacttggaagaaggatggtgcagaaattgataagaatcaaataaacattcgcaactctgagactgatacaatcatatttattagaaaagcagagaggagccactctgggaaatatgatctgcaagtcaaagtggacaaattcgtggagaccgcatcaattgacatccagatcattgaccgtccaggtccaccccaaattgtgaagattgaggatgtctggggagaaaatgtcgctctcacatggactccaccaaaggatgatggaaatgctgctatcacaggctataccattcagaaggctgacaagaagagcatggaatggtttactgtcattgagcattatcatcgaaccagtgccaccattactgaattggtcatagggaatgaatattacttccgggtcttttctgaaaacatgtgtggcctcagtgaggatgccaccatgactaaagagagtgcagtgatcgccagggatggtaaaatctacaaaaatccagtgtatgaagactttgatttctcagaggcacccatgtttactcagcctttggttaacacctatgccatagctggttacaatgccaccctaaactgcagtgtgagaggaaatcctaagcctaaaataacctggatgaaaaacaaagttgctattgtggatgatccaagatacaggatgttcagcaaccagggagtctgtaccctggaaattcgcaagcccagcccctatgatggaggcacttactgctgcaaagcagtcaatgaccttgggacagtggagattgaatgcaaactggaggtgaaagtcattgcacaataaggatttttgaatgtataatatcatctaaggtgggctctccttctgcagactcctcttgcaaggcgtacctccaaacataattgattcgtatctgcgagacttacactcaagcaatcctgaggaatactgagggagggcctggctactgtctctctgcactctgctgctttgaaatctggttgaaatgagaaaaagcattttctgttttcccaccaggcccccaagtgtggtctttttctttcctcctaatgttgaagagaaaaaaaaaaaaaaaagtttgcccagattgcttaattaaaaattgcaaacaaaatctcatttgaagtcagcactttggtcattattatctctgctcactgtattatactttacaaaaatgcaagtcatagaataagcaaaagcagttatttttgtttacatagtaggctataaatgctttttttttcctctcagagtaaaaaacataacacaatgcaccacgactggatcttgaaaacccatctttctcttgatctagtagatttttctaaccaaagcggagttgttgatgtcatacaggcctgcttcacaccaggatctgtgcctttttcttcttatttgaatgcaataaaacatttttaaaagtctaac

SEQ ID NO: 31967 - DNA, 295 bp, Homo sapiens
aagaggcaagaatgatccagatggtaatgaactagagtcagagacaggtgtgaactcaggttcagcttactatagatacaaagggttactgcaatggttaattgtaggtgtcaacttgactgggctaagagataccccaatcgctggtaaagcattatttctggtggtatctgtgagggtgtttccaaaagagataagcatttgaatcagtggactaagtatggaagatccaatctctctgtgggcaggcactatccaattggctgagggcccagacagaaaaaaaaaaggcaga

SEQ ID NO: 31968 - DNA, 632 bp, Homo sapiens
acagctatacaaattatgcgatgtgtatttcagcacatttatgttcccagtgtacttggatcacatgaggaagggagagaaaacgcaggttaacggtgaaaggaaagagactggatcagtgcctctccttaggaccaccagcggcctgttcctcccggggccctgtccatctctacaggtacaaacttgagtttggtagttcattccatgactgaaacgaatagaaggttttggcctaaaatgtattgacgcttatgcccacaaatggatatgtttccatgcttccatgtatcactgctgcttaaaatttttgcttttaaatgatcaaaatttaattagtggaaattttttaaataagtagtttaaatcttgagttttaaatccagtaggaaacctcacactcagtttttcacttctagtaggaggattttcttaaggcatgaggtatatttaataggatgtttgaatctctggatctgtattggtgctttatcctactcaaagcacttggaatgtatgcatttcattgagatgagtatatacacacttctgctatactactggaactactcacgacattttttacaattggtgatgaatcagcacaattaaaagcatctaaccgtcaccta

SEQ ID NO: 31969 - DNA, 271 bp, Homo sapiens
tggcagcttcaggacaccagtccaagccttatctatattgcaagtattgcataaaacctcagctgaaattttgataaattttatggaatttaagctagatagatcttgttcacctgaacatcctgtctgggatgcatggtagtagactgaacagctccactgcttatgaaatgtgtgacctcaggcaagttgttaagctcttggtgcttcatgtttatcattggcaaatggagatgataatagtacttatctcatgggattgttgtgtgga

SEQ ID NO: 31970 - DNA, 396 bp, Homo sapiens
gctccctgatggggagcatgctcagtttcctgcattcaggtacgagcagagacttggcaggatccgccccgttcagagttgcaggaagagccctggatgcctgtcgcaaattggaataagtgggagggagccacaggctggtacagaattgaagtctggaatacataaagtgtgttaatattaagtgcaacttcgtgaccttttaattgaggtattactgtgtaaccatcaccagattaatatatggaacatcataagtaccctgggagactccttgtgctatttcccactcagtgctctcctcttaaagaggtcagcactgttccggttcttctattaccatatatttgttttgcctgctcatgaacttcaaataaataaaaactatggtatgta

SEQ ID NO: 31971 - DNA, 893 bp, Homo sapiens
agaaatatgtaaccatgtaactgttgactgatcctagctctggcctgtgaactatagttttcattttgctgatttaattttctgttaatttcatcagtgtttttactagagggaatgcaacctacagtgtttttagtagagggaatgcaacctattttagttttttttcattcactctacccttacctatcataaatcacaaacttacatcataggtccccaattgcataagcattctaaagataaatttgggcattaggaagaggagttagaaagtgttttctgcttggaatcacaatgtggtgaaacatattccaccacagttacaatccatgtgactatttattaatacacattggactgtccaaaagcccacccaagccagtagcccacaatattagttcctcagataccaaagaagaagagggaggcctcatctgtgtgaaacctatataggaataaatgtcttctcccaagacgaggctacaaaagtcctatatcttctgaaactgcacatgatataaaaatagaatgactagctgaaaaatgtattatgtactatttgagaaaataaacactaaacattttgagagtaaattggtacccactttactgaaagtcattcagatctaaaggagagacatcaatctggtgatgaccgtggtcatggaaagatgaatttacttccccaaagtgacttactatcttactgagtcaccctaggcattgagctttatattagaccactacttattaggaaacttctttatctacctagaatcataaatgatcatttgaggatgccaaacctgcccacaaacaaaaatattttgccatcatctgccatggatatggctcttcccaagacaaaatctagtgagaagggaaattct

SEQ ID NO: 31972 - DNA, 319 bp, Homo sapiens
tacttgtacttctgtggattttcttctgtgtccctctgccttgtattctctttccctcagtgtctatccatctctgttatatatacacatatgggcatgcatacatatatacatattctatatgtatatatacatgtacattcatttttttcctctgttctttaattttttgtaatatagaattgaaaagtatgttttgcatttcttaattagtatggtttcttgaatatatttttcttgttttcaaaaaatataaaggaggtaagtgaaattatttaaatttctttataattaaaacaacccaaggaattggagtggc

SEQ ID NO: 31973 - DNA, 1043 bp, Homo sapiens
tgggagataatgatagtacctacttcataggttgtgaagattaaatgagataacacagtgcctagaacataattgctttctttcagagcttattatttgtgatcattagataaagggattaattgtaaggagaaataactttaagattatcaggtaactgctgattctggttatattattagccaagatgaagagaaggaaaaaatgggcaggtttggaaagtagccaggaggtaagggaaatgtggaatcacaagttcactttaagtcatatgaaatttgagatgatcaaggaatgaccaactagaaatgttcatgaaatagttaatatatttaaagtgcttagaaaagtgcctggcccagagtaaccaatatatacattacttattgttattattagcaatagcaactgaaaatggaaggctggagctctaaagataaattgagactagaaataatattttccctaatgtctagcctctcaatggcaagtgtggagctggatattatttctcatccatagttttacagcgagaagaaaacagaaaacttggcaatgccaagttcagtaaagatgctgaaagctgtcagaggtggaataacaggaaatgtttccaaaagaaggggcagaattagctatgtccatcttctctaaggtcagaagttgatgacaagatcagaagttggtctgaaaggctatggtagcagtgggttgagccgccgttggtaaaacaatgatgtgaagacaactaaaaaatgacttttgggcagaggaagtagttgtgctgaggatgggtattttgttttgtttttcgaatggttggcacagaagtatgttggtgggcagaggagtagtgaaaagcaaatggttaaagataagaggaggagaaaaaataatcagtctagcaaagttctaggggagatgtggacagatgccttttgaggggaatacggaacatctctgtctttctgaaagagtgtactactctgggccaggcgcggcggctcccgcctgtaatcccagcactttgggaggccaaggcg

SEQ ID NO: 31974 - DNA, 244 bp, Homo sapiens
acctgcttcattcaacagatctgctttcctggggcctcccagtgcacatctgctcctgacaaagcctcttttctcctcctattggtcagactgagagcaaaggcctggcaaggagacatactggttttgctttgtcagcacaattgcctgtgacattataattacaccaaatcttcattattagaaaggccccaatttagagattttcagagcctaaatgggattttctaagtgaaattgatta

SEQ ID NO: 31975 - DNA, 490 bp, Homo sapiens
gtatatctcctaacactatccctcccggctccccccaccccacaacagtccccagagtgtgatgttccccttcctgtgtccatgtgttctcattgttcaattcccacctatgagtgagaatatgcggtgtttggttttttgttcttgcgatagtttactaggaattattttcttaatttagtttttggatcactcattgcaagtatatagcaataaaattggtttttacaatatccatcttgtattatgctatatttccaaactcatttgctagttctaatagtttttaagtgaattccttaggattttctgtatataggaccatgttatttgcaaacatagatagttttacgtcttccttttcaaaccgaatgccttttctttttcttgcctaattgccccggaaactccaatacattggtgaacagcaaggtgagagtggacatatctgtctttttttgtgacctttgtggggaagtattcagtattt

SEQ ID NO: 31976 - DNA, 515 bp, Homo sapiens
ttctgttgaattgagctgatgtgagctgattggcaatgtgagctgatagtttacattgaaagtcattcctctgctcaactgagacaaatgcatatctgattctttcctctgccttattgtttatgtaaaaatgcagattcactgagccagactacattgtgtattcagtgaaaggctgatcaaggactcaaaagaatgcaacatttgtctcttatctacctatgacccggaagcccccaccttcgagttgttccacattctggatggaaccaatgtacatcttacacatattgattgatgtctcatatctccctaaaatgtataaaaccaacctgtgccctgaccaccttggccacatgttgtcagaacctcctaaggctgtgtcacgggcatgtccttaaccttggcaaaggaaactttctaaattgattgagacttgtctcagagatattttgggttcacaagggcaagtgggtgagggactcccacatagactctcatcctttcagtctgtc

SEQ ID NO: 31977 - DNA, 580 bp, Homo sapiens
aacaactaaattcaatatgtgaatttgtttggatcagattcaggcaagccaaccattgaaaacgttcatgagaatgaaggaaggttgattaagggctggcatcacaagttgggtgtcccagaaagcagactctaaaatggacttagtctgcaggatgcttattaagcagtgccctggggaccgatgcttggggaagggaaggaaataggagtgggcagagggagaagtcgagttgggatgtgagcccagcgacagccttagtggaccccacgaggagtcgtggagctggaacagccctgcacagttatcccatgctcagccaagatggccaggcctctccacctggcatggatcagtcattgggtgtaggccaccctggggaaggctgcagtaacacctgatggggttgatactaagggtcttgtcaacagcactcaaagctggtggggtcccaagtcctttgctgaagcttggggtcttgtgcagcccatcaaagcatagatcacagcttgggtattaggcaggcattggttgcatgggccagtgatgtggttatgttagaaaacatacttatttcttt

SEQ ID NO: 31978 - DNA, 639 bp, Homo sapiens
  misc_feature (570)..(570): n is a, c, g, or t
  misc_feature (598)..(599): n is a, c, g, or t
aacaactaaattcaatatgtgaatttgtttggatcagattcaggcaagccaaccattgaaaacgttcatgagaatgaaggaaggttgattaagggctggcatcacaagttgggtgtcccagaaagcagactctaaaatggacttagtctgcaggatgcttattaagcagtgccctggggaccgatgcttggggaagggaaggaaataggagtgggcagagggagaagtcgagttgggatgtgagcccagcgacagccttagtggaccccacgaggagtcgtggagctggaacagccctgcacagttatcccatgctcagccaagatggccaggcctctccacctggcatggatcagtcattgggtgtaggccaccctggggaaggctgcagtaacacctgatggggttgatactaagggtcttgtcaacagcactcaaagctggtggggtcccaagtcctttgctgaagcttggggtcttgtgcagcccatcaaagcatagatcacagcttgggtattttagggcaggcaatttgggtgggaattgggccaagtgattgttgggtttttntttaggaaaccgggattttggggggggnntgacaaggggggggtcccctgggccctttcggggacgggg

SEQ ID NO: 31979 - DNA, 447 bp, Homo sapiens
aacaaagttacagctaataagccaacaaaaagaagaaagctaacaatggaataagaaaaaatattcaattattccaaaaaaaaagcaggaggagagggaagggggaaacaaataactgataggacaaagagaaaacaaataataggatgatagagttaaacctaattacatggataatcgtattaaatgcaaatggtctaaacatcccaaataaaaggcagagattgttagactggcttttaaaacctgacaagactcaactatatgctgccttaagaaaatgcactttgaataaaaaagacatgaagaggttaaaagtaaaaggatagaaagatataccatgctgggaggctgaggcaggagaatggagtgaaccccggggggcggagcatgcagtgagccgaggttgcaccactgcactccagcctaggcgacagcaagactccg

SEQ ID NO: 31980 - DNA, 141 bp, Homo sapiens
gttttggctggatcagcaggtatgggctggattgcaagatgttggaaagtcaagccccggaatctggaaaaaatttaatagtccatatggtgtcattcaaaggtgatggggagggagggaatgaaatggtacagccactta

SEQ ID NO: 31981 - DNA, 370 bp, Homo sapiens
aagacataattaaaatctttacttaaattattaactttattggtaattatttctcattcacttctactttaacactttttttttttgagacaaggtcttgctctgtggcccaggctgggttgcagtgttgtgatcaccagtcagtacagtacagatcctcttgcctcagactcccatgtagcgggtactacaaatgtgtgccaccacatgtggctaattttttcatttttagtagagataaggtctctctctgtttctcaggctggtcttaaacttccaagctcaagtgattttcccacctcggcctcccagaattggccagactggtctcaaactcctgacctcaggcaatccatccactacggcctcc

SEQ ID NO: 31982 - DNA, 646 bp, Homo sapiens
cctatctgtctgtaccctaatccgttaatccatttttttctgatgaatttcaaattaagttgtggacatctgtgtatttcacccctaaatacttgagcatatccctcatttaacttgatttctctcttactttctacaattttatgcaaatgagctgtttcccataggttctgtcttgatcttaatcctttaagggtaagggctaacttgtggttgtgttaatggtcttcatcgctgctgcctatttttttttttaatttccttaaaacaaaaggtactctcaaaaggcatattgcacatgattagcaagattcagaaggaagtggttaaagtttcttacatgccttatacctatgcttttagttcttgttttgtataaggaatgttgcatgaggatattggaaaaaaatttaaaattaagagttgaaggcggaacctgatctataaggatccattatgttgaagccaaagaagcaggtctagctattctaagtaagtaggctggagaggtgtttcttaactctatctgggttttgttttccatttgaagaaaaattattttaagcaattaccatttttgattactgtaatgactcctgtgtccaaaaattaattacgtttctaattattaaaatagaaaaaaaaa

SEQ ID NO: 31983 - DNA, 377 bp, Homo sapiens
agagcagctacttcaccccgttgaagtgcggctgctaaaatgaaatagtgcattggtgtgaaagcactctcagacgtgtacgtggctacttgtatgtataagtgaagtgctgctgagacgttagtgatcaggtcaatttttggcagttgggacgaggggaggcttgcttttgtttgtatagttgagagtggcttgctaaggtgcagaaggtttcctgagcttggctcacacttaggttgctggcacttctttctttgcttcttgtcccattgtgtggcttggagaagcgtgggacttttcattaagttttaatattaataaaatgcaaatttattagaatttgtgctcctcgtgacatatccattatcccactttag

SEQ ID NO: 31984 - DNA, 447 bp, Homo sapiens
caagatggagagctaacaacctctgtcctctagaacatgaattaaacagaaccttaatgtctacagaggagtttgttaaatgaagcccagaaaagctgccaatagagttgcctcttacatattggccttgggatagtgggcatgttgggtctgtaaaccaagtcctcagagccttggtttcctcaactgtaaaatgggttcaagagtccccaccccaggcagatgttttgagaattaaacaggaagttgtgtgttcgaggcacccagcacatcagaattgcctcccacaaataccttcctggggcttcacagccctctaatttgagctcagagatacctcagacaaggacaaagctacaggcacatgggaccccagcctccaacagagaagagagaaatttgaaaccctgaagggacaaaaggtgaatggaagcagaacaggaaact

SEQ ID NO: 31985 - DNA, 653 bp, Homo sapiens
aatattatctttgtaattatttttaatatgtaaggaatgcttggaatatctgctgtatgtcaactttatgcagcttccttttgagggacaaatttaaaacaaacaaccccccatcacaaacttaaaggattgcaagggccagatctgttaagtggtttcataggagacacatccagcaattgtgtggtcagtggctcttttacccaataagatacatcacagtcacatgcttgatggtttatgttgacctaagatttattttgttaaaatctctctctgttgtgttcgttcttgttctgttttgttttgttttttaaagtcttgctgtggtctctttgtggcagaagtgtttcatgcatggcagcaggcctgttgcttttttatggcgattcccattgaaaatgtaagtaaatgtctgtggccttgttctctctatggtaaagatattattcaccatgtaaaacaaaaaacaatatttattgtattttagtatatttatataattatgttattgaaaaaaattggcattaaaacttaaccgcatcagaagcctattgtaaatacaagttctatttaagtgtactaattaacatataatatatgttttaaatatagaatttttaatgtttttaaatatattttcaaagtacata

SEQ ID NO: 31986 - DNA, 377 bp, Homo sapiens
ccttggtctccttgaaagtgaatcttgaaaattggattgactattggcagttggtccactgtccagtaagcattgttttgactgaagaaataaatagacagaatgccctcagacaacttatttttgctaatgagcaagttgcttcagtgaacgtagcaaaaatcaggcacgagtcactatatatcacagaaataatctagataaattagaaaattgtccagatactgtaggctgcatttagtaaagccaggcagagcaacaccaagcaggaattatcctcttttgtagttacagataatggatatacaagtacagactgcagttttggtttcacaaatggattttgagtgcaaaggtgcaatttggtaatgaaaagg

SEQ ID NO: 31987 - DNA, 469 bp, Homo sapiens
aaatgtaggcagtatatttaaacaaaacctcgataccattatcacaccttggccagacgcggtggctcatgcctgtaataccagcactttgggaggccaaggggagcggataacttgagatcaggagttcaaggccagcctggccaacatgataaaacctcatctctactaaaaatacaaaaattagctgggcgtgatggcactcacctgtaatcccagctactcaagaggctaaggcaagagagtcgcttgaacctgggaggcggagattgcagtgagccgagatcacactactgtactccagcctagtcgacagagcaagactctatctaaaataacaaaaaccttaatatcacaaaatcagtgttcaaatttccagttgtggcatgaatctcataaatgtgtgggtcttgtgggagagagtggctgttggttttgctttttatagtttatttgatgcattcggtct

SEQ ID NO: 31988 - DNA, 1413 bp, Homo sapiens
accactgcttctttttctgtttttaagcccatggtaacttggggaaggctttgatgctcttactgttatttctactattatgaaaactcaggttttccaaaacaatctcaagttgcggcagtggactgtgagaatagggggccccctcactccccaaacataagaagtatgtgcttttcttcttttatctatcccgctgagatatgtctatcttatttggaataaaagtatttattttggaaaacagctttttagcatttttaaaatgatgacccaactgtcattctcacagccctagatacacctaatggggaaatgtgagccacttaaaagccacttaaaaaccaaagggctttgggaatctatggcttgaggggtgccttcagataacaaaagaaaagtttcaggtatcagttaggatagaggttagacattgtactgaatatatccagcagatcttacatcccattacaaaccccagtaggtgtgttgtatacatacggcttaggggttaagttaacaaagaagtctgataagaaaaggaaatacagaggaagcataaatctctttggaataggattttgttccactcccttagagccctaacagtataccttagaaattattttacgacagtttgtacttaaagaccagaaagctactttagagacttggaaataatgagcctattgtcaaaaggtggtgcttgcggggcattaggactagagggttggtgaaaattcagacagaatgtaacttgacaaagagaagacagcaacaactgtaacaattatcttatgaatatttgcgaaactcaaagggatctgattggtgacctctgggctttatcaaattaacatcacaacttctagaagaaagtcaaccttcatcttttacaatagaaatcatatgttttgctaacccattcctatttaggctgaaaacaattaagagttatgggtacttaaaaaaatcattatgtttataaaattagtgatagaaggagcatagtgttcatacagtcacacacatacacttccttatttcttttatttaaactttgagtaacatagcagtctatgtttgggtcagttttcccttttttgtaattacattcagtggtttttgtaacttcattatttattgggaattagtgatttagtcagtgggagttttgtaaaacttaagattttggcttttttccccctcctcctggataaccagttaacccaataatggcttggccgatggaagggtaaaatgaggacagttatattttttaaatgtcattactgtcaccaaatcacacatatcattttctaagataaggaaatacaaccatttttacaagttgcaaaaaagtactctggcttggcaagtttatagactctcattttcttgataaactaaaaa

SEQ ID NO: 31989 - DNA, 882 bp, Homo sapiens
aaggcatggaataagttttgatcttgggtttactgctaacattgacttttcccgttagcccacctaggttctaaagagctagtatccagagctttgacacatggggtgccaggctttgtttctctgttaaaatcccccaaatttcctgactcctcagaacagctcagctcagctgggagtctgtggctgaggctggccgagacatcagcagagtacctggaatggaactccaagcaggtcgaagcttgggagccagtgtccttgcagtctgaatatttggggtggagagaggtaactctgttatgctcaccgctgggaccacagcaagaattcctttgccaccatttctctagtcaggcggagctgtccagggttcaggtggctttccaggacatgcttcaacttgcctggagatgggtggtgtgagcagatccctgggtgtctctctctggaggtaataatgacaaagaggtttagccactgagggagaaatgcatccccaagtctgaggggatatcccttttcttcaaacaatccctgggttgtttgtctacagtagaactctctttaataaaaaaaaaaaatgaaatgaaataaaaataaagtaaaagaacgcccatcttcagtataccaagcagcatgcagggcataatcgcctcaattcttggtatctggcacaatgttcagttggcagaaccacgctttctgtgggggtaataagcttaatatttagcctgcattactggggcagtggtgaagggagggggacaaaatgggagagagaccactgtagaaatggatattgaattccaagtattattgttggaatctctggagaaaatggctcctgaacatacaggattttcagtacagtttaaaaaa

SEQ ID NO: 31990 - DNA, 324 bp, Homo sapiens
ctctaaatcactaataatgtcaatgttcagcacttgaaaacaataccaaattattacaagccgtataagaagcagtggttgaagagacaagaatgaccacaggcccaacatctttacatctcttaaccctctgtttcctaggttgaaagtgtagaaattatgatctcctgaactgcagcattgtgaagttgacacaaggtgaagcaatgtcacattgtcaccacaacaggatcctttcatgctgagatccaaaaaagccagataacctgagtcaagaatcacaggaaagtcaataacaaaatcaggactgaggtcttgagaact

SEQ ID NO: 31991 - DNA, 165 bp, Homo sapiens
aagtaagtcggtattcaacttcagaatttttgtgaatagaaaaaacagaaatacagaagaaaatgcttagggaactactctctaaaatgaaatgtctctcctaggcagttgcagttaacagtatccaattttctaagcttctctggcagccacttgttacctccc

SEQ ID NO: 31992 - DNA, 884 bp, Homo sapiens
aaaatgggacaatgatacctaactcagaggaggattgtaataatagaataacctttgtaaggcaaaggcttattaaccatggttaaaaacccattaaatagcagttattaaatagcattatcaccaacccagttagcaatgctggggaaaagtcagggaaggaatgtcagaggagagcacatttaagccagttattgaagaatcagcctaagaacacagcacatgactgacaagcctatggcattggattatctgggaaaaggagattggtatatggatgcaacagaactaaatcttatcttaaaaacaacatgaatcacaaaagcatttatgctgaatgaaagacgccagatacagaagagtacattgtgtatgattacatttatatgaaaccctaaaacaggcaaaatagatttatactgatagaaagagcatggtagttgcctaaggcagtttgcagggggtgacacagagcaagaggactctttgtggagtgacagaccagcttcacatcttgatcatggtggtggttacatgggtgtatgcatttgtcaaaactcagcctgtgcaagtaaatgggcacattgtattgtatgaaaattatactaaaaacccagaatcctctcacctctatcccttgacaacccctaccaatggcagttacattttcacttctgccctctctaccagcaaattgatagctccaagctacacagttcccagcacatcattacagcttgttaacttggagtcacccagacaaatttctctccctcccattcaattttgaattaagtcagaaaaagacagattagcaaaacattaccagagatagaatttatgacaagcagctaatttttccaggactttcactaacatctccc

SEQ ID NO: 31993 - DNA, 562 bp, Homo sapiens
aatatttaactcttgaaaatgttaaactctttggttgcagaatgattactccattataaaggatagatcttttttagagtagaaaataggaaatgataggaacaaagttggcatgtcaacataatgaacaaatttaacatctgcatattcctaaagtacttttctaaattacttgtttcttgagattagtcaacattaagaaaaaaattgttttacaacaataattttgccccattgttttttaaattagattgtgtatagttacctaaattgtggtttcattttactcaccagaccatattaagctgtggaaccattagaaattggtgacagacaacactgataagtgggcattggcagcactaatagttatttgttgctgactatgcaacaaaaaagctaaaagctataaaacataatgcctgaatttttcatttgttctatagtagctatctaaaaaaatccaagtttgcttatgtaatattatttggtgtggtcatttgcccaaaatgaaataagctgtaagtttgtataatataaaataatctacctaaatcgtaca

SEQ ID NO: 31994 - DNA, 405 bp, Homo sapiens
ctctgtcctaaatctgacctgacaggctcttattaatgactgccacaacagaaacactgagaaaaagaggcaaccatgaaaacgtggaaagttctgacgacagaaaatagcaatcagcctttctcacatcccaaagctttaaaaaatatatgagtgcagcatggccagtatggaattgaccaaaaactaatcatcaagctagaaacgtggtgagagaaaaaaaaagggcaagaatatctttggcttatcacctcccacttttgcctactaatctgatgctgaaaagaaatgctcactgaagcattttagattttgaatctttcagatttgggatgctaaaccagtaagcatatgacaaatatttcagaataaaaaaatgtcagaaatccaaaacactttttgttc

SEQ ID NO: 31995 - DNA, 659 bp, Homo sapiens
ccagtactttgagctgctgttttacaatgaacatttttcattccttatcctagtggacccctatgacgttattgccattggctgtccttcccctactagtgttttcttttggctcccgtgtcagttctccgagattttaaacctccgcgactgttctctcttggtgggttcttctccttttattctcccctgtaaaatgctgtcattctcattccactcaatgagtctgggtctctaacccaggtccattctccacatttcacaccaagtagccatttagaatccctatctggataacctacaggaatctcaattcaccatgtctaaaactgaaatcccgccccttcctcctggattcacaacctcaactggtggtaccacaatctaccttatcacccatgccaggaacctaagatcactgttcctacccattccccaactgatcaataatcgggtcctgctaacttaatgcctaaacattttgggcactccctcctcttcatccttacaactactgcctttcatcgtcttttccatgaactatcatgatgaaatttctaacatgcaaatttgtttacgcatttcttcatctatttaaaattcttcagtggctctccagggtctttagagcctgcttctcaccatgttttcaagatctt

SEQ ID NO: 31996 - DNA, 310 bp, Homo sapiens
tcccaaggtgtttttcccattcctgagagctctgcagagatcttatttgcgtgaagcaaatccataaagtcattagcagataagtagatggacctgcctgtggtgaacacccaggctttcaacctaatagtttgttggcctggctggtggttcctgctgaaaatctttggggataattagcacagctgactgttgctgagccaggtaaaaacaccttgggaatgtcaagtttcacagatcagagccaggtttaatgccactaaagagcttcagaatttgagctcatgagttggtcgcccttttccgtcga

SEQ ID NO: 31997 - DNA, 318 bp, Homo sapiens
gtccaacaaaaaggtccttataaaaagaagagaagacacacacaatgaaggccatgtgaaggtggaggtagaggctgcagtgatgttgaatgcctggtgccaccacaagctgaaagagccaaggatggattctctaaaaccttccaagggagcacggccctgctgacgccttgactttcgatttctggcctccagaactatggaagaataaatttgtgttgcttgaaaacaccaagtttgtggtaatttgttatggcagccctatgagactaatagagtaagtatcctcaggacgatgaaaataaatgccagcgccta

SEQ ID NO: 31998 - DNA, 264 bp, Homo sapiens
acttgtgggaaagtaatgtagaatattactttaaaagagactaagctataaatttgaatacatataaaaaagcagtacccaagagtaaatatgtttgagcccaaaattacaaaatatccagttacaaatagattctaataaagattttactcaaaacaaaaatctacccactaatgcattaaatataagtgcattttaattaagactttaatttttttaaagcataactggtcataagaataatcctctgaaatgcatcttttc

SEQ ID NO: 31999 - DNA, 524 bp, Homo sapiens
agttataattttggtaagtggttctcctttgcccacaccttaccaggacaaaaggagcttactctacccaggcaattaagcaatctcccaccaccaccaagctcaaatgttttcatcatagactagggttcatttttatttccttccctggagctttgtaattctttcagcgtaaacattgttgaggttcaacagtccttattgctgagtaggactcgattgtatgaatatactataatttgttaatctgttttcctgttagtgaacattttattggtttctagtttttggcaagtgtgagtaaagctgctatgaacatttgcacacaaatattgtgacttctgggcatgtagtggtatcttgtggtttcagtctgcatttctctgactaatgaacacgttctcgtgtttattggccattaatatgtctttgagtgtgtatttttaaattaggttcgtttttattaccaagttataggaactctatgtattttgaataaaattccttgtcagttattttgcaaa

SEQ ID NO: 32000 - DNA, 857 bp, Homo sapiens
agttataattttggtaagtggttctcctttgcccacaccttaccaggacaaaaggagcttactctacccaggcaattaagcaatctcccaccaccaccaagctcaaatgttttcatcatagactagggttcatttttatttccttccctggagctttgtaattctttcagcgtaaacattgttgaggttcaacagtccttattgctgagtaggactcgattgtatgaatatactataatttgttaatctgttttcctgttagtgaacattttattggtttctagtttttggcaagtgtgagtaaagctgctatgaacatttgcacacaaatattgtgacttctgggcatgtagtggtatcttgtggtttcagtctgcatttctctgactaatgaacacgttctcgtgtttattggccattaatatgtctttgagtgtgtatttttaaattaggttcgtttttattaccaagttataggaactctatgtattttgaataaaattccttgtcagttattttgcaaatattttccccattgtgtgtcttgactcttgattttttttatagtgttttgagcagaagtttccactggagtcttaatttatcaatttttaaatggactttttctaaataaatctgcctacctccaaaaaaaaaaacaaaaaaacaaaagaaaaaaaagcaaaaacaaaaacagaaaagaaaacaaaaaacacagcacagaaaaaaaaagcagaaaaagaagaaaaacaaaaagagagggggggcgggctctagagaggattctccccttgggggggggcaccattctggtggggcgagcaaccttgttttttggttcgcagggggggccccag

SEQ ID NO: 32001 - DNA, 162 bp, Homo sapiens
cttgattttttttatagtgttttgagcagaagtttccactggagtcttaatttatcaatttttaaatggactttttctaaataaatctgcctacctccagattgttatggtggtattgttttctcataaaatgtttaagcttttatgtttttaggtctatta

SEQ ID NO: 32002 - DNA, 428 bp, Homo sapiens
gaactactcctgccccttttaaagggaagggagtgttatcgagccgaactggggtctacttgccctgtgtagtaaggtcaaatatctgtatcgaggcttgtagtggtagaaagcagggtgtttatttgtagggtgccaagcaaggagaatcaggcagcttatgcttaagatctgaggcatataggtaagggtttttaaggcagggaggcaggggttataggcagtcatgaattaattttttgagctttccctattaatatttatgtgaatgagcctggacaacatggtgaaaccccacctctaaaaaatacaaaaattaaatacaaaaaattagccaggcatggtggcaggcgcctgtagtcccagctacgtgggaggctgaggcaggagaatggcgtgaacccgggacacggagcttgcagtgacct

SEQ ID NO: 32003 - DNA, 399 bp, Homo sapiens
tttttttttttgagacaaggtctgtctctgtcacccaggttttagtgcagtggcctgatctcggttcactgcaacctctgcctcctgggttcaagagattcttgtgcctcagcctttggagtaggtggaactacaggcgtgaactaccactcccagctaatttttgtatttttggtagagaaggagtttcgccacgtggccaggctagtcttgaactcctggcctcaagggatacacccacctcggtctcccaaagtgctgggattacaggtgagagccacggtgctaggcctatattcacccaaactcttacagtcccccaaaatttgactgtacaccaacacctattctttcaaatattgaataggaagcccctcaaatgagatggaattaatactc

SEQ ID NO: 32004 - DNA, 1109 bp, Homo sapiens
tgccacttgcctggccctgtacccagggcctatctgggagccattcctgctatagctgggaccacttgtgaaacggctagttgtgcctaacagacatgctcagattcacaaaatgaattcagaacacttacctgtcccacccgtgaaagtgaccttggaggtgtcattgccccccaccaccccagtttctagtccaagccaacagctggtgctagatagatgcttgatgaatgagcagatttgactgttagttactctgtacctaaaactcctatctttacatcaaagccctgacagatttgcccttgacagactgaaatccggggctgctgcagggttcacctccaggaggcaccattcacgacactgtcccataaatggtaatgggctcccagggatactgtttacatagactgcactgagaacggtgacccttaggtttgtacaatgaggtaccctgttgaatgaccctaaaccagcctccaaaatgtgcaggatcccacattggtcagcgccaaccctgagcacaggatctaaaactatagatgatatggccaccctggccacagctggaaccaagctggtggcccaagagagagcctcttcttggaattgcatgtcagtttctcatacgcagtttcttcctatttttcccatttcccgttttaaagctagtggcatacctcacagtcaaataaccaagtggtcagtgtctcgacaatgtgcagtaacgaggtgggggctgcaagggtgaggggctcagtcaccttaacaaggcaggagacctcccacaaaaggctgatgtgtcgtccccagggccagctggacaagggcatgcagcgcaggggtagggggatggaaatattttctctcccgtaaactctgacttcatgtgagcaggcatggggtctccctgagagctgataaccgggaaaaccaaaaccaataatattcctaataataatactagaatgtaagaataatcatgtgtttttcactgaccgctgttgctctgcttttgtctttatatacagtagtttttataacaatgtccctaggttttaataaaggagtgtcatgtcaactgttccctagattgacgtttgctt

SEQ ID NO: 32005 - DNA, 558 bp, Homo sapiens
ctattttttgtatttttagtagagacagggtttctccatgttggtcaggctggtcttgaactcttgacctcaggtgatccacctgccttggcctcctgaagtgttgggattacagctgtgagccaccacgcccggccaaaaatccattttaaaagcccaatttttcacttctatttggttcagtgtttttcacctcttaaatggagttaataacaataacacctgttacatctatctctgatggttgttgtgagatgagatatgtgatgaagggctggatgcagtggctcacgtctgtaatcccaacaatttgggaggctgaggtgggaggatcacttgagcccaggagttcgagaccatcctgggcaacacagacccccatctctactaaaaattaaaaaaaaaaaaattagcccttcatggtagcacacacttgtagtctcagctattagggaggttgaggcaggaggatcacttgagtgtggaaggttgaggctgtagtgagccatgattgcaccactgcactccagcctgggcaacagagagacatcctttctc

SEQ ID NO: 32006 - DNA, 133 bp, Homo sapiens
gcatagacttggggctagacaggttgaaatcatggctagccatctaacaagctttgtaactttataaattgtttattttatctgagagttgatttcttcatttataaaatgaagatggtatctgctgaatata

SEQ ID NO: 32007 - DNA, 267 bp, Homo sapiens
tttttagtagagatggggtttcaccatgttagccaggatggtctcgatctcctgacctcgtgatctgcccgcctcggcctcccaaagtgctgggattacaggcatgagccaccgcgcccggcaaaaaaaaatttttaaagaaaatttttaacgtttgtttcaataaaaattaaaacaatgagatacaatttctcatctaattggcaaagtttttgacaattggtaatagtgaggctgtactgatagagtcactttcaaacactgtta

SEQ ID NO: 32008 - DNA, 431 bp, Homo sapiens
agaagctatgtctaccttctctgcttaacataatgctttcaaggctcatctgtttcgcagactttatcaatgcttcactcctttttatgagtgagtattacattgcatggatataccactctttcgtcacccatttatcagttgacagacatttggattgtccactctttgactattaggaatagtgctattactacatttgtgtacacattttcatgctgatgttttcaactgaattctcttaggcacatttatttttaaatgctagtctgacttcttcccttagttacagaatagcaacatgttattcaaatataagtaaatactaagctttaatttggaagcctatgcatgcttgagagaaatcacaattgcttacactatgacaacactagtgaaaacaaagtcttgatatggctatgtgactggac

SEQ ID NO: 32009 - DNA, 357 bp, Homo sapiens
ttctcctgcctcagcctcctgagtagctgggattacaggcgcacaccaccatgcctggctaatttttgttgttttagtagagacggagtttcaccatattggtcaggctggtctcaaactcttgacctcatgatctgcctgccttggcgtcccaaagtgttgggattacaggcgtgagtcactgtgccctgccagtattgttttgtctaaattatttgtgctgatgtttttcctactgtggttttcttcagattacccttgctctgagcctgcaattgactcatgaacttcttttccatgttctaaccttacaatgacttccttgtgttcactccaaatgtttttccctggttgcat

SEQ ID NO: 32010 - DNA, 1207 bp, Homo sapiens
  misc_feature (5)..(5): n is a, c, g, or t
  misc_feature (711)..(711): n is a, c, g, or t
ggccnacagttccgacgaaaaatggcggggtctcctgagttggtggtccttgaccctccatgggacaaggagctcgcggctggcacagagagccaggccttggtctccgccactccccgagaagactttcgggtgcgctgcacctcgaagcgggctgtgaccgaaatgctacaactgtgcggccgcttcgtgcaaaagctcggggacgctctgccggaggagattcgggagcccgctctgcgagatgcgcagtggacttttgaatcagctgtgcaagagaatatcagcattaatgggcaagcatggcaggaagcttcagataattgttttatggattctgacatcaaagtacttgaagatcagtttgatgaaatcatagtagatatagccacaaaacgtaagcagtatcccagaaagatcctggaatgtgtcatcaaaaccataaaagcaaaacaagaaattctgaagcagtaccaccctgttgtacatccactggacctaaaatatgaccctgatccagcccctcatatggaaaatttgaaatgcagaggggaaacagtagcaaaggagatcagtgaagccatgaagtccttgcctgcattaattgaacaaggagagggattttcccaagttctcaggatgcagcctgttatccacctccagaggattcaccaagaagtctttccagttgtcataggaaaccagatgctnaacctgagaacttttacacagatagaaccaaccacagagactggttccaggaaacctctgacggggtactgaaaagaaagcaaactaaagactgcccccagagaaaatggtatccattgcggccaaagaaaattaatcttgatacatgagctctttctgtttatttgggagttgaaaataggcaccatcaacatttagattacagcctaattaatacctagataagacttcatttgaaataagaaataactcttttactagtgattcatttatacagatatagtatctctgtgcggggatatgatataatatgtatttccttactgttttatctattgtaaataaaaagcattttacaaagtatcgacacagagcccatcagtgggcataaaaaatattacaagtgcaagacttttactgtccttaagtgccatcaactctcagctccttgtagctttgtggggatttaacaagtaacaaattctgtgtgttcctg

SEQ ID NO: 32011 - DNA, 1141 bp, Homo sapiens
  misc_feature (5)..(5): n is a, c, g, or t
  misc_feature (645)..(645): n is a, c, g, or t
ggccnacagttccgacgaaaaatggcggggtctcctgagttggtggtccttgaccctccatgggacaaggagctcgcggctggcacagagagccaggccttggtctccgccactccccgagaagactttcgggtgcgctgcacctcgaagcgggctgtgaccgaaatgctacaactgtgcggccgcttcgtgcaaaagctcggggacgctctgccggaggagattcgggagcccgctctgcgagatgcgcagtggacttttgaatcagctgtgcaagagaatatcagcattaatgggcaagcatggcaggaagcttcagataattgttttatggattctgacatcaaagtacttgaagatcagtttgatgaaatcatagtagatatagccacaaaacgtaagcagtatcccagaaagatcctggaatgtgtcatcaaaaccataaaagcaaaacaagaaattctgaagcagtaccaccctgttgtacatccactggacctaaaatatgaccctgatccagagtccttgcctgcattaattgaacaaggagagggattttcccaagttctcaggatgcagcctgttatccacctccagaggattcaccaagaagtctttccagttgtcataggaaaccagatgctnaacctgagaacttttacacagatagaaccaaccacagagactggttccaggaaacctctgacggggtactgaaaagaaagcaaactaaagactgcccccagagaaaatggtatccattgcggccaaagaaaattaatcttgatacatgagctctttctgtttatttgggagttgaaaataggcaccatcaacatttagattacagcctaattaatacctagataagacttcatttgaaataagaaataactcttttactagtgattcatttatacagatatagtatctctgtgcggggatatgatataatatgtatttccttactgttttatctattgtaaataaaaagcattttacaaagtatcgacacagagcccatcagtgggcataaaaaatattacaagtgcaagacttttactgtccttaagtgccatcaactctcagctccttgtagctttgtggggatttaacaagtaacaaattctgtgtgttcctg

SEQ ID NO: 32012 - DNA, 1086 bp, Homo sapiens
  misc_feature (5)..(5): n is a, c, g, or t
  misc_feature (590)..(590): n is a, c, g, or t
ggccnacagttccgacgaaaaatggcggggtctcctgagttggtggtccttgaccctccatgggacaaggagctcgcggctggcacagagagccaggccttggtctccgccactccccgagaagactttcgggtgcgctgcacctcgaagcgggctgtgaccgaaatgctacaactgtgcggccgcttcgtgcaaaagctcggggacgctctgccggaggagattcgggagcccgctctgcgagatgcgcagtggacttttgaatcagctgtgcaagagaatatcagcattaatgggcaagcatggcaggaagcttcagataattgttttatggattctgacatcaaagtacttgaagatcagtttgatgaaatcatagtagatatagccacaaaacgtaagcagtatcccagaaagatcctggaatgtgtcatcaaaaccataaaagcaaaacaagaaattctgagtccttgcctgcattaattgaacaaggagagggattttcccaagttctcaggatgcagcctgttatccacctccagaggattcaccaagaagtctttccagttgtcataggaaaccagatgctnaacctgagaacttttacacagatagaaccaaccacagagactggttccaggaaacctctgacggggtactgaaaagaaagcaaactaaagactgcccccagagaaaatggtatccattgcggccaaagaaaattaatcttgatacatgagctctttctgtttatttgggagttgaaaataggcaccatcaacatttagattacagcctaattaatacctagataagacttcatttgaaataagaaataactcttttactagtgattcatttatacagatatagtatctctgtgcggggatatgatataatatgtatttccttactgttttatctattgtaaataaaaagcattttacaaagtatcgacacagagcccatcagtgggcataaaaaatattacaagtgcaagacttttactgtccttaagtgccatcaactctcagctccttgtagctttgtggggatttaacaagtaacaaattctgtgtgttcctg

SEQ ID NO: 32013 - DNA, 1152 bp, Homo sapiens
  misc_feature (5)..(5): n is a, c, g, or t
  misc_feature (656)..(656): n is a, c, g, or t
ggccnacagttccgacgaaaaatggcggggtctcctgagttggtggtccttgaccctccatgggacaaggagctcgcggctggcacagagagccaggccttggtctccgccactccccgagaagactttcgggtgcgctgcacctcgaagcgggctgtgaccgaaatgctacaactgtgcggccgcttcgtgcaaaagctcggggacgctctgccggaggagattcgggagcccgctctgcgagatgcgcagtggacttttgaatcagctgtgcaagagaatatcagcattaatgggcaagcatggcaggaagcttcagataattgttttatggattctgacatcaaagtacttgaagatcagtttgatgaaatcatagtagatatagccacaaaacgtaagcagtatcccagaaagatcctggaatgtgtcatcaaaaccataaaagcaaaacaagaaattctgcccctcatatggaaaatttgaaatgcagaggggaaacagtagcaaaggagatcagtgaagccatgaagtccttgcctgcattaattgaacaaggagagggattttcccaagttctcaggatgcagcctgttatccacctccagaggattcaccaagaagtctttccagttgtcataggaaaccagatgctnaacctgagaacttttacacagatagaaccaaccacagagactggttccaggaaacctctgacggggtactgaaaagaaagcaaactaaagactgcccccagagaaaatggtatccattgcggccaaagaaaattaatcttgatacatgagctctttctgtttatttgggagttgaaaataggcaccatcaacatttagattacagcctaattaatacctagataagacttcatttgaaataagaaataactcttttactagtgattcatttatacagatatagtatctctgtgcggggatatgatataatatgtatttccttactgttttatctattgtaaataaaaagcattttacaaagtatcgacacagagcccatcagtgggcataaaaaatattacaagtgcaagacttttactgtccttaagtgccatcaactctcagctccttgtagctttgtggggatttaacaagtaacaaattctgtgtgttcctg

SEQ ID NO: 32014 - DNA, 868 bp, Homo sapiens
  misc_feature (5)..(5): n is a, c, g, or t
ggccnacagttccgacgaaaaatggcggggtctcctgagttggtggtccttgaccctccatgggacaaggagctcgcggctggcacagagagccaggccttggtctccgccactccccgagaagactttcgggtgcgctgcacctcgaagcgggctgtgaccgaaatgctacaactgtgcggccgcttcgtgcaaaagctcggggacgctctgccggaggagattcgggagcccgctctgcgagatgcgcagtggacttttgaatcagctgtgcaagagaatatcagcattaatgggcaagcatggcaggaagcttcagataattgttttatggattctgacatcaaagtacttgaagatcagtttgatgaaatcatagtagatataacacagatagaaccaaccacagagactggttccaggaaacctctgacggggtactgaaaagaaagcaaactaaagactgcccccagagaaaatggtatccattgcggccaaagaaaattaatcttgatacatgagctctttctgtttatttgggagttgaaaataggcaccatcaacatttagattacagcctaattaatacctagataagacttcatttgaaataagaaataactcttttactagtgattcatttatacagatatagtatctctgtgcggggatatgatataatatgtatttccttactgttttatctattgtaaataaaaagcattttacaaagtatcgacacagagcccatcagtgggcataaaaaatattacaagtgcaagacttttactgtccttaagtgccatcaactctcagctccttgtagctttgtggggatttaacaagtaacaaattctgtgtgttcctg

SEQ ID NO: 32015 - DNA, 1262 bp, Homo sapiens
  misc_feature (5)..(5): n is a, c, g, or t
  misc_feature (766)..(766): n is a, c, g, or t
ggccnacagttccgacgaaaaatggcggggtctcctgagttggtggtccttgaccctccatgggacaaggagctcgcggctggcacagagagccaggccttggtctccgccactccccgagaagactttcgggtgcgctgcacctcgaagcgggctgtgaccgaaatgctacaactgtgcggccgcttcgtgcaaaagctcggggacgctctgccggaggagattcgggagcccgctctgcgagatgcgcagtggacttttgaatcagctgtgcaagagaatatcagcattaatgggcaagcatggcaggaagcttcagataattgttttatggattctgacatcaaagtacttgaagatcagtttgatgaaatcatagtagatatagccacaaaacgtaagcagtatcccagaaagatcctggaatgtgtcatcaaaaccataaaagcaaaacaagaaattctgaagcagtaccaccctgttgtacatccactggacctaaaatatgaccctgatccagtggatgtacaacagggtggtacatccactggacctaaaatatgaccctgatccagcccctcatatggaaaatttgaaatgcagaggggaaacagtagcaaaggagatcagtgaagccatgaagtccttgcctgcattaattgaacaaggagagggattttcccaagttctcaggatgcagcctgttatccacctccagaggattcaccaagaagtctttccagttgtcataggaaaccagatgctnaacctgagaacttttacacagatagaaccaaccacagagactggttccaggaaacctctgacggggtactgaaaagaaagcaaactaaagactgcccccagagaaaatggtatccattgcggccaaagaaaattaatcttgatacatgagctctttctgtttatttgggagttgaaaataggcaccatcaacatttagattacagcctaattaatacctagataagacttcatttgaaataagaaataactcttttactagtgattcatttatacagatatagtatctctgtgcggggatatgatataatatgtatttccttactgttttatctattgtaaataaaaagcattttacaaagtatcgacacagagcccatcagtgggcataaaaaatattacaagtgcaagacttttactgtccttaagtgccatcaactctcagctccttgtagctttgtggggatttaacaagtaacaaattctgtgtgttcctg

SEQ ID NO: 32016 - DNA, 2132 bp, Homo sapiens
gcagcctgaggcagagctcgggggctgtcggtggggaccttgcaggagggcaccccaagcccgcccggcccgcccaacccagcccctgcgcgcagcccgggccgagtaggaccccgcgcgcccctcgccatggcggcgccctcgcggctcctgatccgcgggggtcgcgtggtcaacgatgacttctcggaggtggccgacgtgctggtggaggacggcgtggtgcgggcactcgggcacgacctgctgcctcccgggggcgctcctgcggggctgcgggtcctcgacgccgccggcaagctcgtcctgcccggaggcatcgacacacacacgcacatgcagttccccttcatgggctcgcggtccatcgacgacttccaccagggcaccaaggctgctctctcaggaggcaccaccatgattattgatttcgccattcctcagaaaggtggctccctcattgaggccttcgagacctggcgaagctgggctgatcccaaagtttgctgcgactacagccttcatgtggcagtgacgtggtggagtgaccaggttaaagaagaaatgaaaatccttgtgcaagataaaggtgttaactctttcaagatgtttatggcctataaagatctgtacatggtgacagacctggagctgtacgaagccttctctcggtgcaaggaaattggagcaattgcccaggtccatgcggaaaatggagacttaattgcagagggagcaaagaagatgttggctctggggataacaggccctgagggccacgagctgtgccgcccagaggcagtggaggcagaggccacgctgagagccatcaccatagccagcgctgtgaactgtcctctctacattgtgcatgtgatgagcaagtctgcagctaaggtgatagcggatgcaaggagagatgggaaggtggtctatggtgaacccatagcagccagtcttggcacagatggcactcactactggaataaagaatggcaccatgcagcccaccatgtcatgggtccacctttgcgaccagacccctcaacacccgacttcctcatgaatctgttggctaatgatgatctaaccacaacagggactgataactgcactttcaacacctgccagaaagctcttgggaaggatgattttaccaagatccccaatggggtgaatggtgttgaagatcggatgtccgtaatatgggaaaaaggcgtgcatagtggtaaaatggatgaaaacagatttgtggcagttaccagcacaaatgcagccaaaatttttaatctctatccaagaaaaggaagaatagctgtaggatcagatgctgacattgttatttgggacccaaaaggcacaaggactatctcagcaaaaactcatcatcaggctgttaacttcaacattttcgagggcatggtttgccacggggtgccccttgtgactatttcaagaggcaaagtggtatatgaagccggagtgttcagtgtcacggcaggagatgggaagtttattcctcgaaaaccatttgctgaatatatttacaaacgaataaagcagcgagaccggacttgcacacctacccctgtggagcgtgcaccctataagggagaagtcgccacactgaaatccagagtgacaaaagaagatgccacagcagggaccaggaaacaggcccacccctgaagtgtgtgccatcggtaaaaaaatcagaggaaaggaggctgccattcccttcacagccaaacattgtcaacccatggagaagcaggccttattcaactccctaggatcctttagaaaaaattcaccactataggcttctttgattttctttcagaagcaattgctgtctttctcactgtgtttttgttgctgcataagattgaaggtataaatttatattattgtgatggaaaggctgtgtggaaattcattgatgatactttaaaatgtcatctttgcttgtactagatttcttacttagaatttttaaaaatcattttcttgtttaaatagtttctttttttaaaaaaatggttacattagttttaaaatagctctgtgattttactttttattgtaattaataaacattgagatcttcattttataccttattatctgat

SEQ ID NO: 32017 - DNA, 4165 bp, Homo sapiens
gatgcagcacaacaaaagagcctgacagaaacggagtcagcccacgccaggccaaaccacaaaaagaagaaagcaggcttagatgggaagcccccttcatagctccctccccaaaaatcccttctacccatatctattgagtgcttgttatgaagaaagagagcagcacaccggccctctgtctgctgggggagactgacgagtgaacagattattccagaaacctggggtaagcaagatagtggataggggacagagggccaaagcttcctagactgatgattagctgagctgagtgataaaagagaagtcagataattacacaaaaatgagagcggcagcccagcccatgcaaaagcatggccctgaccggaagctaccaggaaggattctgatgtgcctggcctgggtggtgcctgctcccagagcctgcaagctgggttctggggaagcatcctctaggtgatagagcaggctgtagagcaagccctgttctgagtgaggaggacaggccctgtgtgtgatggccccacctgagccactggcatgggcagtcagttcccaagacggagtccaggacagacaaaaaatgaacagctgaaaagtgcaagtagtgtaggttcaaggaagtggtgtaggaagagggagacggaatgggatctgaggagggctgcacagcacacagtaggcggcacaaaagtctgctcagttaggtcacatgctccagaggcactcactgcaaaagagcctgaagattgaactgaaatataccatcggctttgctgagtatgaatgccaagaggagcagagagaagtcaagccctctaggtgataggcaggaacgagctgaaagaaggacataaatcttggtttgctcagacgggcctggattatacttacgttaattatgtttagtgcccttttcatgctaagaagtgtcctactttggatgataaattgtacagtcaccctaggtttaagtgatattcaggcagtctggcttggaaagtcaagtcaggagaagaaaaaaaaaaaaaaaaaaacagggaccaaggacctgaaagggaggatgtggccagagagtggggtattagtgagtttaaggtttcagatgtggtggtccaaggtggtagaaatgggaggctggcccttcatttcctggtgtctgtgttcctcaagatgagaacagggctcaaagactgagtagacagtgagccaaaatggaagtccagcaaagcatttagacagatacagaaagtgagcagaggcttggcctggtgagggaagggcaggagtccccccatttcctgagcactcagtgcacacccgatgcagtgcttcaaattctgtggctgcaggagctgtgggccttgttctgtgttggatactcggtgtttggtgtactctctggggctgtgtgagctcagtaaatatctgctgaatgaatgaagaaaatgctttggctctggaaattctccactatctgagagataggtttatttcccccatttcatggatgaggaagtaggcctggaggcattaattaacttgtcagtttcctatgtgtagtaaatggcaaatggagaattctaacttagatctgtctcacttcaaaggtcacactgttgatcactacaatgtattagtttgggtggtcaaaatgagacccacaataatttgttatttgtctgtgtgtgtgtgtgtgtgtgtgtgtgtgtgtgtgtgtgatttcaaaactctgctcaagcactgacagctctcgctgaatccagcagagggttctgctgcatagtcggtcaccaacgaggtgagattctgtggaagatccataatgcacagagacaggaaagtggaaagcgtacccaattgctagaatctgaagcaactgctctgagagtgttaggagaggtacaaagaagcactgcaaactcaggtgagtaggactgaaactagaagaaaaggtcggatgttggaaaggacagcaggagacacttgtgggactcagaagggcgtgaggatatggcagaggccccagtgagtgtccctgggcctctgtctgaggcagattaatacccacaaaaagtgggacaatccagattctcaaggttgccaggaatttctgtgaaaggccaaggggatggggaggcacgtgataaatttataagattctttttttaaagctctcgcaattcataaagggagctacacttaactttgaactcaagaaaataaaccacaagagagaaatgaaatgttctctttcagacttgcacacctacccctgtggagcgtgcaccctataagggagaagtcgccacactgaaatccagagtgacaaaagaagatgccacagcagggaccaggaaacaggcccacccctgaagtgtgtgccatcggtaagggactgtaggcaagaaaagtcttcctgcatgacagcatatgaaattagcatctctcctcataagggttgaagagatcaaggtcagaggcttcacagtgatccaagactcaaggacaattgagccaagggaagattgatcaaagcagaacatttagataagccttccagattgtagaaggccttgggcttgctagagagtcattctttaagatgttaggaaacattcaatacagccttggataatcaactatgagcaagttgcactaaggaggctgataacatacagagggaactacttaagacagggagtataatttcatggtcaaaatttacaaatgaattaggaccttatctggagaaatgaatcttcatattgtaaatacaacggtgttctaaaatttagaataaatgaaaaatgaataaaatgttgctttaggggatataatccttcagaaaaattctttgatagtatctgattatttcacagttagttttgggaataatattacagatacagtcatttttgcaaaagtatttgagcacttcatcagttttctctgtcttttgacatgcagatctttcttttctgaagtgcctcgtatcatcatccttgtcaattttctttcttcagttgtcttctggtcctgctctctcagatcctcatttaacagcggctttgctgtaattttagcatctccctaatatcacttccactgacttcatgaaatctacatgttttgccagttttgcaattttgctaggctcttaatttttttttaacgtgtgatatcttttcagacagttcaacacgtggccatctgcacaagacttaaccccagaggttgacctaatggacctggttagacatttgtgttaatgagaggcacagtttgacaacggtctggttttctacatattcaggcactgcaccttttcacattttgacaacctcttattccctgcataaatcctgttcctgcagggatttggataatgagggcttgaatggcaaagccctctgtgctacatgccatgttctttcattattgaatgttgtgtctttaacaggactatctagcccaaagtctcaacatttttgtcattttcagacgaccagaattattcttctaatctaggatgattttgttaaaaattcagggaaagattagcaagagaaaggaatgcgattcaatgctataacatgctattaatgacatttataggagcaggattagtgtttactttgattatagcatttcttgggggttaggtttgaattctgcatctctttgtgagggagaatgttacagtgagttcctttcattctcttcaaaggtaaaaaaatcagaggaaaggaggctgccattcccttcacagccaaacattgtcaacccatggagaagcaggccttattcaactccctaggatcctttagaaaaaattcaccactataggcttctttgattttctttcagaagcaattgctgtctttctcactgtgtttttgttgctgcataagattgaaggtataaatttatattattgtgatggaaaggctgtgtggaaattcattgatgatactttaaaatgtcatctttgcttgtactagatttcttacttagaatttttaaaaatcattttcttgtttaaatagtttctttttttaaaaaaatggttacattagttttaaaatagctctgtgattttactttttattgtaattaataaacattgagatcttcattttataccttattatctgat

SEQ ID NO: 32018 - DNA, 2078 bp, Homo sapiens
gcagcctgaggcagagctcgggggctgtcggtggggaccttgcaggagggcaccccaagcccgcccggcccgcccaacccagcccctgcgcgcagcccgggccgagtaggaccccgcgcgcccctcgccatggcggcgccctcgcggctcctgatccgcgggggtcgcgtggtcaacgatgacttctcggaggtggccgacgtgctggtggaggacggcgtggtgcgggcactcgggcacgacctgctgcctcccgggggcgctcctgcggggctgcgggtcctcgacgccgccggcaagctcgtcctgcccggaggcatcgacacacacacgcacatgcagttccccttcatgggctcgcggtccatcgacgacttccaccagggcaccaaggctgctctctcaggaggcaccaccatgattattgatttcgccattcctcagaaaggtggctccctcattgaggccttcgagacctggcgaagctgggctgatcccaaagtttgctgcgactacagccttcatgtggcagtgacgtggtggagtgaccaggttaaagaagaaatgaaaatccttgtgcaagataaaggtgttaactctttcaagatgtttatggcctataaagatctgtacatggtgacagacctggagctgtacgaagccttctctcggtgcaaggaaattggagcaattgcccaggtccatgcggaaggccctgagggccacgagctgtgccgcccagaggcagtggaggcagaggccacgctgagagccatcaccatagccagcgctgtgaactgtcctctctacattgtgcatgtgatgagcaagtctgcagctaaggtgatagcggatgcaaggagagatgggaaggtggtctatggtgaacccatagcagccagtcttggcacagatggcactcactactggaataaagaatggcaccatgcagcccaccatgtcatgggtccacctttgcgaccagacccctcaacacccgacttcctcatgaatctgttggctaatgatgatctaaccacaacagggactgataactgcactttcaacacctgccagaaagctcttgggaaggatgattttaccaagatccccaatggggtgaatggtgttgaagatcggatgtccgtaatatgggaaaaaggcgtgcatagtggtaaaatggatgaaaacagatttgtggcagttaccagcacaaatgcagccaaaatttttaatctctatccaagaaaaggaagaatagctgtaggatcagatgctgacattgttatttgggacccaaaaggcacaaggactatctcagcaaaaactcatcatcaggctgttaacttcaacattttcgagggcatggtttgccacggggtgccccttgtgactatttcaagaggcaaagtggtatatgaagccggagtgttcagtgtcacggcaggagatgggaagtttattcctcgaaaaccatttgctgaatatatttacaaacgaataaagcagcgagaccggacttgcacacctacccctgtggagcgtgcaccctataagggagaagtcgccacactgaaatccagagtgacaaaagaagatgccacagcagggaccaggaaacaggcccacccctgaagtgtgtgccatcggtaaaaaaatcagaggaaaggaggctgccattcccttcacagccaaacattgtcaacccatggagaagcaggccttattcaactccctaggatcctttagaaaaaattcaccactataggcttctttgattttctttcagaagcaattgctgtctttctcactgtgtttttgttgctgcataagattgaaggtataaatttatattattgtgatggaaaggctgtgtggaaattcattgatgatactttaaaatgtcatctttgcttgtactagatttcttacttagaatttttaaaaatcattttcttgtttaaatagtttctttttttaaaaaaatggttacattagttttaaaatagctctgtgattttactttttattgtaattaataaacattgagatcttcattttataccttattatctgat

SEQ ID NO: 32019 - DNA, 2011 bp, Homo sapiens
gcagcctgaggcagagctcgggggctgtcggtggggaccttgcaggagggcaccccaagcccgcccggcccgcccaacccagcccctgcgcgcagcccgggccgagtaggaccccgcgcgcccctcgccatggcggcgccctcgcggctcctgatccgcgggggtcgcgtggtcaacgatgacttctcggaggtggccgacgtgctggtggaggacggcgtggtgcgggcactcgggcacgacctgctgcctcccgggggcgctcctgcggggctgcgggtcctcgacgccgccggcaagctcgtcctgcccggaggcatcgacacacacacgcacatgcagttccccttcatgggctcgcggtccatcgacgacttccaccagggcaccaaggctgctctctcaggaggcaccaccatgattattgatttcgccattcctcagaaaggtggctccctcattgaggccttcgagacctggcgaagctgggctgatcccaaagtttgctgcgactacagccttcatgtggcagtgacgtggtggagtgaccagataaagatctgtacatggtgacagacctggagctgtacgaagccttctctcggtgcaaggaaattggagcaattgcccaggtccatgcggaaggccctgagggccacgagctgtgccgcccagaggcagtggaggcagaggccacgctgagagccatcaccatagccagcgctgtgaactgtcctctctacattgtgcatgtgatgagcaagtctgcagctaaggtgatagcggatgcaaggagagatgggaaggtggtctatggtgaacccatagcagccagtcttggcacagatggcactcactactggaataaagaatggcaccatgcagcccaccatgtcatgggtccacctttgcgaccagacccctcaacacccgacttcctcatgaatctgttggctaatgatgatctaaccacaacagggactgataactgcactttcaacacctgccagaaagctcttgggaaggatgattttaccaagatccccaatggggtgaatggtgttgaagatcggatgtccgtaatatgggaaaaaggcgtgcatagtggtaaaatggatgaaaacagatttgtggcagttaccagcacaaatgcagccaaaatttttaatctctatccaagaaaaggaagaatagctgtaggatcagatgctgacattgttatttgggacccaaaaggcacaaggactatctcagcaaaaactcatcatcaggctgttaacttcaacattttcgagggcatggtttgccacggggtgccccttgtgactatttcaagaggcaaagtggtatatgaagccggagtgttcagtgtcacggcaggagatgggaagtttattcctcgaaaaccatttgctgaatatatttacaaacgaataaagcagcgagaccggacttgcacacctacccctgtggagcgtgcaccctataagggagaagtcgccacactgaaatccagagtgacaaaagaagatgccacagcagggaccaggaaacaggcccacccctgaagtgtgtgccatcggtaaaaaaatcagaggaaaggaggctgccattcccttcacagccaaacattgtcaacccatggagaagcaggccttattcaactccctaggatcctttagaaaaaattcaccactataggcttctttgattttctttcagaagcaattgctgtctttctcactgtgtttttgttgctgcataagattgaaggtataaatttatattattgtgatggaaaggctgtgtggaaattcattgatgatactttaaaatgtcatctttgcttgtactagatttcttacttagaatttttaaaaatcattttcttgtttaaatagtttctttttttaaaaaaatggttacattagttttaaaatagctctgtgattttactttttattgtaattaataaacattgagatcttcattttataccttattatctgat

SEQ ID NO: 32020 - DNA, 2825 bp, Homo sapiens
gatgcagcacaacaaaagagcctgacagaaacggagtcagcccacgccaggccaaaccacaaaaagaagaaagcaggcttagatgggaagcccccttcatagctccctccccaaaaatcccttctacccatatctattgagtgcttgttatgaagaaagagagcagcacaccggccctctgtctgctgggggagactgacgagtgaacagattattccagaaacctggggtaagcaagatagtggataggggacagagggccaaagcttcctagactgatgattagctgagctgagtgataaaagagaagtcagataattacacaaaaatgagagcggcagcccagcccatgcaaaagcatggccctgaccggaagctaccaggaaggattctgatgtgcctggcctgggtggtgcctgctcccagagcctgcaagctgggttctggggaagcatcctctaggtgatagagcaggctgtagagcaagccctgttctgagtgaggaggacaggccctgtgtgtgatggccccacctgagccactggcatgggcagtcagttcccaagacggagtccaggacagacaaaaaatgaacagctgaaaagtgcaagtagtgtaggttcaaggaagtggtgtaggaagagggagacggaatgggatctgaggagggctgcacagcacacagtaggcggcacaaaagtctgctcagttaggtcacatgctccagaggcactcactgcaaaagagcctgaagattgaactgaaatataccatcggctttgctgagtatgaatgccaagaggagcagagagaagtcaagccctctaggtgataggcaggaacgagctgaaagaaggacataaatcttggtttgctcagacgggcctggattatacttacgttaattatgtttagtgcccttttcatgctaagaagtgtcctactttggatgataaattgtacagtcaccctaggtttaagtgatattcaggcagtctggcttggaaagtcaagtcaggagaagaaaaaaaaaaaaaaaaaaacagggaccaaggacctgaaagggaggatgtggccagagagtggggtattagtgagtttaaggtttcagatgtggtggtccaaggtggtagaaatgggaggctggcccttcatttcctggtgtctgtgttcctcaagatgagaacagggctcaaagactgagtagacagtgagccaaaatggaagtccagcaaagcatttagacagatacagaaagtgagcagaggcttggcctggtgagggaagggcaggagtccccccatttcctgagcactcagtgcacacccgatgcagtgcttcaaattctgtggctgcaggagctgtgggccttgttctgtgttggatactcggtgtttggtgtactctctggggctgtgtgagctcagtaaatatctgctgaatgaatgaagaaaatgctttggctctggaaattctccactatctgagagataggtttatttcccccatttcatggatgaggaagtaggcctggaggcattaattaacttgtcagtttcctatgtgtagtaaatggcaaatggagaattctaacttagatctgtctcacttcaaaggtcacactgttgatcactacaatgtattagtttgggtggtcaaaatgagacccacaataatttgttatttgtctgtgtgtgtgtgtgtgtgtgtgtgtgtgtgtgtgtgtgatttcaaaactctgctcaagcactgacagctctcgctgaatccagcagagggttctgctgcatagtcggtcaccaacgaggtgagattctgtggaagatccataatgcacagagacaggaaagtggaaagcgtacccaattgctagaatctgaagcaactgctctgagagtgttaggagaggtacaaagaagcactgcaaactcaggtgagtaggactgaaactagaagaaaaggtcggatgttggaaaggacagcaggagacacttgtgggactcagaagggcgtgaggatatggcagaggccccagtgagtgtccctgggcctctgtctgaggcagattaatacccacaaaaagtgggacaatccagattctcaaggttgccaggaatttctgtgaaaggccaaggggatggggaggcacgtgataaatttataagattctttttttaaagctctcgcaattcataaagggagctacacttaactttgaactcaagaaaataaaccacaagagagaaatgaaatgttctctttcagacttgcacacctacccctgtggagcgtgcaccctataagggagaagtcgccacactgaaatccagagtgacaaaagaagatgccacagcagggaccaggaaacaggcccacccctgaagtgtgtgccatcggtaaaaaaatcagaggaaaggaggctgccattcccttcacagccaaacattgtcaacccatggagaagcaggccttattcaactccctaggatcctttagaaaaaattcaccactataggcttctttgattttctttcagaagcaattgctgtctttctcactgtgtttttgttgctgcataagattgaaggtataaatttatattattgtgatggaaaggctgtgtggaaattcattgatgatactttaaaatgtcatctttgcttgtactagatttcttacttagaatttttaaaaatcattttcttgtttaaatagtttctttttttaaaaaaatggttacattagttttaaaatagctctgtgattttactttttattgtaattaataaacattgagatcttcattttataccttattatctgat

SEQ ID NO: 32021 - DNA, 2771 bp, Homo sapiens
gatgcagcacaacaaaagagcctgacagaaacggagtcagcccacgccaggccaaaccacaaaaagaagaaagcaggcttagatgggaagcccccttcatagctccctccccaaaaatcccttctacccatatctattgagtgcttgttatgaagaaagagagcagcacaccggccctctgtctgctgggggagactgacgagtgaacagattattccagaaacctggggtaagcaagatagtggataggggacagagggccaaagcttcctagactgatgattagctgagctgagtgataaaagagaagtcagataattacacaaaaatgagagcggcagcccagcccatgcaaaagcatggccctgaccggaagctaccaggaaggattctgatgtgcctggcctgggtggtgcctgctcccagagcctgcaagctgggttctggggaagcatcctctaggtgatagagcaggctgtagagcaagccctgttctgagtgaggaggacaggccctgtgtgtgatggccccacctgagccactggcatgggcagtcagttcccaagacggagtccaggacagacaaaaaatgaacagctgaaaagtgcaagtagtgtaggttcaaggaagtggtgtaggaagagggagacggaatgggatctgaggagggctgcacagcacacagtaggcggcacaaaagtctgctcagttaggtcacatgctccagaggcactcactgcaaaagagcctgaagattgaactgaaatataccatcggctttgctgagtatgaatgccaagaggagcagagagaagtcaagccctctaggtgataggcaggaacgagctgaaagaaggacataaatcttggtttgctcagacgggcctggattatacttacgttaattatgtttagtgcccttttcatgctaagaagtgtcctactttggatgataaattgtacagtcaccctaggtttaagtgatattcaggcagtctggcttggaaagtcaagtcaggagaagaaaaaaaaaaaaaaaaaaacagggaccaaggacctgaaagggaggatgtggccagagagtggggtattagtgagtttaaggtttcagatgtggtggtccaaggtggtagaaatgggaggctggcccttcatttcctggtgtctgtgttcctcaagatgagaacagggctcaaagactgagtagacagtgagccaaaatggaagtccagcaaagcatttagacagatacagaaagtgagcagaggcttggcctggtgagggaagggcaggagtccccccatttcctgagcactcagtgcacacccgatgcagtgcttcaaattctgtggctgcaggagctgtgggccttgttctgtgttggatactcggtgtttggtgtactctctggggctgtgtgagctcagtaaatatctgctgaatgaatgaagccatttcatggatgaggaagtaggcctggaggcattaattaacttgtcagtttcctatgtgtagtaaatggcaaatggagaattctaacttagatctgtctcacttcaaaggtcacactgttgatcactacaatgtattagtttgggtggtcaaaatgagacccacaataatttgttatttgtctgtgtgtgtgtgtgtgtgtgtgtgtgtgtgtgtgtgtgatttcaaaactctgctcaagcactgacagctctcgctgaatccagcagagggttctgctgcatagtcggtcaccaacgaggtgagattctgtggaagatccataatgcacagagacaggaaagtggaaagcgtacccaattgctagaatctgaagcaactgctctgagagtgttaggagaggtacaaagaagcactgcaaactcaggtgagtaggactgaaactagaagaaaaggtcggatgttggaaaggacagcaggagacacttgtgggactcagaagggcgtgaggatatggcagaggccccagtgagtgtccctgggcctctgtctgaggcagattaatacccacaaaaagtgggacaatccagattctcaaggttgccaggaatttctgtgaaaggccaaggggatggggaggcacgtgataaatttataagattctttttttaaagctctcgcaattcataaagggagctacacttaactttgaactcaagaaaataaaccacaagagagaaatgaaatgttctctttcagacttgcacacctacccctgtggagcgtgcaccctataagggagaagtcgccacactgaaatccagagtgacaaaagaagatgccacagcagggaccaggaaacaggcccacccctgaagtgtgtgccatcggtaaaaaaatcagaggaaaggaggctgccattcccttcacagccaaacattgtcaacccatggagaagcaggccttattcaactccctaggatcctttagaaaaaattcaccactataggcttctttgattttctttcagaagcaattgctgtctttctcactgtgtttttgttgctgcataagattgaaggtataaatttatattattgtgatggaaaggctgtgtggaaattcattgatgatactttaaaatgtcatctttgcttgtactagatttcttacttagaatttttaaaaatcattttcttgtttaaatagtttctttttttaaaaaaatggttacattagttttaaaatagctctgtgattttactttttattgtaattaataaacattgagatcttcattttataccttattatctgat

SEQ ID NO: 32022 - DNA, 2772 bp, Homo sapiens
gatgcagcacaacaaaagagcctgacagaaacggagtcagcccacgccaggccaaaccacaaaaagaagaaagcaggcttagatgggaagcccccttcatagctccctccccaaaaatcccttctacccatatctattgagtgcttgttatgaagaaagagagcagcacaccggccctctgtctgctgggggagactgacgagtgaacagattattccagaaacctggggtaagcaagatagtggataggggacagagggccaaagcttcctagactgatgattagctgagctgagtgataaaagagaagtcagataattacacaaaaatgagagcggcagcccagcccatgcaaaagcatggccctgaccggaagctaccaggaaggattctgatgtgcctggcctgggtggtgcctgctcccagagcctgcaagctgggttctggggaagcatcctctaggtgatagagcaggctgtagagcaagccctgttctgagtgaggaggacaggccctgtgtgtgatggccccacctgagccactggcatgggcagtcagttcccaagacggagtccaggacagacaaaaaatgaacagctgaaaagtgcaagtagtgtaggttcaaggaagtggtgtaggaagagggagacggaatgggatctgaggagggctgcacagcacacagtaggcggcacaaaagtctgctcagttaggtcacatgctccagaggcactcactgcaaaagagcctgaagattgaactgaaatataccatcggctttgctgagtatgaatgccaagaggagcagagagaagtcaagccctctaggtgataggcaggaacgagctgaaagaaggacataaatcttggtttgctcagacgggcctggattatacttacgttaattatgtttagtgcccttttcatgctaagaagtgtcctactttggatgataaattgtacagtcaccctaggtttaagtgatattcaggcagtctggcttggaaagtcaagtcaggagaagaaaaaaaaaaaaaaaaaaacagggaccaaggacctgaaagggaggatgtggccagagagtggggtattagtgagtttaaggtttcagatgtggtggtccaaggtggtagaaatgggaggctggcccttcatttcctggtgtctgtgttcctcaagatgagaacagggctcaaagactgagtagacagtgagcttggcctggtgagggaagggcaggagtccccccatttcctgagcactcagtgcacacccgatgcagtgcttcaaattctgtggctgcaggagctgtgggccttgttctgtgttggatactcggtgtttggtgtactctctggggctgtgtgagctcagtaaatatctgctgaatgaatgaagaaaatgctttggctctggaaattctccactatctgagagataggtttatttcccccatttcatggatgaggaagtaggcctggaggcattaattaacttgtcagtttcctatgtgtagtaaatggcaaatggagaattctaacttagatctgtctcacttcaaaggtcacactgttgatcactacaatgtattagtttgggtggtcaaaatgagacccacaataatttgttatttgtctgtgtgtgtgtgtgtgtgtgtgtgtgtgtgtgtgtgtgatttcaaaactctgctcaagcactgacagctctcgctgaatccagcagagggttctgctgcatagtcggtcaccaacgaggtgagattctgtggaagatccataatgcacagagacaggaaagtggaaagcgtacccaattgctagaatctgaagcaactgctctgagagtgttaggagaggtacaaagaagcactgcaaactcaggtgagtaggactgaaactagaagaaaaggtcggatgttggaaaggacagcaggagacacttgtgggactcagaagggcgtgaggatatggcagaggccccagtgagtgtccctgggcctctgtctgaggcagattaatacccacaaaaagtgggacaatccagattctcaaggttgccaggaatttctgtgaaaggccaaggggatggggaggcacgtgataaatttataagattctttttttaaagctctcgcaattcataaagggagctacacttaactttgaactcaagaaaataaaccacaagagagaaatgaaatgttctctttcagacttgcacacctacccctgtggagcgtgcaccctataagggagaagtcgccacactgaaatccagagtgacaaaagaagatgccacagcagggaccaggaaacaggcccacccctgaagtgtgtgccatcggtaaaaaaatcagaggaaaggaggctgccattcccttcacagccaaacattgtcaacccatggagaagcaggccttattcaactccctaggatcctttagaaaaaattcaccactataggcttctttgattttctttcagaagcaattgctgtctttctcactgtgtttttgttgctgcataagattgaaggtataaatttatattattgtgatggaaaggctgtgtggaaattcattgatgatactttaaaatgtcatctttgcttgtactagatttcttacttagaatttttaaaaatcattttcttgtttaaatagtttctttttttaaaaaaatggttacattagttttaaaatagctctgtgattttactttttattgtaattaataaacattgagatcttcattttataccttattatctgat

SEQ ID NO: 32023 - DNA, 2065 bp, Homo sapiens
gcagcctgaggcagagctcgggggctgtcggtggggaccttgcaggagggcaccccaagcccgcccggcccgcccaacccagcccctgcgcgcagcccgggccgagtaggaccccgcgcgcccctcgccatggcggcgccctcgcggctcctgatccgcgggggtcgcgtggtcaacgatgacttctcggaggtggccgacgtgctggtggaggacggcgtggtgcgggcactcgggcacgacctgctgcctcccgggggcgctcctgcggggctgcgggtcctcgacgccgccggcaagctcgtcctgcccggaggcatcgacacacacacgcacatgcagttccccttcatgggctcgcggtccatcgacgacttccaccagggcaccaaggctgctctctcaggaggcaccaccatgattattgatttcgccattcctcagaaaggtggctccctcattgaggccttcgagacctggcgaagctgggctgatcccaaagtttgctgcgactacagccttcatgtggcagtgacgtggtggagtgaccaggttaaagaagaaatgaaaatccttgtgcaagataaaggtgttaactctttcaagatgtttatggcctataaagatctgtacatggtgacagacctggagctgtacgaagccttctctcggtgcaaggaaattggagcaattgcccaggtccatgcggaaaatggagacttaattgcagagggagcaaagaagatgttggctctggggataacaggccctgagggccacgagctgtgccgcccagaggcagtggaggcagaggccacgctgagagccatcaccatagccagcgctgtgaactgtcctctctacattgtgcatgtgatgagcaagtctgcagctaaggtgatagcggatgcaaggagagatgggaaggtggtctatggtgaacccatagcagccagtcttggcacagatggcactcactactggaataaagaatggcaccatgcagcccaccatgtcatgggtccacctttgcgaccagacccctcaacacccgacttcctcatgaatctgttggctaatgatgatctaaccacaacagggactgataactgcactttcaacacctgccagaaagctcttgggaaggatgattttaccaagatccccaatggggtgaatggtgttgaagatcggatgtccgtaatatgggaaaaaggcgtgcatagtggtaaaatggatgaaaacagatttgtggcagttaccagcacaaatgcagccaaaatttttaatctctatccaagaaaaggaagaatagctgtaggatcagatgctgacattgttatttgggacccaaaaggcacaagggggtgccccttgtgactatttcaagaggcaaagtggtatatgaagccggagtgttcagtgtcacggcaggagatgggaagtttattcctcgaaaaccatttgctgaatatatttacaaacgaataaagcagcgagaccggacttgcacacctacccctgtggagcgtgcaccctataagggagaagtcgccacactgaaatccagagtgacaaaagaagatgccacagcagggaccaggaaacaggcccacccctgaagtgtgtgccatcggtaaaaaaatcagaggaaaggaggctgccattcccttcacagccaaacattgtcaacccatggagaagcaggccttattcaactccctaggatcctttagaaaaaattcaccactataggcttctttgattttctttcagaagcaattgctgtctttctcactgtgtttttgttgctgcataagattgaaggtataaatttatattattgtgatggaaaggctgtgtggaaattcattgatgatactttaaaatgtcatctttgcttgtactagatttcttacttagaatttttaaaaatcattttcttgtttaaatagtttctttttttaaaaaaatggttacattagttttaaaatagctctgtgattttactttttattgtaattaataaacattgagatcttcattttataccttattatctgat

SEQ ID NO: 32024 - DNA, 2807 bp, Homo sapiens
gatgcagcacaacaaaagagcctgacagaaacggagtcagcccacgccaggccaaaccacaaaaagaagaaagcaggcttagatgggaagcccccttcatagctccctccccaaaaatcccttctacccatatctattgagtgcttgttatgaagaaagagagcagcacaccggccctctgtctgctgggggagactgacgagtgaacagattattccagaaacctggggtaagcaagatagtggataggggacagagggccaaagcttcctagactgatgattagctgagctgagtgataaaagagaagtcagataattacacaaaaatgagagcggcagcccagcccatgcaaaagcatggccctgaccggaagctaccaggaaggattctgatgtgcctggcctgggtggtgcctgctcccagagcctgcaagctgggttctggggaagcatcctctaggtgatagagcaggctgtagagcaagccctgttctgagtgaggaggacaggccctgtgtgtgatggccccacctgagccactggcatgggcagtcagttcccaagacggagtccaggacagacaaaaaatgaacagctgaaaagtgcaagtagtgtaggttcaaggaagtggtgtaggaagagggagacggaatgggatctgaggagggctgcacagcacacagtaggcggcacaaaagtctgctcagttaggtcacatgctccagaggcactcactgcaaaagagcctgaagattgaactgaaatataccatcggctttgctgagtatgaatgccaagaggagcagagagaagtcaagccctctaggtgataggcaggaacgagctgaaagaaggacataaatcttggtttgctcagacgggcctggattatacttacgttaattatgtttagtgcccttttcatgctaagaagtgtcctactttggatgataaattgtacagtcaccctaggtttaagtgatattcaggcagtctggcttggaaagtcaagtcaggagaagaaaaaaaaaaaaaaaaaaacagggaccaaggacctgaaagggaggatgtggccagagagtggggtattagtgagtttaaggtttcagatgtggtggtccaaggtggtagaaatgggaggctggcccttcatttcctggtgtctgtgttcctcaagatgagaacagggctcaaagactgagtagacagtgagccaaaatggaagtccagcaaagcatttagacagatacagaaagtgagcagaggcttggcctggtgagggaagggcaggagtccccccatttcctgagcactcagtgcacacccgatgcagtgcttcaaattctgtggctgcaggagctgtgggccttgttctgtgttggatactcggtgtttggtgtactctctggggctgtgtgagctcagtaaatatctgctgaatgaatgaagaaaatgctttggctctggaaattctccactatctgagagataggtttatttcccccatttcatggatgaggaagtaggcctggaggcattaattaacttgtcagtttcctatgtgtagtaaatggcaaatggagaattctaacttagatctgtctcacttcaaaggtcacactgttgatcactacaatgtattagtttgggtggtcaaaatgagacccacaataatttgttatttgtctgtgtgtgtgtgtgtgtgtgatttcaaaactctgctcaagcactgacagctctcgctgaatccagcagagggttctgctgcatagtcggtcaccaacgaggtgagattctgtggaagatccataatgcacagagacaggaaagtggaaagcgtacccaattgctagaatctgaagcaactgctctgagagtgttaggagaggtacaaagaagcactgcaaactcaggtgagtaggactgaaactagaagaaaaggtcggatgttggaaaggacagcaggagacacttgtgggactcagaagggcgtgaggatatggcagaggccccagtgagtgtccctgggcctctgtctgaggcagattaatacccacaaaaagtgggacaatccagattctcaaggttgccaggaatttctgtgaaaggccaaggggatggggaggcacgtgataaatttataagattctttttttaaagctctcgcaattcataaagggagctacacttaactttgaactcaagaaaataaaccacaagagagaaatgaaatgttctctttcagacttgcacacctacccctgtggagcgtgcaccctataagggagaagtcgccacactgaaatccagagtgacaaaagaagatgccacagcagggaccaggaaacaggcccacccctgaagtgtgtgccatcggtaaaaaaatcagaggaaaggaggctgccattcccttcacagccaaacattgtcaacccatggagaagcaggccttattcaactccctaggatcctttagaaaaaattcaccactataggcttctttgattttctttcagaagcaattgctgtctttctcactgtgtttttgttgctgcataagattgaaggtataaatttatattattgtgatggaaaggctgtgtggaaattcattgatgatactttaaaatgtcatctttgcttgtactagatttcttacttagaatttttaaaaatcattttcttgtttaaatagtttctttttttaaaaaaatggttacattagttttaaaatagctctgtgattttactttttattgtaattaataaacattgagatcttcattttataccttattatctgat

SEQ ID NO: 32025 - DNA, 2752 bp, Homo sapiens
gatgcagcacaacaaaagagcctgacagaaacggagtcagcccacgccaggccaaaccacaaaaagaagaaagcaggcttagatgggaagcccccttcatagctccctccccaaaaatcccttctacccatatctattgagtgcttgttatgaagaaagagagcagcacaccggccctctgtctgctgggggagactgacgagtgaacagattattccagaaacctggggtaagcaagatagtggataggggacagagggccaaagcttcctagactgatgattagctgagctgagtgataaaagagaagtcagataattacacaaaaatgagagcggcagcccagcccatgcaaaagcatggccctgaccggaagctaccaggaaggattctgatgtgcctggcctgggtggtgcctgctcccagagcctgcaagctgggttctggggaagcatcctctaggtgatagagcaggctgtagagcaagccctgttctgagtgaggaggacaggccctgtgtgtgatggccccacctgagccactggcatgggcagtcagttcccaagacggagtccaggacagacaaaaaatgaacagctgaaaagtgcaagtagtgtaggttcaaggaagtggtgtaggaagagggagacggaatgggatctgaggagggctgcacagcacacagtaggcggcacaaaagtctgctcagttaggtcacatgctccagaggcactcactgcaaaagagcctgaagattgaactgaaatataccatcggctttgctgagtatgaatgccaagaggagcagagagaagtcaagccctctaggtgataggcaggaacgagctgaaagaaggacataaatcttggtttgctcagacgggcctggattatacttacgttaattatgtttagtgcccttttcatgctaagaagtgtcctactttggatgataaattgtacagtcaccctaggtttaagtgatattcaggcagtctggcttggaaagtcaagtcaggagaagaaaaaaaaaaaaaaaaaaacagggaccaaggacctgaaagggaggatgtggccagagagtggggtattagtgagtttaaggtttcagatgtggtggtccaaggtggtagaaatgggaggctggcccttcatttcctggtgtctgtgttcctcaagatgagaacagggctcaaagactgagtagacagtgagccaaaatggaagtccagcaaagcatttagacagatacagaaagtgagcagaggcttggcctggtgagggaagggcaggagtccccccatttcctgagcactcagtgcacacccgatgcagtgcttcaaattctgtggctgcaggagctgtgggccttgttctgtgttggatactcggtgtttggtgtactctctggggctgtgtgagctcagtaaatatctgctgaatgaatgaagaaaatgctttggctctggaaattctccactatctgagagataggtttatttcccccatttcatggatgaggaagtaggcctggaggcattaattaacttgtcagtttcctatgtgtagtaaatggcaaatggagaattctaacttagatctgtctcacttcaaaggtcacactgttgatcactacaatgtattagtttgggtggtcaaaatgagacccacaataatttgttatttgtctgtgtgtgtgtgtgtgtgtgatttcaaaactctgctcaagcactgacagctctcgctgaatccagcagagggttctgctgcatagtcggtcaccaacgaggtgagattctgtggaagatccataatgcacagagacaggaaagtggaaagcgtacccaattgctagaatctgaagcaactgctctgagagtgttaggagaggtacaaagaagcactgcaaactcaggtgagtaggactgaaactagaaggtgaggatatggcagaggccccagtgagtgtccctgggcctctgtctgaggcagattaatacccacaaaaagtgggacaatccagattctcaaggttgccaggaatttctgtgaaaggccaaggggatggggaggcacgtgataaatttataagattctttttttaaagctctcgcaattcataaagggagctacacttaactttgaactcaagaaaataaaccacaagagagaaatgaaatgttctctttcagacttgcacacctacccctgtggagcgtgcaccctataagggagaagtcgccacactgaaatccagagtgacaaaagaagatgccacagcagggaccaggaaacaggcccacccctgaagtgtgtgccatcggtaaaaaaatcagaggaaaggaggctgccattcccttcacagccaaacattgtcaacccatggagaagcaggccttattcaactccctaggatcctttagaaaaaattcaccactataggcttctttgattttctttcagaagcaattgctgtctttctcactgtgtttttgttgctgcataagattgaaggtataaatttatattattgtgatggaaaggctgtgtggaaattcattgatgatactttaaaatgtcatctttgcttgtactagatttcttacttagaatttttaaaaatcattttcttgtttaaatagtttctttttttaaaaaaatggttacattagttttaaaatagctctgtgattttactttttattgtaattaataaacattgagatcttcattttataccttattatctgat

SEQ ID NO: 32026 - DNA, 918 bp, Homo sapiens
ctgtaggaattggcacgagatttgggacccaaaaggcacacgaggatgtagaagttgtgttgcattctctgacaatggatctgtatataaaaccaatatgaatttaccacttcagtgcctggcaaatgcccgagttcacatggaagaaaggactatctcagcaaaaactcatcatcaggctgttaacttcaacattttcgagggcatggtttgccacggggtgccccttgtgactatttcaagaggcaaagtggtatatgaagccggagtgttcagtgtcacggcaggagatgggaagtttattcctcgaaaaccatttgctgaatatatttacaaacgaataaagcagcgagaccggacttgcacacctacccctgtggagcgtgcaccctataagggagaagtcgccacactgaaatccagagtgacaaaagaagatgccacagcagggaccaggaaacaggcccacccctgaagtgtgtgccatcggtaaaaaaatcagaggaaaggaggctgccattcccttcacagccaaacattgtcaacccatggagaagcaggccttattcaactccctaggatcctttagaaaaaattcaccactataggcttctttgattttctttcagaagcaattgctgtctttctcactgtgtttttgttgctgcataagattgaaggtataaatttatattattgtgatggaaaggctgtgtggaaattcattgatgatactttaaaatgtcatctttgcttgtactagatttcttacttagaatttttaaaaatcattttcttgtttaaatagtttctttttttaaaaaaatggttacattagttttaaaatagctctgtgattttactttttattgtaattaataaacattgagatcttcattttataccttattatctgat

SEQ ID NO: 32027 - DNA, 835 bp, Homo sapiens
ggaagggcctccccagatgtgctcttgaggccagctgtctgcgtggaggaggcacctcctggaaggggactatctcagcaaaaactcatcatcaggctgttaacttcaacattttcgagggcatggtttgccacggggtgccccttgtgactatttcaagaggcaaagtggtatatgaagccggagtgttcagtgtcacggcaggagatgggaagtttattcctcgaaaaccatttgctgaatatatttacaaacgaataaagcagcgagaccggacttgcacacctacccctgtggagcgtgcaccctataagggagaagtcgccacactgaaatccagagtgacaaaagaagatgccacagcagggaccaggaaacaggcccacccctgaagtgtgtgccatcggtaaaaaaatcagaggaaaggaggctgccattcccttcacagccaaacattgtcaacccatggagaagcaggccttattcaactccctaggatcctttagaaaaaattcaccactataggcttctttgattttctttcagaagcaattgctgtctttctcactgtgtttttgttgctgcataagattgaaggtataaatttatattattgtgatggaaaggctgtgtggaaattcattgatgatactttaaaatgtcatctttgcttgtactagatttcttacttagaatttttaaaaatcattttcttgtttaaatagtttctttttttaaaaaaatggttacattagttttaaaatagctctgtgattttactttttattgtaattaataaacattgagatcttcattttataccttattatctgat

SEQ ID NO: 32028 - DNA, 4111 bp, Homo sapiens
gatgcagcacaacaaaagagcctgacagaaacggagtcagcccacgccaggccaaaccacaaaaagaagaaagcaggcttagatgggaagcccccttcatagctccctccccaaaaatcccttctacccatatctattgagtgcttgttatgaagaaagagagcagcacaccggccctctgtctgctgggggagactgacgagtgaacagattattccagaaacctggggtaagcaagatagtggataggggacagagggccaaagcttcctagactgatgattagctgagctgagtgataaaagagaagtcagataattacacaaaaatgagagcggcagcccagcccatgcaaaagcatggccctgaccggaagctaccaggaaggattctgatgtgcctggcctgggtggtgcctgctcccagagcctgcaagctgggttctggggaagcatcctctaggtgatagagcaggctgtagagcaagccctgttctgagtgaggaggacaggccctgtgtgtgatggccccacctgagccactggcatgggcagtcagttcccaagacggagtccaggacagacaaaaaatgaacagctgaaaagtgcaagtagtgtaggttcaaggaagtggtgtaggaagagggagacggaatgggatctgaggagggctgcacagcacacagtaggcggcacaaaagtctgctcagttaggtcacatgctccagaggcactcactgcaaaagagcctgaagattgaactgaaatataccatcggctttgctgagtatgaatgccaagaggagcagagagaagtcaagccctctaggtgataggcaggaacgagctgaaagaaggacataaatcttggtttgctcagacgggcctggattatacttacgttaattatgtttagtgcccttttcatgctaagaagtgtcctactttggatgataaattgtacagtcaccctaggtttaagtgatattcaggcagtctggcttggaaagtcaagtcaggagaagaaaaaaaaaaaaaaaaaaacagggaccaaggacctgaaagggaggatgtggccagagagtggggtattagtgagtttaaggtttcagatgtggtggtccaaggtggtagaaatgggaggctggcccttcatttcctggtgtctgtgttcctcaagatgagaacagggctcaaagactgagtagacagtgagccaaaatggaagtccagcaaagcatttagacagatacagaaagtgagcagaggcttggcctggtgagggaagggcaggagtccccccatttcctgagcactcagtgcacacccgatgcagtgcttcaaattctgtggctgcaggagctgtgggccttgttctgtgttggatactcggtgtttggtgtactctctggggctgtgtgagctcagtaaatatctgctgaatgaatgaagaaaatgctttggctctggaaattctccactatctgagagataggtttatttcccccatttcatggatgaggaagtaggcctggaggcattaattaacttgtcagtttcctatgtgtagtaaatggcaaatggagaattctaacttagatctgtctcacttcaaaggtcacactgttgatcactacaatgtattagtttgggtggtcaaaatgagacccacaataatttgttatttgtctgtgtgtgtgtgtgtgtgtgtgtgtgtgtgtgtgtgtgatttcaaaactctgctcaagcactgacagctctcgctgaatccagcagagggttctgctgcatagtcggtcaccaacgaggtgagattctgtggaagatccataatgcacagagacaggaaagtggaaagcgtacccaattgctagaatctgaagcaactgctctgagagtgttaggagaggtacaaagaagcactgcaaactcaggtgagtaggactgaaactagaagaaaaggtcggatgttggaaaggacagcaggagacacttgtgggactcagaagggcgtgaggatatggcagaggccccagtgagtgtccctgggcctctgtctgaggcagattaatacccacaaaaagtgggacaatccagattctcaaggttgccaggaatttctgtgaaaggccaaggggatggggaggcacgtgataaatttataagattctttttttaaagctctcgcaattcataaagggagctacacttaactttgaactcaagaaaataaaccacaagagagaaatgaaatgttctctttcagacttgcacacctacccctgtggagcgtgcaccctataagggagaagtcgccacactgaaatccagagtgacaaaagaagatgccacagcagggaccaggaaacaggcccacccctgaagtgtgtgccatcggtaagggactgtaggcaagaaaagtcttcctgcatgacagcatatgaaattagcatctctcctcataagggttgaagagatcaaggtcagaggcttcacagtgatccaagactcaaggacaattgagccaagggaagattgatcaaagcagaacatttagataagccttccagattgtagaaggccttgggcttgctagagagtcattctttaagatgttaggaaacattcaatacagccttggataatcaactatgagcaagttgcactaaggaggctgataacatacagagggaactacttaagacagggagtataatttcatggtcaaaatttacaaatgaattaggaccttatctggagaaatgaatcttcatattgtaaatacaacggtgttctaaaatttagaataaatgaaaaatgaataaaatgttgctttaggggatataatccttcagaaaaattctttgatagtatctgattatttcacagttagttttgggaataatattacagatacagtcatttttgccttttctgaagtgcctcgtatcatcatccttgtcaattttctttcttcagttgtcttctggtcctgctctctcagatcctcatttaacagcggctttgctgtaattttagcatctccctaatatcacttccactgacttcatgaaatctacatgttttgccagttttgcaattttgctaggctcttaatttttttttaacgtgtgatatcttttcagacagttcaacacgtggccatctgcacaagacttaaccccagaggttgacctaatggacctggttagacatttgtgttaatgagaggcacagtttgacaacggtctggttttctacatattcaggcactgcaccttttcacattttgacaacctcttattccctgcataaatcctgttcctgcagggatttggataatgagggcttgaatggcaaagccctctgtgctacatgccatgttctttcattattgaatgttgtgtctttaacaggactatctagcccaaagtctcaacatttttgtcattttcagacgaccagaattattcttctaatctaggatgattttgttaaaaattcagggaaagattagcaagagaaaggaatgcgattcaatgctataacatgctattaatgacatttataggagcaggattagtgtttactttgattatagcatttcttgggggttaggtttgaattctgcatctctttgtgagggagaatgttacagtgagttcctttcattctcttcaaaggtaaaaaaatcagaggaaaggaggctgccattcccttcacagccaaacattgtcaacccatggagaagcaggccttattcaactccctaggatcctttagaaaaaattcaccactataggcttctttgattttctttcagaagcaattgctgtctttctcactgtgtttttgttgctgcataagattgaaggtataaatttatattattgtgatggaaaggctgtgtggaaattcattgatgatactttaaaatgtcatctttgcttgtactagatttcttacttagaatttttaaaaatcattttcttgtttaaatagtttctttttttaaaaaaatggttacattagttttaaaatagctctgtgattttactttttattgtaattaataaacattgagatcttcattttataccttattatctgat

SEQ ID NO: 32029 - DNA, 2001 bp, Homo sapiens
gcagcctgaggcagagctcgggggctgtcggtggggaccttgcaggagggcaccccaagcccgcccggcccgcccaacccagcccctgcgcgcagcccgggccgagtaggaccccgcgcgcccctcgccatggcggcgccctcgcggctcctgatccgcgggggtcgcgtggtcaacgatgacttctcggaggtggccgacgtgctggtggaggacggcgtggtgcgggcactcgggcacgacctgctgcctcccgggggcgctcctgcggggctgcgggtcctcgacgccgccggcaagctcgtcctgcccggaggcatcgacacacacacgcacatgcagttccccttcatgggctcgcggtccatcgacgacttccaccagggcaccaaggctgctctctcaggaggcaccaccatgattattgatttcgccattcctcagaaaggtggctccctcattgaggccttcgagacctggcgaagctgggctgatcccaaagtttgctgcgactacagccttcatgtggcagtgacgtggtggagtgaccaggttaaagaagaaatgaaaatccttgtgcaagataaaggtgttaactctttcaagatgtttatggcctataaagatctgtacatggtgacagacctggagctgtacgaagccttctctcggtgcaaggaaattggagcaattgcccaggtccatgcggaaaatggagacttaattgcagagggagcaaagaagatgttggctctggggataacaggccctgagggccacgagctgtgccgcccagaggcagtggaggcagaggccacgctgagagccatcaccatagccagcgctgtgaactgtcctctctacattgtgcatgtgatgagcaagtctgcagctaaggtgatagcggatgcaaggagagatgggaaggtggtctatggtgaacccatagcagccagtcttggcacagatggcactcactactggaataaagaatggcaccatgcagcccaccatgtcatgggtccacctttgcgaccagacccctcaacacccgacttcctcatgaatctgttggctaatgatgatctaaccacaacagggactgataactgcactttcaacacctgccagaaagctcttgggaaggatgattttaccaagatccccaatggggtgaatggtgttgaagatcggatgtccgtaatatgggaaaaaggcgtgcatagtggtaaaatggatgaaaacagatttgtggcagttaccagcacaaatgcagccaaaatttttaatctctatccaagaaaaggaagaatagctgtaggatcagatgctgacattgttatttgggacccaaaaggcacaaggactatctcagcaaaaactcatcatcaggctgttaacttcaacattttcgagggcatggtttgccacggggtgccccttgtgactatttcaagaggcaaagtggtatatgaagccggagtgttcagtgtcacggcaggagatgggaagtttattcctcgaaaaccatttgctgaatatatttacaaacgaataaagcagcgagaccgggtaaaaaaatcagaggaaaggaggctgccattcccttcacagccaaacattgtcaacccatggagaagcaggccttattcaactccctaggatcctttagaaaaaattcaccactataggcttctttgattttctttcagaagcaattgctgtctttctcactgtgtttttgttgctgcataagattgaaggtataaatttatattattgtgatggaaaggctgtgtggaaattcattgatgatactttaaaatgtcatctttgcttgtactagatttcttacttagaatttttaaaaatcattttcttgtttaaatagtttctttttttaaaaaaatggttacattagttttaaaatagctctgtgattttactttttattgtaattaataaacattgagatcttcattttataccttattatctgat

SEQ ID NO: 32030 - DNA, 2078 bp, Homo sapiens
gcagcctgaggcagagctcgggggctgtcggtggggaccttgcaggagggcaccccaagcccgcccggcccgcccaacccagcccctgcgcgcagcccgggccgagtaggaccccgcgcgcccctcgccatggcggcgccctcgcggctcctgatccgcgggggtcgcgtggtcaacgatgacttctcggaggtggccgacgtgctggtggaggacggcgtggtgcgggcactcgggcacgacctgctgcctcccgggggcgctcctgcggggctgcgggtcctcgacgccgccggcaagctcgtcctgcccggaggcatcgacacacacacgcacatgcagttccccttcatgggctcgcggtccatcgacgacttccaccagggcaccaaggctgctctctcaggaggcaccaccatgattattgatttcgccattcctcagaaaggtggctccctcattgaggccttcgagacctggcgaagctgggctgatcccaaagtttgctgcgactacagccttcatgtggcagtgacgtggtggagtgaccaggttaaagaagaaatgaaaatccttgtgcaagataaaggtgttaactctttcaagatgtttatggcctataaagatctgtacatggtgacagacctggagctgtacgaagccttctctcggtgcaaggaaattggagcaattgcccaggtccatgcggaaaatggagacttaattgcagagggagcaaagaagatgttggctctggggataacaggccctgagggccacgagctgtgccgcccagaggcagtggaggcagaggccacgctgagagccatcaccatagccagcgctgtgaactgtcctctctacattgtgcatgtgatgagcaagtctgcagctaaggtgatagcggatgcaaggagagatgggaaggtggtctatggtgaacccatagcagccagtcttggcacagatggcactcactactggaataaagaatggcaccatgcagcccaccatgtcatgggtccacctttgcgaccagacccctcaacacccgacttcctcatgaatctgttggctaatgatgatctaaccacaacagggactgataactgcactttcaacacctgccagaaagctcttgggaaggatgattttaccaagatccccaatggggtgaatggtgttgaagatcggatgtccgtaatatgggaaaaaggcgtgcatagtggtaaaatggatgaaaacagatttgtggcagttaccagcacaaatgcagccaaaatttttaatctctatccaagaaaaggaagaatagctgtaggatcagatgctgacattgttatttgggacccaaaaggcacaaggactatctcagcaaaaactcatcatcaggctgttaacttcaacattttcgagggcatggtttgccacggggtgccccttgtgactatttcaagaggcaaagtggtatatgaagccggagtgttcagtgtcacggcaggagatgggaagtttattcctcgaaaaccatttgctgaatatatttacaaacgaataaagcagcgagaccggacttgcacacctacccctgtggagcgtgcaccctataagggagaagtcgccacactgaaatccagagtgacaaaagaagatgccacagcagggaccaggaaacaggcccacccctgaagtgtgtgccatcggtaaaaaaatcagaggaaaggaggctgccattcccttcacagccaaacattgtcaacccatggagaagcaggccttattcaactccctaggatcctttagaatctcactgtgtttttgttgctgcataagattgaaggtataaatttatattattgtgatggaaaggctgtgtggaaattcattgatgatactttaaaatgtcatctttgcttgtactagatttcttacttagaatttttaaaaatcattttcttgtttaaatagtttctttttttaaaaaaatggttacattagttttaaaatagctctgtgattttactttttattgtaattaataaacattgagatcttcattttataccttattatctgat

SEQ ID NO: 32031 - DNA, 1479 bp, Homo sapiens
gcagcctgaggcagagctcgggggctgtcggtggggaccttgcaggagggcaccccaagcccgcccggcccgcccaacccagcccctgcgcgcagcccgggccgagtaggaccccgcgcgcccctcgccatggcggcgccctcgcggctcctgatccgcgggggtcgcgtggtcaacgatgacttctcggaggtggccgacgtgctggtggaggacggcgtggtgcgggcactcgggcacgacctgctgcctcccgggggcgctcctgcggggctgcgggtcctcgacgccgccggcaagctcgtcctgcccggaggcatcgacacacacacgcacatgcagttccccttcatgggctcgcggtccatcgacgacttccaccagggcaccaaggctgctctctcaggaggcaccaccatgattattgatttcgccattcctcagaaaggtggctccctcattgaggccttcgagacctggcgaagctgggctgatcccaaagtttgctgcgactacagccttcatgtggcagtgacgtggtggagtgaccaggttaaagaagaaatgaaaatccttgtgcaagataaaggtgttaactctttcaagatgtttatggcctataaagatctgtacatggtgacagacctggagctgtacgaagccttctctcggtgcaaggaaattggagcaattgcccaggtccatgcggaaaatggagacttaattgcagagggagcaaagaagatgttggctctggggataacaggccctgagggccacgagctgtgccgcccagaggcagtggaggcagaggccacgctgagagccatcaccatagccagcgctgtgaactgtcctctctacattgtgcatgtgatgagcaagtctgcagctaaggtgatagcggatgcaaggagagatgggaaggtggtctatggtgaacccatagcagccagtcttggcacagatggcactcactactggaataaagaatggcaccatgcagcccaccatgtcatgggtccacctttgcgaccagacccctcaacacccgacttcctcatgaatctgttggctaagtaatcattttgcagatgactgggaagtgtattgccaaaagaaggtttgggtagaagggagctcgtcctcccatctggatcctccactaacctcccagtattctcttctacttgacctgtcaggtcctgggtacccctcacctgcagagcaaaaaacattgacttaattatgctgtgatatgttgtcaaagcctttcctagactctcagaaatcagatcgttttcactgaaactttactcttttctgacttttttcatctcttgttgcccaaacccagggctcttcattacaccttactttttatcagaatattgttgaatttttttctatgctgatataatatgggaactaggttaaccctgttactttctgggaacatatgatcatttttcttgaaaa

SEQ ID NO: 32032 - DNA, 550 bp, Homo sapiens
cactgaccttctgggtaatctgtcatgacgacctgatagcagaccggcaggatgctccaaactgtcaccaaagatgtcacgagtgcttctgaggctcaagaatctaattttccttacttaaaataaaaggactgaatgctggatgaataaccctttttttcaccccctaaacaaatctcatagggaatcctaatatataaaataaccaaagtgcaagccctgggttaaagccgaggatgggtgctagagatgggctagagcatgtctgcttagctttcttccactatcccagccatttaaagaccacaagttagcttcctggaattcagtttgacaaacacttaggctagatcattgtcaggggaccttcatttcaagctccatggagtaggtcggggactctgccttggtcatccctgaatccccacagccatggttctagcacacagtaagcactaaaaaccaaaacccaaaaacccgtatgataatgtatgtctacagacattcgatgaatggatgaataaaagatttttcagataccatgaaaaaa

SEQ ID NO: 32033 - DNA, 5850 bp, Homo sapiens
ggcggccgccgtcctcttgcgcaggcgtagtgctcctgcttcctggccgagggcgggcgagcggagcctgctttcgcagcgatcgcgagcgtgtggcgattgcttctgtctgttatttagatatggaagctgaggggatgcacagaggcagccagaacctaggtcagggtctcgctcggtgctgaccgcccccggggtcgagtaggcgatgggggagcccggcttcttcgtcacaggagaccgcgccggtggccggagctggtgcctgcggcgggtggggatgagcgccgggtggctgctgctggaagatgggtgcgaggtgactgtaggacgaggatttggtgtcacataccaactggtatcaaaaatctgccccctgatgatttctcgaaaccactgtgttttgaagcagaatcctgagggccaatggacaattatggacaacaagagtctaaatggtgtttggctgaacagagcgcgtctggaacctttaagggtctattccattcatcagggagactacatccaacttggagtgcctctggaaaataaggagaatgcggagtatgaatatgaagttactgaagaagactgggagacaatatatccttgtctttccccaaagaatgaccaaatgatagaaaaaaataaggaattgagaactaaaaggaaattcagtttggatgaattagcaggtcctggagctgaaggcccctcaaatttgaaatccaaaataaataaagtgtcttgtgaatctggtcagccagtgaaatcacaggggaaaggtgaagtggccagtacaccctctgacaatttggatcctaagttgactgcccttgagccaagtaagaccacaggggctcccatttaccctggcttccccaaagtcacagaggttcatcatgagcagaaagcctcaaactcttcagcatctcagagaagcttacagatgtttaaggtgaccatgtccaggattctgaggctcaaaatacagatgcaggaaaaacatgaagccgttatgaatgtgaaaaagcagacccaaaaggggaactcaaagaaagttgtgcaaatggagcaggaacttcaggacttacagtcccagctgtgtgcagagcaggctcagcagcaggcaagagtggagcaactagagaagactttccaggaagaggaacagcatcttcagggtttggagatagcccaaggagaaaaggacctgaagcaacagctggcccaggctctgcaggagcattgggctctaatggaagagctaaatcgcagcaagaaggactttgaagcaatcattcaagccaagaacaaagaattagagcagaccaaggaagagaaggagaagatgcaagcacagaaggaagaagttcttagccacatgaatgatgtgctagagaatgagctccaatgtattatttgttcagaatacttcattgaggctgtcaccttgaactgtgcccacagtttctgctcctactgtatcaatgaatggatgaagcggaagatagaatgccccatttgtcggaaggacattaagtccaaaacatactctttggttctggacaattgcattaataagatggtaaataatctgagctcagaagtgaaagaacgacgaattgttctcattagggaacgaaaagcaaagagattgttctgaagaccgtgctctaagggcatttgaaagactgccaggtagtgcgagcctgagatggtctggaggattctctctagccgtgactccgctgctctgaaggtcaactgagaagtcttgtgggacagagacttgagttaggaagccctcagtcacttgccttccacggtggccagccctgctgccatcattggctgaagcaccaccaggattcacggcacccaactgcttcagggtacttcgtagactctgcctcactacatgtcgaaagagttatttgagttctcttctgtttttttttaatttgttgttgttgttactgttttgataactcggaaacacctccgttgacagttgttttggataggttgggtgtaccccatggctgcctctgaaggcagtgtctattttgagaggatggcttacctcttctttgtgaaaatactatctcatttcctggaaataaaatgtaaaacctgtcagttgctcagctgggctttggtgtatttaccttccttcccttcctgctcccagacagtctcacaagtaaacaccagcagctcatagattacaaccaagaaagtgactgtatcagatgatagacttcaagtgaatgtcagcctaagaggccaagctgcagatcgtggcaacagatgagctctgttaacctcctgactgtcgtgtttcctttttattacagaggtgggtcactgtttaccttgtttcaggggtgggagaaactcctttccttcagctggcatttgaatgtttccaaatctattttatctgacgtcatgaacacacaggcaatgattttatgacaacttgatgtgcttttttctttatttttcttttacattagaagttttctctcttttctccacctctcctttatttttaattttaattttaatttttgaaacaagatctgactctgttgcccaagctggagtacagtagtgcaatctcagctcactgcaacctccacctcccagactcaagccatcctcccacctcaacctcccaagtagctgggactacaggcatatgccatcacacccagctaatttttgtttttctgtagagacagggtttcaccatgttggccaggctggtctcaaattcctgaccttaagtgatccacctgcctaggcctctaaaatgctgggattacaggcgtgagccaccacgcccagcctataccccatgtattttcataaagggttggaaactattgattgccaactttttaaggatggtagggattttttctttgttgaatatactgtgaattttgggattctggagtccttagtcttcatttccattcttctgcccatgattactgatcaaaatactggtagagtcatggaggaagtaagttaaatgtggaaaaaatgctttaaaagtacttactataaccacatcataagaattctggaaaaatagagaacaaaaggaaaagattgttaccaccttgatttaataacttcttgtttccccatacatgtgttttgtttatagattgcatgggtatatgtcaatttttatatgttctgtgtttagtttacatattgtaattcatttttaagagagtacagacatacactttttgagtaggcaatatgttcacatagtttgaaattaaaggtacaaaatggcgtagaatgaaatgcctctcaccctttccccacagcgactacttcccactcagaggcaacaagtattacagttgcttgtatattcttccagagatctctgtctatacaagcaaaaacacatgtggtctttttccttgctttgcacaaatggtaaactgtacgctattctgaaccttgcttttttcagatatatgttggcaacagttccatgtcagtacatagtttcctttctttattacagctgcctgttttttcattgtgtatttgcaccatcatttacttttctggcttacttttgatagaaatctaggttggttcaaacctttttactcttaaaacaatgctgcagttaacacccttgtacatatatctttagagagaagatattttaaaaagaaatacctttttaaaaattattttattattttttaatagagactatgttgcctaggctggtcttgaaattctgggctaaagcaatcctaccaccttggcctcccaaagtgctgagattacaggcatgagccattgcacctggccaagaagagacatcttgacttgagcctgaagactatgtacagagactgacctcacagactgaccattccatcccacagctgctggacatagagtgatttgcagcccctcctttcagagtaccacatccctctcaagtgttccacaacatctaggaaagtgagctcttaaagacagactaaaaagagtaataaatcaatacaacaacattaaaagccagactagcggagtttgaatcttggccctgctgttagtaactgtgtgagccttgggcaagttactcagcctccttgtgtcttggttttggtttcttcatctctaagtaattatatctgtcattattgccctgatcacaaacaaaagcctgaatgtactatgtttaaaagacaaaccaaaaattaacccaaacttgcattatttgtctgagctacagaatgttctttccttggagagatatctgatattaaacatcatctgcattttacttgcctagaaaatacacggtaacttttctgccttgcagcatcaaactatagtacagctgagccccagtgctgtgcagtctgactctaattaaaggcaccttctttacagcagggctctggggaactggaaaagggggtttgtttcattatctggttttattaagcagatgaatgcagccagctatatgaagcactttgcagtgaatggcaggtgtcccatatctggttatgttaacctagaaagggctcactctacctctaggcatgtttcatcccaacaatcagactgtgccaaagcaggggactttgtcctttgtggattgcatagctggatacccatcatctgtttctctgattggaagctgctgttgtacagaaagacctgcatttcccccttgtctccagttctctcactactttttcctcctctgtgagtgaccatccaggcagtcaccataactgctggagtgtctgggattggtagctctctccaactgcctgcttgctctttacagcctctctctgtgactggaatctctccacctcatcgtatctaaggataacccagaaacatggggtgtcctaggtatgtttatctcgacactgaaccccctaggcttctgatgaatccagtgattagctaaatttgacatagaaagtaagaaggaatgtctactttgtattgtggtcctaatctaagatcaggagaatcctggaattgttatctgtctcttgctctgagatacagacttgttcataggtgtggggcctgattggaacaggatctgccattggtcacaataggtcaagggcttgttctgaaccctagttagcttcattcagagaaagaaacttcctacctggtcagctttttcagcttctccaacaaatgggagttgaggcagtaggagtgtggggttcttgggaagacgatggggccttgtattaaggagaaataatgaactatcttcttgattcttccattgagaaaagcatatgaatcctaggaaagggctcagcctgtgataggcattcaataaatactccaatgctgtcattcctttgtctacagcatccccaaacaatgtaccagtgatgggctacctgagctcatctagtcgccaagcagtatctcctgcttgctgctgctttactacattccagatgcccacctcatccaatttccagagccactatctctgctgtccactttccttcaggctctgtgaatacttcaacctgctgtgatttggggccgtttgtactctgcatgtattcaataaattcaattcagcaatagttatcaaatgcccattttcttactaggcactgctctaggtgtttggtatggcaatgagcaaaacacaaccattgtgagctgatgttctagaaaggtgtcaaaagcgtttcaaaggttttatgagatgctgtgggagggggttacgcactgctacctactgaggtagcaatgttgggtgtttcctcacattcctcaacctccacgcag

SEQ ID NO: 32034 - DNA, 546 bp, Homo sapiens
ggtgctgcggtgatctcgaggattccgacgagttgtccgagttagggaacgaaaagcaaagagattgttctgaagaccgtgctctaagggcatttgaaagactgccaggtagtgcgagcctgagatggtctggaggattctctctagccgtgactccgctgctctgaaggtcaactgagaagtcttgtgggacagagacttgagttaggaagccctcagtcacttgccttccacggtggccagccctgctgccatcattggctgaagcaccaccaggattcacggcacccaactgcttcagggtacttcgtagactctgcctcactacatgtcgaaagagttatttgagttctcttctgtttttttttaatttgttgttgttgttactgttttgataactcggaaacacctccgttgacagttgttttggataggttgggtgtaccccatggctgcctctgaaggcagtgtctattttgagaggatggcttacctcttctttgtgaaaatactatctcatttcctggaaataaaatgtaaaacctg

SEQ ID NO: 32035 - DNA, 908 bp, Homo sapiens
  misc_feature (774)..(774): n is a, c, g, or t
  misc_feature (786)..(786): n is a, c, g, or t
  misc_feature (813)..(813): n is a, c, g, or t
  misc_feature (816)..(816): n is a, c, g, or t
aattaggctaggtacgaggctgggggtgaatcggccgagggaatacttcatgctgtcaccttgaactgtgcccacagtttctgctcctactgtatcaatgaatggatgaagcggaagatagaatgccccatttgtcggaaggacattaagtccaaaacatactctttggttctggacaattgcattaataagatggtaaataatctgagctcagaagtgaaagaacgacgaattgttctcattagggaacgaaaagcaaagagattgttctgaagaccgtgctctaagggcatttgaaagactgccaggtagtgcgagcctgagatggtctggaggattctctctagccgtgactccgctgctctgaaggtcaactgagaagtcttgtgggacagagacttgagttaggaagccctcagtcacttgccttccacggtggccagccctgctgccatcattggctgaagcaccaccaggattcacggcacccaactgcttcagggtacttcgtagactctgcctcactacatgtcgaaagagttatttgagttctcttctgtttttttttaatttgttgttgttgttactgttttgataactcggaaacacctccgttgacagttgttttggataggttgggtgtaccccatggctgcctctgaaggcagtgtctattttgagaggatggcttacctcttctttgtgaaaatactatctcatttcctggaaataaaatgtaaaacctgaaaaaaaaaaaaaacaaaaaaaaacccncgggccataatncggggggcgggaaaaagcggtttcaanggnccgtggccaagggtcccggcacccttttttgcacaaggggaatcggccggcccaaaaggggcgataacgaaacggcgatctaccaaacacct

SEQ ID NO: 32036 - DNA, 432 bp, Homo sapiens
ggtgctgcggtgatctcgaggattccgacgagttgtccgagttagggaacgaaaagcaaagagattgttctgaagaccgtgctctaagggcatttgaaagactgccaggtagtgcgagcctgagatggtctggaggattctctctagccgtgactccgctgctctgaaggtcaactgagaagtcttgtgggacagagacttgagttaggaagccctcagtcacttgccttccacggtggccagccctgctgccatcattggctgaagcaccaccaggattcacggcacccaactgcttcagggtacttcgtagactctgcctcactacatgtcgaaagagttatttgagttctcttctgtttttttttaatttgttgttgttgttactgttttgataactcggacaactcgtcggggatcctcggagttacc

SEQ ID NO: 32037 - DNA, 468 bp, Homo sapiens
ggcggccgccgtcctcttgcgcaggcgtagtgctcctgcttcctggccgagggcgggcgagcggagcctgctttcgcagcgatcgcgagcgtgtggcgattgcttctgtctgttatttagatatggaagctgaggggatgcacagaggcagccagaacctaggtcagggtctcgctcggtgctgaccgcccccggggtcgagtaggcgatgggggagcccggcttcttcgtcacaggagaccgcgccggtggccggagctggtgcctgcggcgggtggggatgagcgccgggtggctgctgctggaagatgggtgcgaggtacgggggaaggggtcctgtggagcggagggcaggggctggagggagcggggctccggggagggaggaaggtgtcttgctgggctgaatgaatggcagagaggaggcgggcatcaggaagaggagcgaagtgtctgtggggggggtgg

SEQ ID NO: 32038 - DNA, 2139 bp, Homo sapiens
ggcggccgccgtcctcttgcgcaggcgtagtgctcctgcttcctggccgagggcgggcgagcggagcctgctttcgcagcgatcgcgagcgtgtggcgattgcttctgtctgttatttagatatggaagctgaggggatgcacagaggcagccagaacctaggtcagggtctcgctcggtgctgaccgcccccggggtcgagtaggcgatgggggagcccggcttcttcgtcacaggagaccgcgccggtggccggagctggtgcctgcggcgggtggggatgagcgccgggtggctgctgctggaagatgggtgcgaggtgactgtaggacgaggatttggtgtcacataccaactggtatcaaaaatctgccccctgatgatttctcgaaaccactgtgttttgaagcagaatcctgagggccaatggacaattatggacaacaagagtctaaatggtgtttggctgaacagagcgcgtctggaacctttaagggtctattccattcatcagggagactacatccaacttggagtgcctctggaaaataaggagaatgcggagtatgaatatgaagttactgaagaagactgggagacaatatatccttgtctttccccaaagaatgaccaaatgatagaaaaaaataaggaattgagaactaaaaggaaattcagtttggatgaattagcaggtcctggagctgaaggcccctcaaatttgaaatccaaaataaataaagtgtcttgtgaatctggtcagccagtgaaatcacaggggaaaggtgaagtggccagtacaccctctgacaatttggatcctaagttgactgcccttgagccaagtaagaccacaggggctcccatttaccctggcttccccaaagtcacagaggttcatcatgagcagaaagcctcaaactcttcagcatctcagagaagcttacagatgtttaaggtgaccatgtccaggattctgaggctcaaaatacagatgcaggaaaaacatgaagccgttatgaatgtgaaaaagcagacccaaaaggggaactcaaagaaagttgtgcaaatggagcaggaacttcaggacttacagtcccagctgtgtgcagagcaggctcagcagcaggcaagagtggagcaactagagaagactttccaggaagaggaacagcatcttcagggtttggagatagcccaaggagaaaaggacctgaagcaacagctggcccaggctctgcaggagcattgggctctaatggaagagctaaatcgcagcaagaaggactttgaagcaatcattcaagccaagaacaaagaattagagcagaccaaggaagagaaggagaagatgcaagcacagaaggaagaagttcttagccacatgaatgatgtgctagagaatgagctccaatgtattatttgttcagaatacttcattgaggctgtcaccttgaactgtgcccacagtttctgctcctactgtatcaatgaatggatgaagcggaagatagaatgccccatttgtcggaaggacattaagtccaaaacatactctttggttctggacaattgcattaataagatggtaaataatctgagctcagaagtgaaagaacgacgaattgttctcattagggaacgaaaagcaaagagattgttctgaagaccgtgctctaagggcatttgaaagactgccaggtagtgcgagcctgagatggtctggaggattctctctagccgtgactccgctgctctgaaggtcaactgagaagtcttgtgggacagagacttgagttaggaagccctcagtcacttgccttccacggtggccagccctgctgccatcattggctgaagcaccaccaggattcacggcacccaactgcttcagggtacttcgtagactctgcctcactacatgtcgaaagagttatttgagttctcttctgtttttttttaatttgttgttgttgttactgttttgataactcggaaacacctccgttgacagttgttttggataggttgggtgtaccccatggctgcctctgaaggcagtgtctattttgagaggatggcttacctcttctttgtgaaaatactatctcatttcctggaaataaaatgtaaaacctg

SEQ ID NO: 32039 - DNA, 2301 bp, Homo sapiens
  misc_feature (2167)..(2167): n is a, c, g, or t
  misc_feature (2179)..(2179): n is a, c, g, or t
  misc_feature (2206)..(2206): n is a, c, g, or t
  misc_feature (2209)..(2209): n is a, c, g, or t
ggcggccgccgtcctcttgcgcaggcgtagtgctcctgcttcctggccgagggcgggcgagcggagcctgctttcgcagcgatcgcgagcgtgtggcgattgcttctgtctgttatttagatatggaagctgaggggatgcacagaggcagccagaacctaggtcagggtctcgctcggtgctgaccgcccccggggtcgagtaggcgatgggggagcccggcttcttcgtcacaggagaccgcgccggtggccggagctggtgcctgcggcgggtggggatgagcgccgggtggctgctgctggaagatgggtgcgaggtgactgtaggacgaggatttggtgtcacataccaactggtatcaaaaatctgccccctgatgatttctcgaaaccactgtgttttgaagcagaatcctgagggccaatggacaattatggacaacaagagtctaaatggtgtttggctgaacagagcgcgtctggaacctttaagggtctattccattcatcagggagactacatccaacttggagtgcctctggaaaataaggagaatgcggagtatgaatatgaagttactgaagaagactgggagacaatatatccttgtctttccccaaagaatgaccaaatgatagaaaaaaataaggaattgagaactaaaaggaaattcagtttggatgaattagcaggtcctggagctgaaggcccctcaaatttgaaatccaaaataaataaagtgtcttgtgaatctggtcagccagtgaaatcacaggggaaaggtgaagtggccagtacaccctctgacaatttggatcctaagttgactgcccttgagccaagtaagaccacaggggctcccatttaccctggcttccccaaagtcacagaggttcatcatgagcagaaagcctcaaactcttcagcatctcagagaagcttacagatgtttaaggtgaccatgtccaggattctgaggctcaaaatacagatgcaggaaaaacatgaagccgttatgaatgtgaaaaagcagacccaaaaggggaactcaaagaaagttgtgcaaatggagcaggaacttcaggacttacagtcccagctgtgtgcagagcaggctcagcagcaggcaagagtggagcaactagagaagactttccaggaagaggaacagcatcttcagggtttggagatagcccaaggagaaaaggacctgaagcaacagctggcccaggctctgcaggagcattgggctctaatggaagagctaaatcgcagcaagaaggactttgaagcaatcattcaagccaagaacaaagaattagagcagaccaaggaagagaaggagaagatgcaagcacagaaggaagaagttcttagccacatgaatgatgtgctagagaatgagctccaatgtattatttgttcagaatacttcattgaggctgtcaccttgaactgtgcccacagtttctgctcctactgtatcaatgaatggatgaagcggaagatagaatgccccatttgtcggaaggacattaagtccaaaacatactctttggttctggacaattgcattaataagatggtaaataatctgagctcagaagtgaaagaacgacgaattgttctcattagggaacgaaaagcaaagagattgttctgaagaccgtgctctaagggcatttgaaagactgccaggtagtgcgagcctgagatggtctggaggattctctctagccgtgactccgctgctctgaaggtcaactgagaagtcttgtgggacagagacttgagttaggaagccctcagtcacttgccttccacggtggccagccctgctgccatcattggctgaagcaccaccaggattcacggcacccaactgcttcagggtacttcgtagactctgcctcactacatgtcgaaagagttatttgagttctcttctgtttttttttaatttgttgttgttgttactgttttgataactcggaaacacctccgttgacagttgttttggataggttgggtgtaccccatggctgcctctgaaggcagtgtctattttgagaggatggcttacctcttctttgtgaaaatactatctcatttcctggaaataaaatgtaaaacctgaaaaaaaaaaaaaacaaaaaaaaacccncgggccataatncggggggcgggaaaaagcggtttcaanggnccgtggccaagggtcccggcacccttttttgcacaaggggaatcggccggcccaaaaggggcgataacgaaacggcgatctaccaaacacct

SEQ ID NO: 32040 - DNA, 5760 bp, Homo sapiens
ggcggccgccgtcctcttgcgcaggcgtagtgctcctgcttcctggccgagggcgggcgagcggagcctgctttcgcagcgatcgcgagcgtgtggcgattgcttctgtctgttatttagatatggaagctgaggggatgcacagaggcagccagaacctaggtcagggtctcgctcggtgctgaccgcccccggggtcgagtaggcgatgggggagcccggcttcttcgtcacaggagaccgcgccggtggccggagctggtgcctgcggcgggtggggatgagcgccgggtggctgctgctggaagatgggtgcgaggtgactgtaggacgaggatttggtgtcacataccaactggtatcaaaaatctgccccctgatgatttctcgaaaccactgtgttttgaagcagaatcctgagggccaatggacaattatggacaacaagagtctaaatggtgtttggctgaacagagcgcgtctggaacctttaagggtctattccattcatcagggagactacatccaacttggagtgcctctggaaaataaggagaatgcggagtatgaatatgaagttactgaagaagactgggagacaatatatccttgtctttccccaaagaatgaccaaatgatagaaaaaaataaggaattgagaactaaaaggaaattcagtttggatgaattagcaggtcctggagctgaaggcccctcaaatttgaaatccaaaataaataaagtgtcttgtgaatctggtcagccagtgaaatcacaggggaaaggtgaagtggccagtacaccctctgacaatttggatcctaagttgactgcccttgagccaagtaagaccacaggggctcccatttaccctggcttccccaaagtcacagaggttcatcatgagcagaaagcctcaaactcttcagcatctcagagaagcttacagatgtttaaggtgaccatgtccaggattctgaggctcaaaatacagatgcaggaaaaacatgaagccgttatgaatgtgaaaaagcagacccaaaaggggaactcaaagaaagttgtgcaaatggagcaggaacttcaggacttacagtcccagctgtgtgcagagcaggctcagcagcaggcaagagtggagcaactagagaagactttccaggaagaggaacagcatcttcagggtttggagatagcccaaggagaaaaggacctgaagcaacagctggcccaggctctgcaggaggaagagaaggagaagatgcaagcacagaaggaagaagttcttagccacatgaatgatgtgctagagaatgagctccaatgtattatttgttcagaatacttcattgaggctgtcaccttgaactgtgcccacagtttctgctcctactgtatcaatgaatggatgaagcggaagatagaatgccccatttgtcggaaggacattaagtccaaaacatactctttggttctggacaattgcattaataagatggtaaataatctgagctcagaagtgaaagaacgacgaattgttctcattagggaacgaaaagcaaagagattgttctgaagaccgtgctctaagggcatttgaaagactgccaggtagtgcgagcctgagatggtctggaggattctctctagccgtgactccgctgctctgaaggtcaactgagaagtcttgtgggacagagacttgagttaggaagccctcagtcacttgccttccacggtggccagccctgctgccatcattggctgaagcaccaccaggattcacggcacccaactgcttcagggtacttcgtagactctgcctcactacatgtcgaaagagttatttgagttctcttctgtttttttttaatttgttgttgttgttactgttttgataactcggaaacacctccgttgacagttgttttggataggttgggtgtaccccatggctgcctctgaaggcagtgtctattttgagaggatggcttacctcttctttgtgaaaatactatctcatttcctggaaataaaatgtaaaacctgtcagttgctcagctgggctttggtgtatttaccttccttcccttcctgctcccagacagtctcacaagtaaacaccagcagctcatagattacaaccaagaaagtgactgtatcagatgatagacttcaagtgaatgtcagcctaagaggccaagctgcagatcgtggcaacagatgagctctgttaacctcctgactgtcgtgtttcctttttattacagaggtgggtcactgtttaccttgtttcaggggtgggagaaactcctttccttcagctggcatttgaatgtttccaaatctattttatctgacgtcatgaacacacaggcaatgattttatgacaacttgatgtgcttttttctttatttttcttttacattagaagttttctctcttttctccacctctcctttatttttaattttaattttaatttttgaaacaagatctgactctgttgcccaagctggagtacagtagtgcaatctcagctcactgcaacctccacctcccagactcaagccatcctcccacctcaacctcccaagtagctgggactacaggcatatgccatcacacccagctaatttttgtttttctgtagagacagggtttcaccatgttggccaggctggtctcaaattcctgaccttaagtgatccacctgcctaggcctctaaaatgctgggattacaggcgtgagccaccacgcccagcctataccccatgtattttcataaagggttggaaactattgattgccaactttttaaggatggtagggattttttctttgttgaatatactgtgaattttgggattctggagtccttagtcttcatttccattcttctgcccatgattactgatcaaaatactggtagagtcatggaggaagtaagttaaatgtggaaaaaatgctttaaaagtacttactataaccacatcataagaattctggaaaaatagagaacaaaaggaaaagattgttaccaccttgatttaataacttcttgtttccccatacatgtgttttgtttatagattgcatgggtatatgtcaatttttatatgttctgtgtttagtttacatattgtaattcatttttaagagagtacagacatacactttttgagtaggcaatatgttcacatagtttgaaattaaaggtacaaaatggcgtagaatgaaatgcctctcaccctttccccacagcgactacttcccactcagaggcaacaagtattacagttgcttgtatattcttccagagatctctgtctatacaagcaaaaacacatgtggtctttttccttgctttgcacaaatggtaaactgtacgctattctgaaccttgcttttttcagatatatgttggcaacagttccatgtcagtacatagtttcctttctttattacagctgcctgttttttcattgtgtatttgcaccatcatttacttttctggcttacttttgatagaaatctaggttggttcaaacctttttactcttaaaacaatgctgcagttaacacccttgtacatatatctttagagagaagatattttaaaaagaaatacctttttaaaaattattttattattttttaatagagactatgttgcctaggctggtcttgaaattctgggctaaagcaatcctaccaccttggcctcccaaagtgctgagattacaggcatgagccattgcacctggccaagaagagacatcttgacttgagcctgaagactatgtacagagactgacctcacagactgaccattccatcccacagctgctggacatagagtgatttgcagcccctcctttcagagtaccacatccctctcaagtgttccacaacatctaggaaagtgagctcttaaagacagactaaaaagagtaataaatcaatacaacaacattaaaagccagactagcggagtttgaatcttggccctgctgttagtaactgtgtgagccttgggcaagttactcagcctccttgtgtcttggttttggtttcttcatctctaagtaattatatctgtcattattgccctgatcacaaacaaaagcctgaatgtactatgtttaaaagacaaaccaaaaattaacccaaacttgcattatttgtctgagctacagaatgttctttccttggagagatatctgatattaaacatcatctgcattttacttgcctagaaaatacacggtaacttttctgccttgcagcatcaaactatagtacagctgagccccagtgctgtgcagtctgactctaattaaaggcaccttctttacagcagggctctggggaactggaaaagggggtttgtttcattatctggttttattaagcagatgaatgcagccagctatatgaagcactttgcagtgaatggcaggtgtcccatatctggttatgttaacctagaaagggctcactctacctctaggcatgtttcatcccaacaatcagactgtgccaaagcaggggactttgtcctttgtggattgcatagctggatacccatcatctgtttctctgattggaagctgctgttgtacagaaagacctgcatttcccccttgtctccagttctctcactactttttcctcctctgtgagtgaccatccaggcagtcaccataactgctggagtgtctgggattggtagctctctccaactgcctgcttgctctttacagcctctctctgtgactggaatctctccacctcatcgtatctaaggataacccagaaacatggggtgtcctaggtatgtttatctcgacactgaaccccctaggcttctgatgaatccagtgattagctaaatttgacatagaaagtaagaaggaatgtctactttgtattgtggtcctaatctaagatcaggagaatcctggaattgttatctgtctcttgctctgagatacagacttgttcataggtgtggggcctgattggaacaggatctgccattggtcacaataggtcaagggcttgttctgaaccctagttagcttcattcagagaaagaaacttcctacctggtcagctttttcagcttctccaacaaatgggagttgaggcagtaggagtgtggggttcttgggaagacgatggggccttgtattaaggagaaataatgaactatcttcttgattcttccattgagaaaagcatatgaatcctaggaaagggctcagcctgtgataggcattcaataaatactccaatgctgtcattcctttgtctacagcatccccaaacaatgtaccagtgatgggctacctgagctcatctagtcgccaagcagtatctcctgcttgctgctgctttactacattccagatgcccacctcatccaatttccagagccactatctctgctgtccactttccttcaggctctgtgaatacttcaacctgctgtgatttggggccgtttgtactctgcatgtattcaataaattcaattcagcaatagttatcaaatgcccattttcttactaggcactgctctaggtgtttggtatggcaatgagcaaaacacaaccattgtgagctgatgttctagaaaggtgtcaaaagcgtttcaaaggttttatgagatgctgtgggagggggttacgcactgctacctactgaggtagcaatgttgggtgtttcctcacattcctcaacctccacgcag

SEQ ID NO: 32041 - DNA, 2025 bp, Homo sapiens
ggcggccgccgtcctcttgcgcaggcgtagtgctcctgcttcctggccgagggcgggcgagcggagcctgctttcgcagcgatcgcgagcgtgtggcgattgcttctgtctgttatttagatatggaagctgaggggatgcacagaggcagccagaacctaggtcagggtctcgctcggtgctgaccgcccccggggtcgagtaggcgatgggggagcccggcttcttcgtcacaggagaccgcgccggtggccggagctggtgcctgcggcgggtggggatgagcgccgggtggctgctgctggaagatgggtgcgaggtgactgtaggacgaggatttggtgtcacataccaactggtatcaaaaatctgccccctgatgatttctcgaaaccactgtgttttgaagcagaatcctgagggccaatggacaattatggacaacaagagtctaaatggtgtttggctgaacagagcgcgtctggaacctttaagggtctattccattcatcagggagactacatccaacttggagtgcctctggaaaataaggagaatgcggagtatgaatatgaagttactgaagaagactgggagacaatatatccttgtctttccccaaagaatgaccaaatgatagaaaaaaataaggaattgagaactaaaaggaaattcagtttggatgaattagcaggtcctggagctgaaggcccctcaaatttgaaatccaaaataaataaagtgtcttgtgaatctggtcagccagtgaaatcacaggggaaaggtgaagtggccagtacaccctctgacaatttggatcctaagttgactgcccttgagccaagtaagaccacaggggctcccatttaccctggcttccccaaagtcacagaggttcatcatgagcagaaagcctcaaactcttcagcatctcagagaagcttacagatgtttaaggtgaccatgtccaggattctgaggctcaaaatacagatgcaggaaaaacatgaagccgttatgaatgtgaaaaagcagacccaaaaggggaactcaaagaaagttgtgcaaatggagcaggaacttcaggacttacagtcccagctgtgtgcagagcaggctcagcagcaggcaagagtggagcaactagagaagactttccaggaagaggaacagcatcttcagggtttggagatagcccaaggagaaaaggacctgaagcaacagctggcccaggctctgcaggagcattgggctctaatggaagagctaaatcgcagcaagaaggactttgaagcaatcattcaagccaagaacaaagaattagagcagaccaaggaagagaaggagaagatgcaagcacagaaggaagaagttcttagccacatgaatgatgtgctagagaatgagctccaatgtattatttgttcagaatacttcattgaggctgtcaccttgaactgtgcccacagtttctgctcctactgtatcaatgaatggatgaagcggaagatagaatgccccatttgtcggaaggacattaagtccaaaacatactctttggttctggacaattgcattaataagatggtaaataatctgagctcagaagtgaaagaacgacgaattgttctcattagggaacgaaaagcaaagagattgttctgaagaccgtgctctaagggcatttgaaagactgccaggtagtgcgagcctgagatggtctggaggattctctctagccgtgactccgctgctctgaaggtcaactgagaagtcttgtgggacagagacttgagttaggaagccctcagtcacttgccttccacggtggccagccctgctgccatcattggctgaagcaccaccaggattcacggcacccaactgcttcagggtacttcgtagactctgcctcactacatgtcgaaagagttatttgagttctcttctgtttttttttaatttgttgttgttgttactgttttgataactcggacaactcgtcggggatcctcggagttacc

SEQ ID NO: 32042 - DNA, 6010 bp, Homo sapiens
ggcggccgccgtcctcttgcgcaggcgtagtgctcctgcttcctggccgagggcgggcgagcggagcctgctttcgcagcgatcgcgagcgtgtggcgattgcttctgtctgttatttagatatggaagctgaggggatgcacagaggcagccagaacctaggtcagggtctcgctcggtgctgaccgcccccggggtcgagtaggcgatgggggagcccggcttcttcgtcacaggagaccgcgccggtggccggagctggtgcctgcggcgggtggggatgagcgccgggtggctgctgctggaagatgggtgcgagggttgttatgaactagactggtccaacaggaaagtatgatagatgtgaactggggcttcttttcaaccttttccggaagctctcaagctgttcttgtggataagacagagaatatgtactccaatgcaaagacttttggttgaattataactggctgaaggtgactgtaggacgaggatttggtgtcacataccaactggtatcaaaaatctgccccctgatgatttctcgaaaccactgtgttttgaagcagaatcctgagggccaatggacaattatggacaacaagagtctaaatggtgtttggctgaacagagcgcgtctggaacctttaagggtctattccattcatcagggagactacatccaacttggagtgcctctggaaaataaggagaatgcggagtatgaatatgaagttactgaagaagactgggagacaatatatccttgtctttccccaaagaatgaccaaatgatagaaaaaaataaggaattgagaactaaaaggaaattcagtttggatgaattagcaggtcctggagctgaaggcccctcaaatttgaaatccaaaataaataaagtgtcttgtgaatctggtcagccagtgaaatcacaggggaaaggtgaagtggccagtacaccctctgacaatttggatcctaagttgactgcccttgagccaagtaagaccacaggggctcccatttaccctggcttccccaaagtcacagaggttcatcatgagcagaaagcctcaaactcttcagcatctcagagaagcttacagatgtttaaggtgaccatgtccaggattctgaggctcaaaatacagatgcaggaaaaacatgaagccgttatgaatgtgaaaaagcagacccaaaaggggaactcaaagaaagttgtgcaaatggagcaggaacttcaggacttacagtcccagctgtgtgcagagcaggctcagcagcaggcaagagtggagcaactagagaagactttccaggaagaggaacagcatcttcagggtttggagatagcccaaggagaaaaggacctgaagcaacagctggcccaggctctgcaggagcattgggctctaatggaagagctaaatcgcagcaagaaggactttgaagcaatcattcaagccaagaacaaagaattagagcagaccaaggaagagaaggagaagatgcaagcacagaaggaagaagttcttagccacatgaatgatgtgctagagaatgagctccaatgtattatttgttcagaatacttcattgaggctgtcaccttgaactgtgcccacagtttctgctcctactgtatcaatgaatggatgaagcggaagatagaatgccccatttgtcggaaggacattaagtccaaaacatactctttggttctggacaattgcattaataagatggtaaataatctgagctcagaagtgaaagaacgacgaattgttctcattagggaacgaaaagcaaagagattgttctgaagaccgtgctctaagggcatttgaaagactgccaggtagtgcgagcctgagatggtctggaggattctctctagccgtgactccgctgctctgaaggtcaactgagaagtcttgtgggacagagacttgagttaggaagccctcagtcacttgccttccacggtggccagccctgctgccatcattggctgaagcaccaccaggattcacggcacccaactgcttcagggtacttcgtagactctgcctcactacatgtcgaaagagttatttgagttctcttctgtttttttttaatttgttgttgttgttactgttttgataactcggaaacacctccgttgacagttgttttggataggttgggtgtaccccatggctgcctctgaaggcagtgtctattttgagaggatggcttacctcttctttgtgaaaatactatctcatttcctggaaataaaatgtaaaacctgtcagttgctcagctgggctttggtgtatttaccttccttcccttcctgctcccagacagtctcacaagtaaacaccagcagctcatagattacaaccaagaaagtgactgtatcagatgatagacttcaagtgaatgtcagcctaagaggccaagctgcagatcgtggcaacagatgagctctgttaacctcctgactgtcgtgtttcctttttattacagaggtgggtcactgtttaccttgtttcaggggtgggagaaactcctttccttcagctggcatttgaatgtttccaaatctattttatctgacgtcatgaacacacaggcaatgattttatgacaacttgatgtgcttttttctttatttttcttttacattagaagttttctctcttttctccacctctcctttatttttaattttaattttaatttttgaaacaagatctgactctgttgcccaagctggagtacagtagtgcaatctcagctcactgcaacctccacctcccagactcaagccatcctcccacctcaacctcccaagtagctgggactacaggcatatgccatcacacccagctaatttttgtttttctgtagagacagggtttcaccatgttggccaggctggtctcaaattcctgaccttaagtgatccacctgcctaggcctctaaaatgctgggattacaggcgtgagccaccacgcccagcctataccccatgtattttcataaagggttggaaactattgattgccaactttttaaggatggtagggattttttctttgttgaatatactgtgaattttgggattctggagtccttagtcttcatttccattcttctgcccatgattactgatcaaaatactggtagagtcatggaggaagtaagttaaatgtggaaaaaatgctttaaaagtacttactataaccacatcataagaattctggaaaaatagagaacaaaaggaaaagattgttaccaccttgatttaataacttcttgtttccccatacatgtgttttgtttatagattgcatgggtatatgtcaatttttatatgttctgtgtttagtttacatattgtaattcatttttaagagagtacagacatacactttttgagtaggcaatatgttcacatagtttgaaattaaaggtacaaaatggcgtagaatgaaatgcctctcaccctttccccacagcgactacttcccactcagaggcaacaagtattacagttgcttgtatattcttccagagatctctgtctatacaagcaaaaacacatgtggtctttttccttgctttgcacaaatggtaaactgtacgctattctgaaccttgcttttttcagatatatgttggcaacagttccatgtcagtacatagtttcctttctttattacagctgcctgttttttcattgtgtatttgcaccatcatttacttttctggcttacttttgatagaaatctaggttggttcaaacctttttactcttaaaacaatgctgcagttaacacccttgtacatatatctttagagagaagatattttaaaaagaaatacctttttaaaaattattttattattttttaatagagactatgttgcctaggctggtcttgaaattctgggctaaagcaatcctaccaccttggcctcccaaagtgctgagattacaggcatgagccattgcacctggccaagaagagacatcttgacttgagcctgaagactatgtacagagactgacctcacagactgaccattccatcccacagctgctggacatagagtgatttgcagcccctcctttcagagtaccacatccctctcaagtgttccacaacatctaggaaagtgagctcttaaagacagactaaaaagagtaataaatcaatacaacaacattaaaagccagactagcggagtttgaatcttggccctgctgttagtaactgtgtgagccttgggcaagttactcagcctccttgtgtcttggttttggtttcttcatctctaagtaattatatctgtcattattgccctgatcacaaacaaaagcctgaatgtactatgtttaaaagacaaaccaaaaattaacccaaacttgcattatttgtctgagctacagaatgttctttccttggagagatatctgatattaaacatcatctgcattttacttgcctagaaaatacacggtaacttttctgccttgcagcatcaaactatagtacagctgagccccagtgctgtgcagtctgactctaattaaaggcaccttctttacagcagggctctggggaactggaaaagggggtttgtttcattatctggttttattaagcagatgaatgcagccagctatatgaagcactttgcagtgaatggcaggtgtcccatatctggttatgttaacctagaaagggctcactctacctctaggcatgtttcatcccaacaatcagactgtgccaaagcaggggactttgtcctttgtggattgcatagctggatacccatcatctgtttctctgattggaagctgctgttgtacagaaagacctgcatttcccccttgtctccagttctctcactactttttcctcctctgtgagtgaccatccaggcagtcaccataactgctggagtgtctgggattggtagctctctccaactgcctgcttgctctttacagcctctctctgtgactggaatctctccacctcatcgtatctaaggataacccagaaacatggggtgtcctaggtatgtttatctcgacactgaaccccctaggcttctgatgaatccagtgattagctaaatttgacatagaaagtaagaaggaatgtctactttgtattgtggtcctaatctaagatcaggagaatcctggaattgttatctgtctcttgctctgagatacagacttgttcataggtgtggggcctgattggaacaggatctgccattggtcacaataggtcaagggcttgttctgaaccctagttagcttcattcagagaaagaaacttcctacctggtcagctttttcagcttctccaacaaatgggagttgaggcagtaggagtgtggggttcttgggaagacgatggggccttgtattaaggagaaataatgaactatcttcttgattcttccattgagaaaagcatatgaatcctaggaaagggctcagcctgtgataggcattcaataaatactccaatgctgtcattcctttgtctacagcatccccaaacaatgtaccagtgatgggctacctgagctcatctagtcgccaagcagtatctcctgcttgctgctgctttactacattccagatgcccacctcatccaatttccagagccactatctctgctgtccactttccttcaggctctgtgaatacttcaacctgctgtgatttggggccgtttgtactctgcatgtattcaataaattcaattcagcaatagttatcaaatgcccattttcttactaggcactgctctaggtgtttggtatggcaatgagcaaaacacaaccattgtgagctgatgttctagaaaggtgtcaaaagcgtttcaaaggttttatgagatgctgtgggagggggttacgcactgctacctactgaggtagcaatgttgggtgtttcctcacattcctcaacctccacgcag

SEQ ID NO: 32043 - DNA, 5645 bp, Homo sapiens
ggcggccgccgtcctcttgcgcaggcgtagtgctcctgcttcctggccgagggcgggcgagcggagcctgctttcgcagcgatcgcgagcgtgtggcgattgcttctgtctgttatttagatatggaagctgaggggatgcacagaggcagccagaacctaggtcagggtctcgctcggtgctgaccgcccccggggtcgagtaggcgatgggggagcccggcttcttcgtcacaggagaccgcgccggtggccggagctggtgcctgcggcgggtggggatgagcgccgggtggctgctgctggaagatgggtgcgaggtgactgtaggacgaggatttggtgtcacataccaactggtatcaaaaatctgccccctgatgatttctcgaaaccactgtgttttgaagcagaatcctgagggccaatggacaattatggacaacaagagtctaaatggtgtttggctgaacagagcgcgtctggaacctttaagggtctattccattcatcagggagactacatccaacttggagtgcctctggaaaataaggagaatgcggagtatgaatatgaagttactgaagaagactgggagacaatatatccttgtctttccccaaagaatgaccaaatgatagaaaaaaataaggaattgagaactaaaaggaaattcagtttggatgaattagcaggtcctggagctgaaggcccctcaaatttgaaatccaaaataaataaagtgtcttgtgaatctggtcagccagtgaaatcacaggggaaaggtgaagtggccagtacaccctctgacaatttggatcctaagttgactgcccttgagccaagtaagaccacaggggctcccatttaccctggcttccccaaagtcacagaggttcatcatgagcagaaagcctcaaactcttcagcatctcagagaagcttacagatgtttaaggtgaccatgtccaggattctgaggctcaaaatacagatgcaggaaaaacatgaagccgttatgaatgtgaaaaagcagacccaaaaggggaactcaaagaaagttgtgcaaatggagcaggaacttcaggacttacagtcccagctgtgtgcagagcaggctcagcagcaggcaagagtggagcaactagagaagactttccaggaagaggaacagcatcttcagggtttggagatagcccaaggagaaaaggacctgaagcaacagctggcccaggctctgcaggagcattgggctctaatggaagagctaaatcgcagcaagaaggactttgaagcaatcattcaagccaagaacaaagaattagagcagaccaaggaagagaaggagaagatgcaagcacagaaggaagaagttcttagccacatgaatgatgtgctagagaatgagctccaatgtattatttgttcagaatacttcattgagcaaagagattgttctgaagaccgtgctctaagggcatttgaaagactgccaggtagtgcgagcctgagatggtctggaggattctctctagccgtgactccgctgctctgaaggtcaactgagaagtcttgtgggacagagacttgagttaggaagccctcagtcacttgccttccacggtggccagccctgctgccatcattggctgaagcaccaccaggattcacggcacccaactgcttcagggtacttcgtagactctgcctcactacatgtcgaaagagttatttgagttctcttctgtttttttttaatttgttgttgttgttactgttttgataactcggaaacacctccgttgacagttgttttggataggttgggtgtaccccatggctgcctctgaaggcagtgtctattttgagaggatggcttacctcttctttgtgaaaatactatctcatttcctggaaataaaatgtaaaacctgtcagttgctcagctgggctttggtgtatttaccttccttcccttcctgctcccagacagtctcacaagtaaacaccagcagctcatagattacaaccaagaaagtgactgtatcagatgatagacttcaagtgaatgtcagcctaagaggccaagctgcagatcgtggcaacagatgagctctgttaacctcctgactgtcgtgtttcctttttattacagaggtgggtcactgtttaccttgtttcaggggtgggagaaactcctttccttcagctggcatttgaatgtttccaaatctattttatctgacgtcatgaacacacaggcaatgattttatgacaacttgatgtgcttttttctttatttttcttttacattagaagttttctctcttttctccacctctcctttatttttaattttaattttaatttttgaaacaagatctgactctgttgcccaagctggagtacagtagtgcaatctcagctcactgcaacctccacctcccagactcaagccatcctcccacctcaacctcccaagtagctgggactacaggcatatgccatcacacccagctaatttttgtttttctgtagagacagggtttcaccatgttggccaggctggtctcaaattcctgaccttaagtgatccacctgcctaggcctctaaaatgctgggattacaggcgtgagccaccacgcccagcctataccccatgtattttcataaagggttggaaactattgattgccaactttttaaggatggtagggattttttctttgttgaatatactgtgaattttgggattctggagtccttagtcttcatttccattcttctgcccatgattactgatcaaaatactggtagagtcatggaggaagtaagttaaatgtggaaaaaatgctttaaaagtacttactataaccacatcataagaattctggaaaaatagagaacaaaaggaaaagattgttaccaccttgatttaataacttcttgtttccccatacatgtgttttgtttatagattgcatgggtatatgtcaatttttatatgttctgtgtttagtttacatattgtaattcatttttaagagagtacagacatacactttttgagtaggcaatatgttcacatagtttgaaattaaaggtacaaaatggcgtagaatgaaatgcctctcaccctttccccacagcgactacttcccactcagaggcaacaagtattacagttgcttgtatattcttccagagatctctgtctatacaagcaaaaacacatgtggtctttttccttgctttgcacaaatggtaaactgtacgctattctgaaccttgcttttttcagatatatgttggcaacagttccatgtcagtacatagtttcctttctttattacagctgcctgttttttcattgtgtatttgcaccatcatttacttttctggcttacttttgatagaaatctaggttggttcaaacctttttactcttaaaacaatgctgcagttaacacccttgtacatatatctttagagagaagatattttaaaaagaaatacctttttaaaaattattttattattttttaatagagactatgttgcctaggctggtcttgaaattctgggctaaagcaatcctaccaccttggcctcccaaagtgctgagattacaggcatgagccattgcacctggccaagaagagacatcttgacttgagcctgaagactatgtacagagactgacctcacagactgaccattccatcccacagctgctggacatagagtgatttgcagcccctcctttcagagtaccacatccctctcaagtgttccacaacatctaggaaagtgagctcttaaagacagactaaaaagagtaataaatcaatacaacaacattaaaagccagactagcggagtttgaatcttggccctgctgttagtaactgtgtgagccttgggcaagttactcagcctccttgtgtcttggttttggtttcttcatctctaagtaattatatctgtcattattgccctgatcacaaacaaaagcctgaatgtactatgtttaaaagacaaaccaaaaattaacccaaacttgcattatttgtctgagctacagaatgttctttccttggagagatatctgatattaaacatcatctgcattttacttgcctagaaaatacacggtaacttttctgccttgcagcatcaaactatagtacagctgagccccagtgctgtgcagtctgactctaattaaaggcaccttctttacagcagggctctggggaactggaaaagggggtttgtttcattatctggttttattaagcagatgaatgcagccagctatatgaagcactttgcagtgaatggcaggtgtcccatatctggttatgttaacctagaaagggctcactctacctctaggcatgtttcatcccaacaatcagactgtgccaaagcaggggactttgtcctttgtggattgcatagctggatacccatcatctgtttctctgattggaagctgctgttgtacagaaagacctgcatttcccccttgtctccagttctctcactactttttcctcctctgtgagtgaccatccaggcagtcaccataactgctggagtgtctgggattggtagctctctccaactgcctgcttgctctttacagcctctctctgtgactggaatctctccacctcatcgtatctaaggataacccagaaacatggggtgtcctaggtatgtttatctcgacactgaaccccctaggcttctgatgaatccagtgattagctaaatttgacatagaaagtaagaaggaatgtctactttgtattgtggtcctaatctaagatcaggagaatcctggaattgttatctgtctcttgctctgagatacagacttgttcataggtgtggggcctgattggaacaggatctgccattggtcacaataggtcaagggcttgttctgaaccctagttagcttcattcagagaaagaaacttcctacctggtcagctttttcagcttctccaacaaatgggagttgaggcagtaggagtgtggggttcttgggaagacgatggggccttgtattaaggagaaataatgaactatcttcttgattcttccattgagaaaagcatatgaatcctaggaaagggctcagcctgtgataggcattcaataaatactccaatgctgtcattcctttgtctacagcatccccaaacaatgtaccagtgatgggctacctgagctcatctagtcgccaagcagtatctcctgcttgctgctgctttactacattccagatgcccacctcatccaatttccagagccactatctctgctgtccactttccttcaggctctgtgaatacttcaacctgctgtgatttggggccgtttgtactctgcatgtattcaataaattcaattcagcaatagttatcaaatgcccattttcttactaggcactgctctaggtgtttggtatggcaatgagcaaaacacaaccattgtgagctgatgttctagaaaggtgtcaaaagcgtttcaaaggttttatgagatgctgtgggagggggttacgcactgctacctactgaggtagcaatgttgggtgtttcctcacattcctcaacctccacgcag

SEQ ID NO: 32044 - DNA, 4257 bp, Homo sapiens
ggtgctgcggtgatctcgaggattccgacgagttgtccgagttagggaacgaaaagcaaagagattgttctgaagaccgtgctctaagggcatttgaaagactgccaggtagtgcgagcctgagatggtctggaggattctctctagccgtgactccgctgctctgaaggtcaactgagaagtcttgtgggacagagacttgagttaggaagccctcagtcacttgccttccacggtggccagccctgctgccatcattggctgaagcaccaccaggattcacggcacccaactgcttcagggtacttcgtagactctgcctcactacatgtcgaaagagttatttgagttctcttctgtttttttttaatttgttgttgttgttactgttttgataactcggaaacacctccgttgacagttgttttggataggttgggtgtaccccatggctgcctctgaaggcagtgtctattttgagaggatggcttacctcttctttgtgaaaatactatctcatttcctggaaataaaatgtaaaacctgtcagttgctcagctgggctttggtgtatttaccttccttcccttcctgctcccagacagtctcacaagtaaacaccagcagctcatagattacaaccaagaaagtgactgtatcagatgatagacttcaagtgaatgtcagcctaagaggccaagctgcagatcgtggcaacagatgagctctgttaacctcctgactgtcgtgtttcctttttattacagaggtgggtcactgtttaccttgtttcaggggtgggagaaactcctttccttcagctggcatttgaatgtttccaaatctattttatctgacgtcatgaacacacaggcaatgattttatgacaacttgatgtgcttttttctttatttttcttttacattagaagttttctctcttttctccacctctcctttatttttaattttaattttaatttttgaaacaagatctgactctgttgcccaagctggagtacagtagtgcaatctcagctcactgcaacctccacctcccagactcaagccatcctcccacctcaacctcccaagtagctgggactacaggcatatgccatcacacccagctaatttttgtttttctgtagagacagggtttcaccatgttggccaggctggtctcaaattcctgaccttaagtgatccacctgcctaggcctctaaaatgctgggattacaggcgtgagccaccacgcccagcctataccccatgtattttcataaagggttggaaactattgattgccaactttttaaggatggtagggattttttctttgttgaatatactgtgaattttgggattctggagtccttagtcttcatttccattcttctgcccatgattactgatcaaaatactggtagagtcatggaggaagtaagttaaatgtggaaaaaatgctttaaaagtacttactataaccacatcataagaattctggaaaaatagagaacaaaaggaaaagattgttaccaccttgatttaataacttcttgtttccccatacatgtgttttgtttatagattgcatgggtatatgtcaatttttatatgttctgtgtttagtttacatattgtaattcatttttaagagagtacagacatacactttttgagtaggcaatatgttcacatagtttgaaattaaaggtacaaaatggcgtagaatgaaatgcctctcaccctttccccacagcgactacttcccactcagaggcaacaagtattacagttgcttgtatattcttccagagatctctgtctatacaagcaaaaacacatgtggtctttttccttgctttgcacaaatggtaaactgtacgctattctgaaccttgcttttttcagatatatgttggcaacagttccatgtcagtacatagtttcctttctttattacagctgcctgttttttcattgtgtatttgcaccatcatttacttttctggcttacttttgatagaaatctaggttggttcaaacctttttactcttaaaacaatgctgcagttaacacccttgtacatatatctttagagagaagatattttaaaaagaaatacctttttaaaaattattttattattttttaatagagactatgttgcctaggctggtcttgaaattctgggctaaagcaatcctaccaccttggcctcccaaagtgctgagattacaggcatgagccattgcacctggccaagaagagacatcttgacttgagcctgaagactatgtacagagactgacctcacagactgaccattccatcccacagctgctggacatagagtgatttgcagcccctcctttcagagtaccacatccctctcaagtgttccacaacatctaggaaagtgagctcttaaagacagactaaaaagagtaataaatcaatacaacaacattaaaagccagactagcggagtttgaatcttggccctgctgttagtaactgtgtgagccttgggcaagttactcagcctccttgtgtcttggttttggtttcttcatctctaagtaattatatctgtcattattgccctgatcacaaacaaaagcctgaatgtactatgtttaaaagacaaaccaaaaattaacccaaacttgcattatttgtctgagctacagaatgttctttccttggagagatatctgatattaaacatcatctgcattttacttgcctagaaaatacacggtaacttttctgccttgcagcatcaaactatagtacagctgagccccagtgctgtgcagtctgactctaattaaaggcaccttctttacagcagggctctggggaactggaaaagggggtttgtttcattatctggttttattaagcagatgaatgcagccagctatatgaagcactttgcagtgaatggcaggtgtcccatatctggttatgttaacctagaaagggctcactctacctctaggcatgtttcatcccaacaatcagactgtgccaaagcaggggactttgtcctttgtggattgcatagctggatacccatcatctgtttctctgattggaagctgctgttgtacagaaagacctgcatttcccccttgtctccagttctctcactactttttcctcctctgtgagtgaccatccaggcagtcaccataactgctggagtgtctgggattggtagctctctccaactgcctgcttgctctttacagcctctctctgtgactggaatctctccacctcatcgtatctaaggataacccagaaacatggggtgtcctaggtatgtttatctcgacactgaaccccctaggcttctgatgaatccagtgattagctaaatttgacatagaaagtaagaaggaatgtctactttgtattgtggtcctaatctaagatcaggagaatcctggaattgttatctgtctcttgctctgagatacagacttgttcataggtgtggggcctgattggaacaggatctgccattggtcacaataggtcaagggcttgttctgaaccctagttagcttcattcagagaaagaaacttcctacctggtcagctttttcagcttctccaacaaatgggagttgaggcagtaggagtgtggggttcttgggaagacgatggggccttgtattaaggagaaataatgaactatcttcttgattcttccattgagaaaagcatatgaatcctaggaaagggctcagcctgtgataggcattcaataaatactccaatgctgtcattcctttgtctacagcatccccaaacaatgtaccagtgatgggctacctgagctcatctagtcgccaagcagtatctcctgcttgctgctgctttactacattccagatgcccacctcatccaatttccagagccactatctctgctgtccactttccttcaggctctgtgaatacttcaacctgctgtgatttggggccgtttgtactctgcatgtattcaataaattcaattcagcaatagttatcaaatgcccattttcttactaggcactgctctaggtgtttggtatggcaatgagcaaaacacaaccattgtgagctgatgttctagaaaggtgtcaaaagcgtttcaaaggttttatgagatgctgtgggagggggttacgcactgctacctactgaggtagcaatgttgggtgtttcctcacattcctcaacctccacgcag

SEQ ID NO: 32045 - DNA, 4828 bp, Homo sapiens
ctgcctattcctgtatataattcattcctttctttaacatctttaacagatatattgagggccagatttgtgctaggcactgttctagatgctgagaatgtaaaaagtgaaaatctaagttagatgtaattaatgctatggagaaaaatcaagcaagaaggggagaaggggtgatggtgaaagccttggcaattcttgatagggtaatcaaggaaggcacctctgagcaggaactatttgagggaagctctgaaggaggtggccatgctgccatgtagggaaagagggaatggtaagggggagcatgctggtatgtgggaggggcagcaaggaggctagtgctggggagtggagtgagcgctggggagtgggtaggagaggaagcttgagcaagacgcagattttgtagggccttgtaggcctttgaaaggactttgactttaactcactgtgagaggaatgaggagtgggctttgagcagagagtgacatgatctgacttctgttttctcagttcgctatggctgctgtgtgaggaagagacagggtggcgaggctggaagcagggagtccacggaagggaaatacaggctcctcatttatttatttctcttctttttctccaaagcaaagagattgttctgaagaccgtgctctaagggcatttgaaagactgccaggtagtgcgagcctgagatggtctggaggattctctctagccgtgactccgctgctctgaaggtcaactgagaagtcttgtgggacagagacttgagttaggaagccctcagtcacttgccttccacggtggccagccctgctgccatcattggctgaagcaccaccaggattcacggcacccaactgcttcagggtacttcgtagactctgcctcactacatgtcgaaagagttatttgagttctcttctgtttttttttaatttgttgttgttgttactgttttgataactcggaaacacctccgttgacagttgttttggataggttgggtgtaccccatggctgcctctgaaggcagtgtctattttgagaggatggcttacctcttctttgtgaaaatactatctcatttcctggaaataaaatgtaaaacctgtcagttgctcagctgggctttggtgtatttaccttccttcccttcctgctcccagacagtctcacaagtaaacaccagcagctcatagattacaaccaagaaagtgactgtatcagatgatagacttcaagtgaatgtcagcctaagaggccaagctgcagatcgtggcaacagatgagctctgttaacctcctgactgtcgtgtttcctttttattacagaggtgggtcactgtttaccttgtttcaggggtgggagaaactcctttccttcagctggcatttgaatgtttccaaatctattttatctgacgtcatgaacacacaggcaatgattttatgacaacttgatgtgcttttttctttatttttcttttacattagaagttttctctcttttctccacctctcctttatttttaattttaattttaatttttgaaacaagatctgactctgttgcccaagctggagtacagtagtgcaatctcagctcactgcaacctccacctcccagactcaagccatcctcccacctcaacctcccaagtagctgggactacaggcatatgccatcacacccagctaatttttgtttttctgtagagacagggtttcaccatgttggccaggctggtctcaaattcctgaccttaagtgatccacctgcctaggcctctaaaatgctgggattacaggcgtgagccaccacgcccagcctataccccatgtattttcataaagggttggaaactattgattgccaactttttaaggatggtagggattttttctttgttgaatatactgtgaattttgggattctggagtccttagtcttcatttccattcttctgcccatgattactgatcaaaatactggtagagtcatggaggaagtaagttaaatgtggaaaaaatgctttaaaagtacttactataaccacatcataagaattctggaaaaatagagaacaaaaggaaaagattgttaccaccttgatttaataacttcttgtttccccatacatgtgttttgtttatagattgcatgggtatatgtcaatttttatatgttctgtgtttagtttacatattgtaattcatttttaagagagtacagacatacactttttgagtaggcaatatgttcacatagtttgaaattaaaggtacaaaatggcgtagaatgaaatgcctctcaccctttccccacagcgactacttcccactcagaggcaacaagtattacagttgcttgtatattcttccagagatctctgtctatacaagcaaaaacacatgtggtctttttccttgctttgcacaaatggtaaactgtacgctattctgaaccttgcttttttcagatatatgttggcaacagttccatgtcagtacatagtttcctttctttattacagctgcctgttttttcattgtgtatttgcaccatcatttacttttctggcttacttttgatagaaatctaggttggttcaaacctttttactcttaaaacaatgctgcagttaacacccttgtacatatatctttagagagaagatattttaaaaagaaatacctttttaaaaattattttattattttttaatagagactatgttgcctaggctggtcttgaaattctgggctaaagcaatcctaccaccttggcctcccaaagtgctgagattacaggcatgagccattgcacctggccaagaagagacatcttgacttgagcctgaagactatgtacagagactgacctcacagactgaccattccatcccacagctgctggacatagagtgatttgcagcccctcctttcagagtaccacatccctctcaagtgttccacaacatctaggaaagtgagctcttaaagacagactaaaaagagtaataaatcaatacaacaacattaaaagccagactagcggagtttgaatcttggccctgctgttagtaactgtgtgagccttgggcaagttactcagcctccttgtgtcttggttttggtttcttcatctctaagtaattatatctgtcattattgccctgatcacaaacaaaagcctgaatgtactatgtttaaaagacaaaccaaaaattaacccaaacttgcattatttgtctgagctacagaatgttctttccttggagagatatctgatattaaacatcatctgcattttacttgcctagaaaatacacggtaacttttctgccttgcagcatcaaactatagtacagctgagccccagtgctgtgcagtctgactctaattaaaggcaccttctttacagcagggctctggggaactggaaaagggggtttgtttcattatctggttttattaagcagatgaatgcagccagctatatgaagcactttgcagtgaatggcaggtgtcccatatctggttatgttaacctagaaagggctcactctacctctaggcatgtttcatcccaacaatcagactgtgccaaagcaggggactttgtcctttgtggattgcatagctggatacccatcatctgtttctctgattggaagctgctgttgtacagaaagacctgcatttcccccttgtctccagttctctcactactttttcctcctctgtgagtgaccatccaggcagtcaccataactgctggagtgtctgggattggtagctctctccaactgcctgcttgctctttacagcctctctctgtgactggaatctctccacctcatcgtatctaaggataacccagaaacatggggtgtcctaggtatgtttatctcgacactgaaccccctaggcttctgatgaatccagtgattagctaaatttgacatagaaagtaagaaggaatgtctactttgtattgtggtcctaatctaagatcaggagaatcctggaattgttatctgtctcttgctctgagatacagacttgttcataggtgtggggcctgattggaacaggatctgccattggtcacaataggtcaagggcttgttctgaaccctagttagcttcattcagagaaagaaacttcctacctggtcagctttttcagcttctccaacaaatgggagttgaggcagtaggagtgtggggttcttgggaagacgatggggccttgtattaaggagaaataatgaactatcttcttgattcttccattgagaaaagcatatgaatcctaggaaagggctcagcctgtgataggcattcaataaatactccaatgctgtcattcctttgtctacagcatccccaaacaatgtaccagtgatgggctacctgagctcatctagtcgccaagcagtatctcctgcttgctgctgctttactacattccagatgcccacctcatccaatttccagagccactatctctgctgtccactttccttcaggctctgtgaatacttcaacctgctgtgatttggggccgtttgtactctgcatgtattcaataaattcaattcagcaatagttatcaaatgcccattttcttactaggcactgctctaggtgtttggtatggcaatgagcaaaacacaaccattgtgagctgatgttctagaaaggtgtcaaaagcgtttcaaaggttttatgagatgctgtgggagggggttacgcactgctacctactgaggtagcaatgttgggtgtttcctcacattcctcaacctccacgcag

SEQ ID NO: 32046 - DNA, 383 bp, Homo sapiens
tttttttgagatggagtcttgctctgtcgcccaggctggtgtgcagtggcacaatcttggctcaccgcaacctctgccccctgggttcaagcaattctcctgcctcagcctcccaagtagctgggactacaggtaccgactaccacacctcgctaatttttgtatttttagtagagacggggtttcaccatgttggtcaggctggtctcgaattcctgacctcaagcaacctgcccacctcggcttcccaaaatgctgggattacaggcgtgagccactgggcctggccgtgatttgtgattctttccttcaaaacctagcagtgtttttattgaggccaggaatgtgtatttctagattaagaaattaatacacaggaataa

SEQ ID NO: 32047 - DNA, 421 bp, Homo sapiens
ggaagcgggtccctgggtggcggaggttattgggggagggctagaggctcccctgagatcaggaagccctggaccccattgcacagatgtatagtgcagtggttagaaaccagaatctaggactgactaacctgggtgtgaattctggctccaccacttagcttgtgacctcggacaagttacttaacctctctgtgctatagtttcagggcctataaaatggtaacaatggtacgtaccagccgggcacggtggcttacgcctgtaatcccagcactttgggaggccgaggtgggcgaatcgcctgaggtcgggagttcgagaccagcctggccagtatggtgaaaccccatctctattaaaaatataaaaattagccgggcatagtggcaggcgcctgtaatcccagctactcgggaag

SEQ ID NO: 32048 - DNA, 339 bp, Homo sapiens
taagacaggatcttgctctgtcgcccaggctgcagtgcagtggtgcgatcaaggcccactgtaacttcaaactcttgggctcaaactcctggctaatgtttgttaggtttttttttttctccctgtagagacagggtctttctatgttgcccaggctcgtcttaaactccaggcctcaagttatcctcccacctcagcctcccgaattgctgagattatagatgtgagcccccatgcctggccagtaatcactcacattttaaaaagctcacagaaatgtggatatagaattttcagtttactgtatattccaaattatctacaatatgcatgagaatc

SEQ ID NO: 32049 - DNA, 1650 bp, Homo sapiens
aaaatctcagctgggcatgggcatggtagtgcatgcctgtaatcccagctactccagaggctgaggcatgagaatcccttgagccagggatgcagaggttgcagtgaactgagattgtgccactgcatccagcctgggtaacagagtgagactcggtctcaagagaaaaggaattttcttattttaaaaataatattctgttgtgtatatctaccacattgtcttcatttactcattagatgttaaactgtttattctgtattttggctattgtgaaaagtgctacaaacagaattgcaaatgtttcttcattctgattttatttgttttggatatatatccagtagtgcaattgctgttatgacatggtagtttaagttttttgagaaatctctattttgtttttcataatggctgtcttcatttacattccaaaccaacagtgtgcaagccttcccttttcttcacatctttaccaacgctttttctttttaataagagtcattctaacaggaatgagttgatatctcctagttttgttttttcttttttggcttgcctttttgtgataattgacattgagcatttttaaatatatcagttggccattatgtatgtattttcttgaaaaatacttatttcagctacttatttttaatagttacttatttttgttgtattgtcatttgagttttgtatatatttttgatattaaccccttgtcacatgtataatttgcaaatattttctccctttttttagttgtcacattctgttcattgtatcagattctgtgcagcagctttttaatttgaagtgatctgactgacttgttcttccttttgtgtcctgggatatttaggttaaatcaaaaaacttgctgcccagaccaatgttatggggctttcactctattttttggtagtagtagtttaagagttttaggccttacatttaagtggctaatttattttgagtttatttttacatatggtgtgagatgagggtctcacttttttttctctgcatgtggacataaagttttctaaacatcatttattgaagatactgttatttcccttaaaaaaaaaagtcacctgtatttaaaatcagttagctgtaaatacactgatatatttctgctctctttttcttctgctccattggcctatatctctgtttttattcaagtgacatactgttttggttaccacagttttgtagtgtatttcaaagtcagggtgataccttcttttgtcttgattgctttggctatttagggtgttttgtggtaccatatgaattttagatatgctttttaaaaatgtctatgaagtatgtcactggtattttgatagaggttgcattatatctgcagatcattttgtgtaatacaaatatttaactattaaaaatgccagttcatgaatgagtaatattattccatttatgtgttacttaatttgtataatgttctttagagtagaatgtaaggtgtttcaactttttggttaaatttacttcaaactatagttaggtagatggaatttttttgaatttcattttgagatagttactaatgtatagaaatgctatgactttttgatgatgtttttgtattttgaaagtttaataaattttgtttgttta

SEQ ID NO: 32050 - DNA, 2199 bp, Homo sapiens
aaaatctcagctgggcatgggcatggtagtgcatgcctgtaatcccagctactccagaggctgaggcatgagaatcccttgagccagggatgcagaggttgcagtgaactgagattgtgccactgcatccagcctgggtaacagagtgagactcggtctcaagagaaaaggaattttcttattttaaaaataatattctgttgtgtatatctaccacattgtcttcatttactcattagatgttaaactgtttattctgtattttggctattgtgaaaagtgctacaaacagaattgcaaatgtttcttcattctgattttatttgttttggatatatatccagtagtgcaattgctgttatgacatggtagtttaagttttttgagaaatctctattttgtttttcataatggctgtcttcatttacattccaaaccaacagtgtgcaagccttcccttttcttcacatctttaccaacgctttttctttttaataagagtcattctaacaggaatgagttgatatctcctagttttgttttttcttttttggcttgcctttttgtgataattgacattgagcatttttaaatatatcagttggccattatgtatgtattttcttgaaaaatacttatttcagctacttatttttaatagttacttatttttgttgtattgtcatttgagttttgtatatatttttgatattaaccccttgtcacatgtataatttgcaaatattttctccctttttttagttgtcacattctgttcattgtatcagattctgtgcagcagctttttaatttgaagtgatctgactgacttgttcttccttttgtgtcctgggatatttaggttaaatcaaaaaacttgctgcccagaccaatgttatggggctttcactctattttttggtagtagtagtttaagagttttaggccttacatttaagtggctaatttattttgagtttatttttacatatggtgtgagatgagggtctcacttttttttctctgcatgtggacataaagttttctaaacatcatttattgaagatactgttatttcccttaaaaaaaaaagtcacctgtatttaaaatcagttagctgtaaatacactgatatatttctgctctctttttcttctgctccattggcctatatctctgtttttattcaagtgacatactgttttggttaccacagttttgtagtgtatttcaaagtcagggtgataccttcttttgtcttgattgctttggctatttagggtgttttgtggtaccatatgaattttagatatgctttttaaaaatgtctatgaagtatgtcactggtattttgatagaggttgcattatatctgcagatcattttgtgtaatacaaatatttaactattaaaaatgccagttcatgaatgagtaatattattccatttatgtgttacttaatttgtataatgttctttagagtagaatgtaaggtgtttcaactttttggttaaatttacttcaaactatagttaggtagatggaatttttttgaatttcattttgagatagttactaatgtatagaaatgctatgactttttgatgatgtttttgtattttgaaagtttaataaattttgtttgtttaaaaaaaaaaaaaaaaaactcgagactagctcgtgccgaattcggcacgaggatctcgttcccatactcgctcaaaatccaggtctagctcaaaatcccattctagaaggaaaagatcacaatcaaaacacaggagtagatcccataatagatcacgttcaagacagaaagacagacgtagatctaagagcccacataaaaaacgctctaaatcaagggagagacggaagtcaaggagtcgttcgcattcacgggacaagagaaaagacactcgagaaaagatcaaggaaaaggaaagagtgaaagagaaagacagggaaaaggagagagagagggaaaaggaacgtgaaaaagaaaaggaacggtgtaaaaacaaagaccgggacaaggaacgggaaaaggaccgggaaaaagacaaggaaaaggacagagagagagaacgggaaaaagagcatgagaaggatcgagacacagagaaggaaagggaccggacaaggacaggaacgagaaatagacagatccaagagatagatgaaaaagaaagatgata

SEQ ID NO: 32051 - DNA, 298 bp, Homo sapiens
agcaagaccttgtttctaaataaataaacaaacaaataaatctttgttttggctggtcatggtgattcatgcctgtaatcccagcgctttgggaggccaaggtgggtggatcacttgaggtcaggagtttgagaccagcctggttaacaaggcaaaaccccgtctctactaaaaatacaaaaaaaattagccggatgtagtggtgggtgcctgtaatcccagctacttgggaggcagaggttgcagtgaaccaagatcatgcaccccagcctgggcaacagagtgagactacatctca

SEQ ID NO: 32052 - DNA, 153 bp, Homo sapiens
taaacattcaagaaatagctatttcatgaatgaattgaatttaaaattttattttataattgaaacatcaaaaacctatcacataagcatttgtttctcccattgatatcattgatatgtcttgctctcttggcattctgtctttcccatctt

SEQ ID NO: 32053 - DNA, 479 bp, Homo sapiens
tttttttttgtgtgaaacaaatagtttttgggcactatgaaccatgcccatgtaagacagcaaacttaatggtatatgttctcactgctccaccaacactgttctcttttctctctccctctcctggggactttctattccctaagacacaacaacactgaaattaggccaaatagtaaccctaaaatgacctcaagtgctcaagtgaaaggaatagtcacaagtctctaattatggacatgattaagtttagtgagaaaggcatgtctaaatctgacataggacaaaagtgaggcctcttgcaccaaacagttaggcaagttgtgaatggaaaggagaagttcatgaaggaaattagaaatgctacttcagtgaacacatgaatgataagaaagcaaaacagccttactggtgatatggagaaagttttggtggtttggttagatcaaactagccacaatattctgttaggccaaagc

SEQ ID NO: 32054 - DNA, 2371 bp, Homo sapiens
aggtataacagaataagtatctgtttatctaatctacatgtgactatcttagtctctctcggtcacttaatattatgctgaaatttaccactgtggggatgaatgatcgctattcaccaagtatatttgaacatgtaaatgcttaagaaataagcataatgcggatatagtttgggttaataggattctcatagttttttttcccctatgaaacataagtaatgattttagtgtatttcttatggaatacactcatttaaaaaggactttaagaaattgtggatgtgaataatacctttctctaataaaaatttaaattgtataatagttttataatatttacattaattgatattttaatatggatagacattgcatagattcaaataaattaaaatcaatgataaatgctaaatattttatctaaatagtttttcaagaaacagttatggaaatgtgtatattaaatggctctaatgtggagcttgtggtatttcaactcagtattcattattagttgtgtgtctggaaagattgtacttacttttcctctttacactacagtttgctcttatggggctctaaactgtttaactgaagaaccttcgtctgtatttgattgagcataatttagtattttatgatttccaagatgatgttcttatgtctatcaagtctatgtatcaaatttataacatcatttaagaaaaaggaatttccacagatacttcagttgcaattttttgtttcatgctactgaaaatacatttgtttctaggggttggaatattatagaagatgtaggatgaaagaaaacgatagaacaacgaaagaattctgtttatgaaattacaggaattgtgtccactatggtaaagcattgtcattttagtacattttctcttagtagtttggcattttatactttaaaacttgttttgctttaaaaattgtttataatgcttaccttctttctccagtgcctttagtcttgatttgatatgtttgtaccctcagttaccctttctattacatgtttttgatgttttcatagcctaggaaacatcgattcctttttaataattgtcaatctgattatttaaagaggtaacaattatctgttaatgctttggaaaaacaagtagggttgccttggaggccaggcttcttagttcattcaaaaatattccttggatttatgccatgtattaagcatttttagcccccagtattacaactgtgaaccaaacggataaggccctaaccattttcagcattctctttggatggggtgggattggggacttaattaaaatagagatatagaaaaataggcatctaaataagataataagtgtggggttgaaatgaagcatctaacaatagttgaagttagaagtaatattttacagtattgtaacctctatttaagtttgggtattagttacagatagcataaaaaagccttaatttttcactttccttgctggcaaaggtacatttatttagactgtccatttaaagtaatgtttaacataaacattactgtgaaaaacattccattacatattcccaagcaaatgagctgcatcttctttactgtattttacaatttagtacaacagttttaggcctcaatcttaacatcactggtattttaaatttgggcaatgaatatgaaattacttttgacttacagattgattatattattactttgaaaatgcattaatttcttagaaaagtttggagcctctatctttttttgagttaatacttaaattctcattacttatattaatagcctgtactaagtgaaaatattatttatgcaagtaaacaagtcactataggcttttaagacttttctttaattttagattttgtcatcaaagtttaaattttttacctactgtccacttaaatataatttaacagtttgtaaagtgaaatagttttaagtatgatgtatgatgcacctggcatataaatgaaaatgggcgtgcacaaagacactttactatgggaactgtactggaagatttatgaaagcatgtgaaattgcacctaaaattgtgttattagtgactataagcagcaatgctaaatttattgtacttgatgaatgaatgtatttagtcacagttactttggtttaaatgtataaatgtctttagggtttttttttaaatgtgtttgtaatttgtactattgtgggggtatacttggactgcaggggttattgtcaatgtgtgatttgtgtttttattttatagaatcatctaatgtgatataccaatttttataagtgatatttacataattctaataactgtatatttgacaacctattaaaatgttttgcattgga

SEQ ID NO: 32055 - DNA, 2531 bp, Homo sapiens
aggtataacagaataagtatctgtttatctaatctacatgtgactatcttagtctctctcggtcacttaatattatgctgaaatttaccactgtggggatgaatgatcgctattcaccaagtatatttgaacatgtaaatgcttaagaaataagcataatgcggatatagtttgggttaataggattctcatagttttttttcccctatgaaacataagtaatgattttagtgtatttcttatggaatacactcatttaaaaaggactttaagaaattgtggatgtgaataatacctttctctaataaaaatttaaattgtataatagttttataatatttacattaattgatattttaatatggatagacattgcatagattcaaataaattaaaatcaatgataaatgctaaatattttatctaaatagtttttcaagaaacagttatggaaatgtgtatattaaatggctctaatgtggagcttgtggtatttcaactcagtattcattattagttgtgtgtctggaaagattgtacttacttttcctctttacactacagtttgctcttatggggctctaaactgtttaactgaagaaccttcgtctgtatttgattgagcataatttagtattttatgatttccaagatgatgttcttatgtctatcaagtctatgtatcaaatttataacatcatttaagaaaaaggaatttccacagatacttcagttgcaattttttgtttcatgctactgaaaatacatttgtttctaggggttggaatattatagaagatgtaggatgaaagaaaacgatagaacaacgaaagaattctgtttatgaaattacaggaattgtgtccactatggtaaagcattgtcattttagtacattttctcttagtagtttggcattttatactttaaaacttgttttgctttaaaaattgtttataatgcttaccttctttctccagtgcctttagtcttgatttgatatgtttgtaccctcagttaccctttctattacatgtttttgatgttttcatagcctaggaaacatcgattcctttttaataattgtcaatctgattatttaaagaggtaacaattatctgttaatgctttggaaaaacaagtagggttgccttggaggccaggcttcttagttcattcaaaaatattccttggatttatgccatgtattaagcatttttagcccccagtattacaactgtgaaccaaacggataaggccctaaccattttcagcattctctttggatggggtgggattggggacttaattaaaatagagatatagaaaaataggcatctaaataagataataagtgtggggttgaaatgaagcatctaacaatagttgaagttagaagtaatattttacagtattgtaacctctatttaagtttgggtattagttacagatagcataaaaaagccttaatttttcactttccttgctggcaaaggtacatttatttagactgtccatttaaagtaatgtttaacataaacattactgtgaaaaacattccattacatattcccaagcaaatgagctgcatcttctttactgtattttacaatttagtacaacagttttaggcctcaatcttaacatcactggtattttaaatttgggcaatgaatatgaaattacttttgacttacagattgattatattattactttgaaaatgcattaatttcttagaaaagtttggagcctctatctttttttgagttaatacttaaattctcattacttatattaatagcctgtactaagtgaaaatattatttatgcaagtaaacaagtcactataggcttttaagacttttctttaattttagattttgtcatcaaagtttaaattttttacctactgtccacttaaatataatttaacagtttgtaaagtgaaatagttttaagtatgatgtatgatgcacctggcatataaatgaaaatgggcgtgcacaaagacactttactatgggaactgtactggaagatttatgaaagcatgtgaaattgcacctaaaattgtgttattagtgactataagcagcaatgctaaatttattgtacttgatgaatgaatgtatttagtcacagttactttggtttaaatgtataaatgtctttagggtttttttttaaatgtgtttgtaatttgtactattgtgggggtatacttggactgcaggggttattgtcaatgtgtgatttgtgtttttattttatagaatcatctaatgtgatataccaatttttataagtgatatttacataattctaataactgtatatttgacaacctattaaaatgttttgcattggaacttttttcattaattgtaacatgctaacgtggtttaaaaataactcattcattcaacagatattgaatgttgtgtatcagaaactataggaatcactggggaatcaaagatgacaaagtgcatcagtggaaagatccatgctctcagacaaattgggga

SEQ ID NO: 32056 - DNA, 503 bp, Homo sapiens
gtactgggattcagatgtgagccagtgcacccggccacaaacttagtcttaaaaacaacacaaattgactgtctgtggttgtgtatctgcaggtcacaatctagcagggctctctcggagctgaaatggcagtggcagggctgcattcccatctggaggctccagggagaagacttgccttgcactttacactctcctgggcttgcagccccttccccacctccaaagcagcaatgctgggctgagtccatatgctgtcgcccacccctgaacacttctgcctcctcttctactttcaaaaacacttgggaatacactggactcacccacacgatccaggacaatctcccccttcagatcctctccttacatctgcaaagcccccttcacctgggaaggccacactcacctacttctgcggggtcctgcgtggacactctgaagtcacgtctcagattgttggtctgcacctccatgctttttctctgtctctttttcccttt

SEQ ID NO: 32057 - DNA, 451 bp, Homo sapiens
gagacaataattatataccagtggttgccacttaactgcacaaatagtcatttgtattgtcaatcttaggtgggccgaattttgtttctccttgtctctggacttcctccagtgtaggtcccatttgcctctgattgtggggcaatttcattttaagaatggcctttcaggccaggtgtggtggctcatgcctgcaatcctagcactttgggaggccgaggtgggtggatcacctgaggtcaagcgttcaagaccagtctggccaacatggcaaaaacccatctctactaaaaatacaaaaattagccaggtctggtggtgcatgcctgtagtcccagctactcgggaggctgaggcaggagaatggcatgaacctgggagacgacagttgcagtgagccaagattgcgccgttgcaccccagcctgggcgacagagcgagactctgtctc

SEQ ID NO: 32058 - DNA, 1578 bp, Homo sapiens
  misc_feature (1033)..(1033): n is a, c, g, or t
cacccacacccattcactgatgcctcgccagcttccatgccacctgtcagcactgagtaattaggagaccgcatggcccacaaagctgcttgtgtggcccgttatgggaaaaaaaaaaaaaaggctaactcctgaattgcacaaatcttgatggatagaggggagaaaagcaaggcaggtccacacccccattaagaaaaggacaccaactgtagcttgaaggatctgaggggtctactccagatatcgcagagtgggagtggagaaaaaacagtagatgtgctgaaatgcttccggggcccttgaaaaagagatgggaagatgacaactttggtctcagcagagaacagcaaggaattggccaacaagagaacatagatgtttcggtcaagctagtcctttgggtgagataagttggaaaaaaaggtgtttctgccacttgaagtgtttggtacaggtttcacatctttgtgagatgacatacatgagttcttgagagacattcagaaagtgtaaattgatatgccagctaaagctcccaaaatgaagagagtgctggtccagtatagtctcttgttcagaacgatgatctcctgtgactttagagtttgtgctctgtatgttataaagatctttactaccaaagccttttcttgtgagaaattagggctctgtgtctttattagtaggacatgtgccatctcctcatagttatgttcactgtggttttctcaaaaacaaagccaagcataccttgatcagtgagatttgccattcaaaaaccagagagatgttcatacatgcataattgcatctttagcttttctatctccggcccccagagctgctttggggagttttattcttctagtttgagcagacacttctgtcatttcatttaaagtaaatgccacaatttacaagcccagcatcagttctcctccttggggatactgacagagaggaaatgggggctctttggtcctttccaagcacagcctcaaatgctatattttgaaaatagaaaatacanaaaaatgacatggtaccaagtcagcaaacaatgcatagggaaattttgggtaaggcagaattgtgggagttagtgttggacacttgggttgtctgcgacctgtttacaaaaggtcataggtggttttcttggggtcattgcaaatagtcaactgaacaattcacatcagtccttgtggattacatttactgtactaaaaggatcaaaaagagaaatggggaaaaaagatgaggacacaaggacagacttctaaaacttagtcaggtggaagccccaggatcagtccatgtttggttaatgcctttctggaatttgcaaccaaattatttatatttgaaaatgtagtagagattgctaaacatttaaatataaggtataagacttcaatgttaactgttagagctaacttattgacagactggattctaccaagcaatgactgttatataaacttttccttaaaagttaaatatatggcatggctaaaatctacagaattgtgtagataaaaaaatatactttgaatacatatcagccacaattca

SEQ ID NO: 32059 - DNA, 258 bp, Homo sapiens
cgaacccaaatcactggcccaagttccaccccttgccccagacctccagtccccttcagcaccatgggtgcagcccctaccagcagctagcagaagggctgcccggaatctctagtcctccctggaatcaaatccaggtccctcttactgccacagctccacacttgatcccaggcctcctggtggtcaaacccagacccttcttgctatagtagtttgtcaccccctgctattaaactgccattgacttttagtctc

SEQ ID NO: 32060 - DNA, 696 bp, Homo sapiens
cttagggtcagctttatgattcgttcttctgctgtcatcctttttcatcctattcacagcctgtaccggtgagggaatttgtctcaaaagcattcagcccttcaaagatttttattgtggtgaactcagaactgataaacagaaaaacagaaacagaaaaagggaactgatatgggggcgatcttgatgcgggttgtgtctctcatgcatgataactcagaggacaggctcctcggtagtgcggtagtgctaactctgtgaagtttcttcaccctccttcctagccctggaggcggggtgattcatagctcctgttccaaaggcattcagcagccattcgacctgggaaagaaacagagttttagaaaatacaggccaaatgtagagacgcctgtgattaccaggatgagtatgtcagtgcaggtggcttctgaatttctgtttctgagtttgtttggctgatgcctaaggaaaggggtcccttacagccctgttttataccttagttcttggtggcaacgtgggtgttgctgatctctctgatgtgtttttctgtgcactgaaaacaccagacatgctccgtgacatcctcggagcatctcccatcataatggagtgttcctaacctgacaaagaatagcatattacctccccatctactcaaaataaaattatagtaaaatttatcgcccttct

SEQ ID NO: 32061 - DNA, 760 bp, Homo sapiens
taatatgaagcatatattttactttagagctttaaaatgatttaaagtaacaattttagtaacctttgggtttgtcttgaaagtattttcatttcatttgtttctaaaatacttgtttctctgaagagagaagatggctcaatctgatgacatacgtaaccgtgatgactgacagtttaaactgaaatcaataaagggagaatagtttttaaatgcattgagacaaagcatacaggaaagatataattttgtataatcttttgttgaagtcttcaaaacagtacaagtgttatttgcctcatgacatgaaaattcacagtaaacaaagctattatatttgaatttcacaaaaatgtttactttcttagttatccttcagaaaaaaattcagaatgatgactcttctcaaattaagtatttatactaatacctgcaaaaactgtcatttagggattatttgtacagttctatgtggtaacactcagccatgcaacatgtgcatatattagtttccatatgtaaaatctggaattactgaaacaatctgtcttagactttttttgatgaagaattagattaaaaactccttatttataacaacatggtagtcattgaatgtaagaactcagatcacattgcagatattctaaaaatagaatgtaaattaggttttaacactaattctgagattattatatgtggcaaataatttgaatgatattcagcagtctaatttaggtaatcaaatcacagagattta

SEQ ID NO: 32062 - DNA, 426 bp, Homo sapiens
tgtcctttgtcagattgaggaagtttcctaatattcctagattgctgagaatttttgtcatgaataggtattgcatttgtcaaatgcttttctgcatctgttgaaatttctcattatggcctttcccctttagtctattaatttgatgaattacattggttcccagtattaagccaatcttgcctcctggggataaactctacttggtcctgatatgttatctttttaatgtattgttggcagcttgggcaacacagcaagactctgtctctacagaaaatttaaaaattagccaggcatagtggtgcatggttctatcccagcttctttggaagttgaggtaggaggattgcttgagccccagagttgaaggttacaatgagctataattatgccactgcactccagcctgggtgagagagtgag

SEQ ID NO: 32063 - DNA, 541 bp, Homo sapiens
cagatttattgggttccacaaatagaaatctatggaaattttgaatcaaattgcattaagctatagacaaggttgagacaaattgacatctccagaatattgagttttccaaaatatgtaagtggagtacccatttatttagattatctttcatttatatccgcaatgatttatagtattctgtgtttacatattatgcatcgtttgttagattcctgggtaagtgactttattgtaagtttcattgttgttaatctatagcaatcattctccaagtgtggtcccctgatgaggagcatcagcatcaccagagagaactggttaaaaatgcaaattcttaatttttaatttttgtgagtacatagtagatatatatatggggtacatggaatattttgatacaggcatataacatgtaattatcgcatcagggtaattggggtatccattacctcaagcatttatcctttgtattagaaacaatccagttatactcttttagttattttaagatctataattaaattatcgactatagtta

SEQ ID NO: 32064 - DNA, 443 bp, Homo sapiens
ggagatgggaagtgggatgcaagctcaaagcgggaagtcgcctgagggctgtaggaatcaagaaatgcttccagaagttactttggtggagagggttctggtagatgggcagaagtgaacacctgcagggagccaagagtgggatcgtggatccctcaagaagagaaattgggaaggagacagaaccaggtggcggaaagcaagagaacaaacaagcaaggtggtttcatgggagagtcacttaagaagaaaatgctggggagaaacaaggaggaattcaaagatgaggttggagaaggtgctgaaaaaaaagaaaggagctgaacatggtggctcaggcctataattccagcactttgagaggccaaggcaggcagatcacttgaggccaggagttcaagactagtgtggccaacatggagaaagcccgtctctacccaaaa

SEQ ID NO: 32065 - DNA, 725 bp, Homo sapiens
tcttgacaccaggcatgtctgcaaatttcaggacaacagtgaccaatggttaagatggtgactaagtgtaatcagaaaaaaatctttaactccaagtttagactagccagtttgtttaattggatttctctggtcaaaacctaaactattggtgctttctaacctgtggggatcagtgtgcatagaccattttgccctcgatttcagcataacatagtaaaaagactgggttttagattcaaaagtcatgggtttgtgatacagtgtacttactgattatgtgacgtcagttacttctctgaacctctttccttctctataaaatcataatgcttcactggattaatgaaataagatatttgtgaaaagaactctgtaaattataaaaagttaaaaacttttacatatagcacattatgtgactagtaagtactgctgtgtcttactagcgcaattttctgtggcagcattgacacgtatctcctaaaaatataaagttccccacgtttacaagcagcatgataggttcaggaagaggaggtagatgagaggtaacatcttattatttatgtaattatgggctccataagtttattttttaagcaccatatatgtgtgtgtttcaaaataaacataaggcatcatatatttaaacatatataaccataatgcttgtatttataaatcattttccaagaaagaataaatcaaaatttgaaattctg

SEQ ID NO: 32066 - DNA, 86 bp, Homo sapiens
ccaaggaaaaaaataaaaacaaacggaaaaattattacatagaacaaaataaagataaggatgatcacagatttcttttcagaaac

SEQ ID NO: 32067 - DNA, 853 bp, Homo sapiens
aactggagttattttcatcagcacactgttgccccagtctcacagtgatgcagtattaccccccaagtacctacctctcatgactgccagagagaaaagagccctcataggacaaaaaaaaaaaagcccatgacagggctgtcctgtgctaacgatgtatacaactattgctaaatcctcactcccttcctccttttgctgcctgtccccacccagagggtgtgttgccacttataactgctcaggcaggctggccctggccttgggagctcagagtcacaagctgagccaaagtgccagcagccaggcccacctgggggcctctgggagcctttgtgtgtgatgggtaagcctgtagggcatttccatagcacagtctcctcaggcagccagcaaactgtgaggacagactcctggaggagcaattcttccctaatcagagtagtttactttgtgaggtctaatttgaattggactgttggtgaattgctgctccgatcccttccttcctgggcagctgggcctggacccgctttccaccctggatcgggactcctttggggggacagttcctcttcacccaacctctgcctccccaaagacaacaacaacttaaaaaaacagcttgtgtgtttacttttctggtgaggattcctaaatcgtgtgccctcagaggaataccatgatccagcttcaagggcgagctcagacagaccagggagcaaagcgaatgcacataaagcagcaaggccactgccacaaccacgctgggggcgcttgtcccttctgccccctcctcacacccatgcactgaggccagtcagtaattaacaacgatacggatggctgcatt

SEQ ID NO: 32068 - DNA, 872 bp, Homo sapiens
tatccttgatagctgggatgctgataatgatacagactttcaaggaatcgagattacagtacaatatgccaagtggaactgagaataattaaatgcctttcatttagaccatattttaatcttatagctctaatggctggatcatatttctgcttaacaaatggcaaagctgattaaactgagacaacattgggtatgaagtaacttattattcagtaaaaatagtgtaagtctaaggcataatcaaagataatttcaagatgcagtaataccaacagtgaaaaaatcaagaagctactccaagaaactaagctcagtttttctgccggtatttccaaaatgtaagtcaaacatactttgttacttagatgatttttaaattgtgttaaatatttatagggggaaaagttgctactctaaggtaactatacaaaaagaagctattaggttttccaaattagggatacttctgtgccctcctcagtgtcaacacaggtcttttatggcacaaaacctttgcattctaattgtttcgcatgcttgatatacctccttcagtaacctgaaggtgatttacccacctcagtccccactgcctaagtctatgacttcccaaattgctcagtaaatgctgagtggatatttagtaagaaacctatggacactagggacaaatatgtgttcattaaatatgcatcatatactctgcaagccacctggcctggtctcttcaaaaaggcagtattggccaggttgggtgtcacgcctgtaatcccagcactttgggacccaaggcaggcggatcacttgaggtcaggagttcgagaccagcctggccaacatgatgaaaccccatctctactaaaaataca

SEQ ID NO: 32069 - DNA, 384 bp, Homo sapiens
gctatttatattttgaataaatttattatttaatttttatttagattggattcatgcatagtgatgtcctgctttttatctagctatcttaaaaatttttggccaggcccagtggctcacacctgtaatcccagcactttgggaggtcgaggtggaaggatcccttgagctcaggagtttgagatcagcctgggcgacatagcaaaaccttgtttctacaaaaaatcataaacttagctgcacatggtggcatgtgcctgtggttccgactacttcaggctgttgtgggaggattgcttgagcctgggaagtcaaggctgcggtaagccgtgatcatgccatggcactccagcctggaaaatagagcaagaccctgtctcaaaa

SEQ ID NO: 32070 - DNA, 320 bp, Homo sapiens
aagaaacaactcctggagaggtgtgtcacggtccccaagagactggggatggcttccctggaccacccaggaagacaaaggaagaaaagttcacgtttattgagcatcaaatgtttgctcaccactgttgtgggttgtggtgggggaaggggtggttcaactcagtaattacgcccacgtggcaatgctacgaaggtcatataattaccattttgcaaacagggaaactgaggctcaaacatgaaggttccaaggtcatccagcaggtgagtggcagaggcaggatttgctttgcacctgggccccatccaccaggttcg

SEQ ID NO: 32071 - DNA, 384 bp, Homo sapiens
tcctggctaacacggtgaaaccccatctctactaaaaatacaaaaaattagccggacatggtagcgggcgcctatagtcccagctacttgggaggctgaggcaagagaatggcgtgaacccaggaggcagagtttgcagtgaacagagatcgcgccactgcactccagcctgcctggagtgctttatttttgagatagagcgagactctatctcaaaaataaaataaaataaaataaaatagacatagtaagtaatatgatgttcaaggcaactcaatatgcacaatgcatacataatatgtaattgaaaaaattatgaaacaatatttacctgacttcattcaataaagtccaatattttaaaatctattctatgttacttaa

SEQ ID NO: 32072 - DNA, 319 bp, Homo sapiens
actcaaaggaatatattgcttctatttaaaatcattcttaaaacagatgcaggtggaggcaggtttgaggttgaggagtggtattagtgtggtagcagccactgttgtttcaaacctcttcccaccctgccctaagaagatcggaaacctctcctctctcttgcattttgtgttcctgtacagttgatccctcagtagaatgcaaaagttcatttgcatgacatgtagttgctgaagacacatgacccatccctaaactcagactaggacatttttacaaatacttttgcaaattgaagtcaggaatcttccagccatc

SEQ ID NO: 32073 - DNA, 465 bp, Homo sapiens
ctcctgaagggaatggcatttcctacaatcgataaacctgggaagagttcaaagatgggacaggaaataaggaattgaaacacgcggcctggatttttaaacttcataggggacagactcttttgctattatgtctactcaaggtcgagtaaacacaggtgttcacatgatgatgatgccttggttgcgtgtaaaaagactcagaatttaagtaattcgagtaactaattactaggccatatcaggaaatgactgacttccaattgccaaatggcttgtggtgccatcatttgaacaatcccagattgagttccattaattgcaatgataacagacaaaccactgtgttatgcaattatgaatacaaggtcattgttgtgatgtctataaaatgccttaatgtgggggataatcttctatgtaccacattggtgttgccaatacatgtttctgccgcaaaacaaa

SEQ ID NO: 32074 - DNA, 488 bp, Homo sapiens
ggctgcatatcggcatcaccacaggaagtttcaaaaattccagtgcctgagtcccaccacagggtctttggtggctcagatgaaccaatcccagtgccttctaacagttggagagtaagaaggatcctggagcgggggaacttctgacagctcctgctcatccccggagaagacagaagcccatcacctggtacacttcagaggaacacgcacctgacagccaaggagaactgagcaatagtcctcggatgttgggcgtcattttccgtgggcagttgggagtcactgtgcttctcccacaaaaactcttctcacagtccaacttgtatacaaacccatcagactgctagccccagggcaggtgcaactgtacgtgagatcagcggccaaccaccaccctttcccaggccacactccatcagcaagagactatgctacaccccaagacgagatgcagccaataaacatgtctatgtattgacctgaaa

SEQ ID NO: 32075 - DNA, 612 bp, Homo sapiens
ggctgcatatcggcatcaccacaggaagtttcaaaaattccagtgcctgagtcccaccacagggtctttggtggctcagatgaaccaatcccagtgccttctaacagttggagagtaagaaggatcctggagcgggggaacttctgacagctcctgctcatccccggagaagacagaagcccatcacctggtacacttcagaggaacacgcacctgacagccaaggagaactgagcaatagtcctcggatgttgggcgtcattttccgtgggcagttgggagtcactgtgcttctcccacaaaaactcttctcacagtccaacttgtatacaaacccatcagactgctagccccagggcaggtacctacctatcttcctgtcccagtactgaggggctcaataactattgttaacctgaagacaccgaaaaccttgacagcgctgagcttgttacagcaccatcttgctgtgtgtccatgtgcaggtgcaactgtacgtgagatcagcggccaaccaccaccctttcccaggccacactccatcagcaagagactatgctacaccccaagacgagatgcagccaataaacatgtctatgtattgacctgaaa

SEQ ID NO: 32076 - DNA, 449 bp, Homo sapiens
aggccaggtaaaggcagcccagaccagatctaaatgaaacgctgtgggctaagttttcattcacagaagatgggcagagtggcagatcagaggtaactatcaatgatacaaacttcaaggaaatgatgagatacagaggaccaaagttaaagtcaatgatatatgtgaagcatgatgattttccaagccatacccaaaccctatgagctgtgcatgttatacccagcagtttaatcctggaagactcttggtgcatgttgcagggatgagttagctcagtgtgatgtagttaaagagcagtgggattggggtcaggtgatctggggtctgaacctagttctgtcactccttgtgtatactgggacaagtccatctcccacctgaggtctcagttttaccaactgtcaaaagattgccctaaaagttcatagaccccttcgaaaatctga

SEQ ID NO: 32077 - DNA, 802 bp, Homo sapiens
cttcccagccttccaagtctactgctcgtcctgtgggacccagagatcttcacagtctcaatggcacaagacggaacgttcacttccaggcaacaatcctgcgccacaggactcagttcagcccccaagtatcagactcccggccctgttcttggtgttcagagcccactaaaccagcagtcttgccacacagctttgtctccagaggccagctcatctgctttttttcacactactccagcaaccctgctccaccaagcacgcacactctccttgacacagggctccagaccaaccacatggcctgtgctcctgaaaatgcctgcctgaaggcccagggagtccagacactggcagatgagaatggacgaaaagaagccaagccagaagccaggaagcaataaatgctagacccagaaaggccttaggtttgagtgacccagctccatccctccatcctggatccttggaggacagccccaagttcagcctaggagctcccaaggcccctccactacctgccagctctccgacagcacaagagacacagcaatcccacatcagtcaacaacccaccgccacaggattcctaggggcaaggctctgcccctccccccagcacatatgtcagaggggtggcttccctgggttacacccctcctgctgttgggggagtggggggtcggggaacacagctttccagatgtgcttggcaactcctactagaaaagactaggggtgcgggggacaggagaagacatggataaataactttaacaccgctccaacccatccggctcag

SEQ ID NO: 32078 - DNA, 1869 bp, Homo sapiens
taccccaaggcatactcaactgataatctccagctagatgagtaaaacagtatgtgtttagttttccagagaattctagcaagtttcatattttcttccaagttagtatagaactaactataggaagtatggggttgctttttcctccagtagaatattaaagatgggggagggtgggcaatgtagtgacagaaaatgattctctcagaatgaacttttcagagaaagagcagcataaaccaggtgcacatcatgatttgggagtttttgcgtaatttattctgttatttatttgggctcgccatgtgttctggggttaggatgctgcaggtcattcatcttcttaatgcctgtctggtcttaagccaactgttctttctttcctcgaccctctctgccctgtagctctccccacaaaaatgcatgataccatgaccttacgtgtgggatggggtatgtagtgtagcaaagaaaagaaagtatagttatattgagtcctaagacatttgttagggaaaagcataagagaaaatggggtgggaggtggggaaatgatatttgactttcaaaattgaaataggttttttttttgcagaaattaaatgggatgtttttcattctagaataaaagaatgtgaattctctttgctgctcttgtttaagctaaaagtagtgtttacttgataaggctctctgaccatttaatttttatcagaaaatgtggggatgtcaggaaagtggcttcctgaacgttggggcgggataattgtcctcaaaagtatgatggttaatacatgaaaggaagactttgttggacagtttcgaagatgggcttttaaggagttgggtttttgtggggtacttttttgttttttaagccacaaaatcctcaatatgtttgttttaggatggaagtgaggatttgtatgagactgtcagctattaattttaaggaaatcttaaaatttacatttacatcagtaaatgaagatgacagtgtgtatatatgtgataaatagtgaaacagaaaagacagttctggtattcataacgtgaaagaaaggggttttattctttctgtgtctgtgatttaaaactccgtgaccatgctctgacttttgtatttcaacctgagtttaaacaaataaacaagatattttttaaagaaagcataacatagtgtgtcttagcaaggacatgattcatatggaagcagaatgtgagaagttgtaaggtccttggtactcactgtaaaatcacagacagagaattggtaggggttgtgaatacactagtaccacttaaagttcagtgatacagttcagaaatagggtccttaagtattttgaaagagtttactcttcagtcagcttagatgagagctctctccctgctcccctctaccctctcaaaagttgagagtaaatagaatttggtttgattccagggaggggaaaataagcagagaataggacttttatactttccaataccaggaataaaatgtttgtgatatatatgggtccagcaaacctatcgagataatgtgaatacgataaacttcctaatggcaggatattcactctcaatcctgaagttaccggttcctgcagaattgagcttcagctgttactgttttgaagccgctgtaaattactgctttccccagttcccccactattttttttaagtgggcgggggcgcctgttaagatctaaaatagatatgttggattgatattctcacgtgttcggtgtggaaaacaaaacaagtacatgctttagaagcaacaacaatgaaatccttttgaaatgtgtgttaatatcgtttaataaaataactagtttgaaaggtttgacatttttcttt

SEQ ID NO: 32079 - DNA, 6129 bp, Homo sapiens
  misc_feature (1586)..(1586): n is a, c, g, or t
  misc_feature (2225)..(2225): n is a, c, g, or t
atgctgtaacttctctttctgtttcctttcccatgctatttcatcccctccttccccacctcatttctccaccccttgaccctgggacactagccgggaaccagaggctccagcaggtcatgcacgcggcggatcctctggagatccaggctgacgtgcactggactcatatccgtgagagagaggaggaagagaggatggcgccggcctctgagtcctctgcttccggagccccattggatgagaatgacctagaggaagatgtggactcagaaccagccgagatagaaggggaggcagcagaggatggggacccaggggacactggtgctgagctggatgatgatcagcactggtctgacagcccgtcggatgctgacagagagctgcgtttgccgtgcccagctgagggggaagcagagctggagctgagggtgtcggaagatgaggagaagctgcccgcctcaccgaagcaccaagagagaggtccctcccaagccaccagccccatccggtctccccaggaatcagctcttctgttcattccagtccacagcccctcaacagaggggccccaactcccacctgtccctgccgccacccaggagaaatcacctgaggagcgccttttccctgagcctttgctccccaaagagaagcccaaagctgatgccccctcggatctgaaagctgtgcactctcccatccgatcacagccagtgaccctgccagaagctaggactcctgtctcaccagggagcccgcagccccagccacccgtggcggcctccacgcccccacccagcccactccccatctgctcccagccccagccttccaccgaggccactgtcccatcccctacccagtcccccatacgcttccagcctgccccggccaaaacatccaccccactggcccctctccctgtccaaagccaaagtgacaccaaggacagactgggcagcccccttgctgtggatgaggccctcagacggagcgacctggtggaggagttctggatgaagagtgcggagatccgccgcagcctcgggctcacacctgtggaccgcagcaaggggcccgagcccagcttccccacgcctgccttcaggccagtgtccctcaaatcctattccgttgaaaagtccccccaggatgagggactccaccttctcaagcctctgtccatccccaaaaggctgggcctgccaaagccggaaggcgagccgttgtccctgccaaccccccggtccccgtccgacagagagctacgcagcgcccaggaggagcgcagggagctgtccagcagctctggcctgggcctgcacgggagctcctccaacatgaagacactgggcagccagagcttcaacacctcggactccgccatgctcacgcccccctccagcccgcccccaccgccacccccgggcgaggagcccgccaccttgcggaggaagctcagggaggccgagcccaatgcctcggtggtcccgccgcccttgcccgccacctggatgcggcccccccgggagcctgctcagccccccagagaggaggtgcggaagtcgtttgtggagagngtggaggagattccctttgctgatgatgtggaggacacctatgacgacaagactgaggactcaagcctgcaggagaaattcttcacgcccccgtcctgctggccgcgccccgagaagcctcgccacccgcccctggccaaggagaacgggaggctgcctgctctggaggggacgctgcagccacagaagagggggctgcccttggtgtccgcggaagccaaggagttggccgaggagcgcatgcgagccagggagaagtccgtgaagagccaggcgctgcgggatgccatggccaggcagctgagcaggatgcagcagatggagctggcctcaggcgcccccaggccccgcaaggcgtcctcagcaccctcccagggcaaggagcgccggcctgactcccccacacgccccactctcaggggctccgaggagcccaccctgaagcatgaagccaccagcgaggaggtcctctccccgccgtcggactcagggggcccagatggctctttcacttcatccgagggctccagtgggaagagcaagaagaggtcgtcactcttctccccccgcagaaacaagaaggagaagaagtccaaaggcgagggccggcccccggagaagcccagctccaacctcctngaagaagccgccgccaaacccaagtccctgtggaagtccgtcttctccgggtacaagaaggacaagaagaagaaggccgacgacaagtcctgccccagcaccccctccagcggggccacggtggactctggaaagcacagggtgcttcccgtcgtaagggcagagctgcagctccggcgccagctgagcttctccgaggactcagacctctccagcgacgatgtccttgagaagtcctcacagaagtcccggcgagagccaagaacctacacggaggaggaactgaatgccaagctgacccggcgtgtgcaaaaggcagctcggagacaggccaagcaggaggagcttaagcggctgcatcgagcccagatcatccagcggcagctgcagcaggtggaggagaggcagcggcggctggaggaaaggggcgtggctgtggagaaggcgctccggggcgaagcaggcatgggcaagaaggacgaccccaagctgatgcaggagtggttcaagctagtgcaggagaagaacgccatggtgcgctacgagtcggagctgatgatctttgcccgggagctggagctggaagaccggcagagtcgactgcagcaggagctccgggaacgcatggcagtggaagatcaccttaagactgaggagggctgtcagaagagaagcagattctcaatgagatgctggaggtggtggagcagagagactcactggtggcgctgctggaggagcagcggctccgggagagagaggaggacaaggacctggaggctgccatgctgtccaagggcttcagccttaactggtcctgagctcccacccaacgctccattttctgttggcatccgcctggccaggcagtggcatccaaaccacccggagccgcgatctgaggaggcctggcacctccttggagtttacgctcagatgcccgtgtgctgcttggaaagtggtcgagtcccgcgtgcagtggggagccccaggtgacagtggttatctgagacggctccacctcctgggaggaggcccacctggacctcccactcagaggagcagcacggcgtgtatggcatgacgcaggggaccaccccgcgcgctccctgaggatgtgctggctgtgccccttttttccactggcacatttggtaagagagggaagctgctccccgtcagaaccacagtgcgccgtgcgaggggcactgtcttcttcatgctccctggagcaccaccaaagaaacgtaaacaataccccacgaaagcagggtcaggggtcagggtgcgatcgagacccaggatgggggcgtccagtcatgcccaccccagcatcacaggagacatggaggtgcgggcaggctcctgaattattatgcaaattaggaggacgcaggaggggtctgccctccagccgaacaccacacactggaccctaagtggccaaatgcctgggccgcttgctggctgtggcctgaggcttgtgggttgctgcattttgcttgtagttcacaaccattttgacactggaaaatgctgactttgggggacaggatgaggccctacattctaagcccccagttggcagacaggcattgtccctgttccacatttatgtcgggacaggagatgaccttttcctccgtgtttttcctgtgtttgcacgttgaaatgaagctgacaacctggcaagacgctcagccgcttcaaaccctttttgtcaattaacttattttttaatacttgaaaagaagtaacttcgtttgtgtatctttactagaggaactgatcacctgcgcccgggtgcgggagccacagcggcatctggtgcgtcctacgcgacctggtccggggctgcccggtgctcctcacgtgcatctatttattagcctttctcttcgtatcactggcctggctggcatcagggagctgcccagaacccctgtgtgggtcctcctcacagctttctgtcccctcctccacccggtgcctgcctcaccctggcgctagaccatctggaccactcatgtgatgagggtgcatttccgttctgttttgggccaggccaacagcagagctgccactctcaccctcccagtgagaattccggctctgcagaactcgcccttgtctcagtttgggggccagggcatcaccttcctccgcacatatgttaaagaaggtttcaggatgggccctcatccacacaggccaagagggtgcaaggtgggaccctggaatcatgtggctggtgagaattccctcctcccagcctaagattcacccagacggaaacgcgagtgctgcagtggatgctgggatgcaggctggtgcctctcaagcagatcagcgactcccgcccttccttccgaaggcgacgggcacctgccttgtgccggatcttcatggggacataaagggcgagccccgaatcactagctcctatagccaaactgttcctttctcacggttccgcaccagcctggctgtgtacagctcatcaagccactgagctaatcggggtggggtgcttgtccatcaaagcagtcagcacatagcccagcgaggagccatccggaccagacccgcctgccaggggcgctccagccgcctgccgcctccgtgggctggggccagctgggagcagaggcctggcccctccaaggcgtcccgcagtggagcaggctgagtggctgtgctgaccttgggctttccatgggaaccacactgtgcttcaacttgaacattcatcccagctgcaaaggagcaaagaacctgtgtcatccttgtctgtccagaagctgccatctctctcccatgcacatccgggagataacgccgctagtggccgccacagcgctgattctccacctgttctcacgtgaggcaaaggtctccttttcttttctctttacttaaaaaaggggagaggagggtttctagattccatcttcaaaccccagtcgtcccataaaattggacgtgggaaaagaccttcactgcctgcgtggcctttcccagacctctcctcgaatgccacaaaaccggtccagccccggcagagccgccttcggcccttgtagctcctgctggccccacaacagggaaacagtttgcaaagtggcttggaaggagtgtggcctagggatctgctgtaagtggccagacgtagcaggagagcccagtgtcaccttctggtcctggtcagccttaacactgtggcatcctccacagcacacacggcagcctgcagtctggaaggtggacccgagcctttgcagagaggcgccgcagagccgcaggcctgcgccccagccttctgctcccgactgtgaggacacccagttctagtagagcactttttttaaagctcccattttgtaaccactagtttgcggttgacttgagtactctggtgacttcctgcgtcaagcgttctcaagctgtgagaatgtgcgcagctccaggcaggttttctctcggagagttaagtcttcccttgaaggcagggaagcaggatggatacacatatatcacacgcataaaacaccaggtgcgggagcagcccagactcaaggctgactaaactggaggctgaataccgtggaggtccacatgcagcttccctggagggcaggccggaggcgctcccgcccctgggcttgaggatgctgcaccccgtgggcttccaggcctgcccagatgatgccttcaggcctctgtccctggcggccatcctcaggccgattttgaccagcaatgatagactcttcttaaccctttcaaaataaatttttcagtgggacagaaaggagagttaaaaaacatttttttaaaggtggtaacatctgacccacaaagggaatgggtctgttttatgcaaaataaaagtttttcaaataaa

SEQ ID NO: 32080 - DNA, 492 bp, Homo sapiens
atgctgtaacttctctttctgtttcctttcccatgctatttcatcccctccttccccacctcatttctccaccccttgaccctgggacactagccgggaaccagaggctccagcaggtcatgcacgcggcggatcctctggagatccaggctgacgtgcactggactcatatccgtgagagagaggaggaagagaggatggcgccggcctctgagtcctctgcttccggaggtaaacactcccagccccaggccgcagtgtgccccgagcaccacccgcctgctgcctctgtcgccacagggggcctttctgtcagggcagagccacccatgaggtcacacacgggagccaggcgcatcccgctttgctgctgtcagttgtgacacctgtacttttcatctgaggatatgtaaagttctctgtggattaagaggttgtggactctttctccattgatgcaaaatggtaaaatgaacctgatcttgggtaaac

SEQ ID NO: 32081 - DNA, 6161 bp, Homo sapiens
  misc_feature (1618)..(1618): n is a, c, g, or t
  misc_feature (2257)..(2257): n is a, c, g, or t
caatgcccccaccttcagccgctcttctcttcccacttggcccctagcattgagaaatgcccacctcctgtgtttgggggccccgggccccccccagcacccatgctacgtgtggagagccccctgggcctggcagcatctcccctctcctggggcctgcatggcagcgccctgagaaaggcagtacctctcgcccccgtgaagatgcagcctgtctgtctgtcctccttttcttccttcctttgaacctttctgctttgcagccccattggatgagaatgacctagaggaagatgtggactcagaaccagccgagatagaaggggaggcagcagaggatggggacccaggggacactggtgctgagctggatgatgatcagcactggtctgacagcccgtcggatgctgacagagagctgcgtttgccgtgcccagctgagggggaagcagagctggagctgagggtgtcggaagatgaggagaagctgcccgcctcaccgaagcaccaagagagaggtccctcccaagccaccagccccatccggtctccccaggaatcagctcttctgttcattccagtccacagcccctcaacagaggggccccaactcccacctgtccctgccgccacccaggagaaatcacctgaggagcgccttttccctgagcctttgctccccaaagagaagcccaaagctgatgccccctcggatctgaaagctgtgcactctcccatccgatcacagccagtgaccctgccagaagctaggactcctgtctcaccagggagcccgcagccccagccacccgtggcggcctccacgcccccacccagcccactccccatctgctcccagccccagccttccaccgaggccactgtcccatcccctacccagtcccccatacgcttccagcctgccccggccaaaacatccaccccactggcccctctccctgtccaaagccaaagtgacaccaaggacagactgggcagcccccttgctgtggatgaggccctcagacggagcgacctggtggaggagttctggatgaagagtgcggagatccgccgcagcctcgggctcacacctgtggaccgcagcaaggggcccgagcccagcttccccacgcctgccttcaggccagtgtccctcaaatcctattccgttgaaaagtccccccaggatgagggactccaccttctcaagcctctgtccatccccaaaaggctgggcctgccaaagccggaaggcgagccgttgtccctgccaaccccccggtccccgtccgacagagagctacgcagcgcccaggaggagcgcagggagctgtccagcagctctggcctgggcctgcacgggagctcctccaacatgaagacactgggcagccagagcttcaacacctcggactccgccatgctcacgcccccctccagcccgcccccaccgccacccccgggcgaggagcccgccaccttgcggaggaagctcagggaggccgagcccaatgcctcggtggtcccgccgcccttgcccgccacctggatgcggcccccccgggagcctgctcagccccccagagaggaggtgcggaagtcgtttgtggagagngtggaggagattccctttgctgatgatgtggaggacacctatgacgacaagactgaggactcaagcctgcaggagaaattcttcacgcccccgtcctgctggccgcgccccgagaagcctcgccacccgcccctggccaaggagaacgggaggctgcctgctctggaggggacgctgcagccacagaagagggggctgcccttggtgtccgcggaagccaaggagttggccgaggagcgcatgcgagccagggagaagtccgtgaagagccaggcgctgcgggatgccatggccaggcagctgagcaggatgcagcagatggagctggcctcaggcgcccccaggccccgcaaggcgtcctcagcaccctcccagggcaaggagcgccggcctgactcccccacacgccccactctcaggggctccgaggagcccaccctgaagcatgaagccaccagcgaggaggtcctctccccgccgtcggactcagggggcccagatggctctttcacttcatccgagggctccagtgggaagagcaagaagaggtcgtcactcttctccccccgcagaaacaagaaggagaagaagtccaaaggcgagggccggcccccggagaagcccagctccaacctcctngaagaagccgccgccaaacccaagtccctgtggaagtccgtcttctccgggtacaagaaggacaagaagaagaaggccgacgacaagtcctgccccagcaccccctccagcggggccacggtggactctggaaagcacagggtgcttcccgtcgtaagggcagagctgcagctccggcgccagctgagcttctccgaggactcagacctctccagcgacgatgtccttgagaagtcctcacagaagtcccggcgagagccaagaacctacacggaggaggaactgaatgccaagctgacccggcgtgtgcaaaaggcagctcggagacaggccaagcaggaggagcttaagcggctgcatcgagcccagatcatccagcggcagctgcagcaggtggaggagaggcagcggcggctggaggaaaggggcgtggctgtggagaaggcgctccggggcgaagcaggcatgggcaagaaggacgaccccaagctgatgcaggagtggttcaagctagtgcaggagaagaacgccatggtgcgctacgagtcggagctgatgatctttgcccgggagctggagctggaagaccggcagagtcgactgcagcaggagctccgggaacgcatggcagtggaagatcaccttaagactgaggagggctgtcagaagagaagcagattctcaatgagatgctggaggtggtggagcagagagactcactggtggcgctgctggaggagcagcggctccgggagagagaggaggacaaggacctggaggctgccatgctgtccaagggcttcagccttaactggtcctgagctcccacccaacgctccattttctgttggcatccgcctggccaggcagtggcatccaaaccacccggagccgcgatctgaggaggcctggcacctccttggagtttacgctcagatgcccgtgtgctgcttggaaagtggtcgagtcccgcgtgcagtggggagccccaggtgacagtggttatctgagacggctccacctcctgggaggaggcccacctggacctcccactcagaggagcagcacggcgtgtatggcatgacgcaggggaccaccccgcgcgctccctgaggatgtgctggctgtgccccttttttccactggcacatttggtaagagagggaagctgctccccgtcagaaccacagtgcgccgtgcgaggggcactgtcttcttcatgctccctggagcaccaccaaagaaacgtaaacaataccccacgaaagcagggtcaggggtcagggtgcgatcgagacccaggatgggggcgtccagtcatgcccaccccagcatcacaggagacatggaggtgcgggcaggctcctgaattattatgcaaattaggaggacgcaggaggggtctgccctccagccgaacaccacacactggaccctaagtggccaaatgcctgggccgcttgctggctgtggcctgaggcttgtgggttgctgcattttgcttgtagttcacaaccattttgacactggaaaatgctgactttgggggacaggatgaggccctacattctaagcccccagttggcagacaggcattgtccctgttccacatttatgtcgggacaggagatgaccttttcctccgtgtttttcctgtgtttgcacgttgaaatgaagctgacaacctggcaagacgctcagccgcttcaaaccctttttgtcaattaacttattttttaatacttgaaaagaagtaacttcgtttgtgtatctttactagaggaactgatcacctgcgcccgggtgcgggagccacagcggcatctggtgcgtcctacgcgacctggtccggggctgcccggtgctcctcacgtgcatctatttattagcctttctcttcgtatcactggcctggctggcatcagggagctgcccagaacccctgtgtgggtcctcctcacagctttctgtcccctcctccacccggtgcctgcctcaccctggcgctagaccatctggaccactcatgtgatgagggtgcatttccgttctgttttgggccaggccaacagcagagctgccactctcaccctcccagtgagaattccggctctgcagaactcgcccttgtctcagtttgggggccagggcatcaccttcctccgcacatatgttaaagaaggtttcaggatgggccctcatccacacaggccaagagggtgcaaggtgggaccctggaatcatgtggctggtgagaattccctcctcccagcctaagattcacccagacggaaacgcgagtgctgcagtggatgctgggatgcaggctggtgcctctcaagcagatcagcgactcccgcccttccttccgaaggcgacgggcacctgccttgtgccggatcttcatggggacataaagggcgagccccgaatcactagctcctatagccaaactgttcctttctcacggttccgcaccagcctggctgtgtacagctcatcaagccactgagctaatcggggtggggtgcttgtccatcaaagcagtcagcacatagcccagcgaggagccatccggaccagacccgcctgccaggggcgctccagccgcctgccgcctccgtgggctggggccagctgggagcagaggcctggcccctccaaggcgtcccgcagtggagcaggctgagtggctgtgctgaccttgggctttccatgggaaccacactgtgcttcaacttgaacattcatcccagctgcaaaggagcaaagaacctgtgtcatccttgtctgtccagaagctgccatctctctcccatgcacatccgggagataacgccgctagtggccgccacagcgctgattctccacctgttctcacgtgaggcaaaggtctccttttcttttctctttacttaaaaaaggggagaggagggtttctagattccatcttcaaaccccagtcgtcccataaaattggacgtgggaaaagaccttcactgcctgcgtggcctttcccagacctctcctcgaatgccacaaaaccggtccagccccggcagagccgccttcggcccttgtagctcctgctggccccacaacagggaaacagtttgcaaagtggcttggaaggagtgtggcctagggatctgctgtaagtggccagacgtagcaggagagcccagtgtcaccttctggtcctggtcagccttaacactgtggcatcctccacagcacacacggcagcctgcagtctggaaggtggacccgagcctttgcagagaggcgccgcagagccgcaggcctgcgccccagccttctgctcccgactgtgaggacacccagttctagtagagcactttttttaaagctcccattttgtaaccactagtttgcggttgacttgagtactctggtgacttcctgcgtcaagcgttctcaagctgtgagaatgtgcgcagctccaggcaggttttctctcggagagttaagtcttcccttgaaggcagggaagcaggatggatacacatatatcacacgcataaaacaccaggtgcgggagcagcccagactcaaggctgactaaactggaggctgaataccgtggaggtccacatgcagcttccctggagggcaggccggaggcgctcccgcccctgggcttgaggatgctgcaccccgtgggcttccaggcctgcccagatgatgccttcaggcctctgtccctggcggccatcctcaggccgattttgaccagcaatgatagactcttcttaaccctttcaaaataaatttttcagtgggacagaaaggagagttaaaaaacatttttttaaaggtggtaacatctgacccacaaagggaatgggtctgttttatgcaaaataaaagtttttcaaataaa

SEQ ID NO: 32082 - DNA, 5982 bp, Homo sapiens
  misc_feature (1439)..(1439): n is a, c, g, or t
  misc_feature (2078)..(2078): n is a, c, g, or t
caggagggtgctcttggccgggcccctcaggagcgggggtggtctggtaggcaggtctgtccctgcgtaagaagggcctccaggcctgcacctgagcagctgtgttgcaaatgagcaagtggcgcggctgctctcaggtggaaaaggagttggcctcacttagggtgtgcacccacttctgccccttccctctgccagatcagcactggtctgacagcccgtcggatgctgacagagagctgcgtttgccgtgcccagctgagggggaagcagagctggagctgagggtgtcggaagatgaggagaagctgcccgcctcaccgaagcaccaagagagaggtccctcccaagccaccagccccatccggtctccccaggaatcagctcttctgttcattccagtccacagcccctcaacagaggggccccaactcccacctgtccctgccgccacccaggagaaatcacctgaggagcgccttttccctgagcctttgctccccaaagagaagcccaaagctgatgccccctcggatctgaaagctgtgcactctcccatccgatcacagccagtgaccctgccagaagctaggactcctgtctcaccagggagcccgcagccccagccacccgtggcggcctccacgcccccacccagcccactccccatctgctcccagccccagccttccaccgaggccactgtcccatcccctacccagtcccccatacgcttccagcctgccccggccaaaacatccaccccactggcccctctccctgtccaaagccaaagtgacaccaaggacagactgggcagcccccttgctgtggatgaggccctcagacggagcgacctggtggaggagttctggatgaagagtgcggagatccgccgcagcctcgggctcacacctgtggaccgcagcaaggggcccgagcccagcttccccacgcctgccttcaggccagtgtccctcaaatcctattccgttgaaaagtccccccaggatgagggactccaccttctcaagcctctgtccatccccaaaaggctgggcctgccaaagccggaaggcgagccgttgtccctgccaaccccccggtccccgtccgacagagagctacgcagcgcccaggaggagcgcagggagctgtccagcagctctggcctgggcctgcacgggagctcctccaacatgaagacactgggcagccagagcttcaacacctcggactccgccatgctcacgcccccctccagcccgcccccaccgccacccccgggcgaggagcccgccaccttgcggaggaagctcagggaggccgagcccaatgcctcggtggtcccgccgcccttgcccgccacctggatgcggcccccccgggagcctgctcagccccccagagaggaggtgcggaagtcgtttgtggagagngtggaggagattccctttgctgatgatgtggaggacacctatgacgacaagactgaggactcaagcctgcaggagaaattcttcacgcccccgtcctgctggccgcgccccgagaagcctcgccacccgcccctggccaaggagaacgggaggctgcctgctctggaggggacgctgcagccacagaagagggggctgcccttggtgtccgcggaagccaaggagttggccgaggagcgcatgcgagccagggagaagtccgtgaagagccaggcgctgcgggatgccatggccaggcagctgagcaggatgcagcagatggagctggcctcaggcgcccccaggccccgcaaggcgtcctcagcaccctcccagggcaaggagcgccggcctgactcccccacacgccccactctcaggggctccgaggagcccaccctgaagcatgaagccaccagcgaggaggtcctctccccgccgtcggactcagggggcccagatggctctttcacttcatccgagggctccagtgggaagagcaagaagaggtcgtcactcttctccccccgcagaaacaagaaggagaagaagtccaaaggcgagggccggcccccggagaagcccagctccaacctcctngaagaagccgccgccaaacccaagtccctgtggaagtccgtcttctccgggtacaagaaggacaagaagaagaaggccgacgacaagtcctgccccagcaccccctccagcggggccacggtggactctggaaagcacagggtgcttcccgtcgtaagggcagagctgcagctccggcgccagctgagcttctccgaggactcagacctctccagcgacgatgtccttgagaagtcctcacagaagtcccggcgagagccaagaacctacacggaggaggaactgaatgccaagctgacccggcgtgtgcaaaaggcagctcggagacaggccaagcaggaggagcttaagcggctgcatcgagcccagatcatccagcggcagctgcagcaggtggaggagaggcagcggcggctggaggaaaggggcgtggctgtggagaaggcgctccggggcgaagcaggcatgggcaagaaggacgaccccaagctgatgcaggagtggttcaagctagtgcaggagaagaacgccatggtgcgctacgagtcggagctgatgatctttgcccgggagctggagctggaagaccggcagagtcgactgcagcaggagctccgggaacgcatggcagtggaagatcaccttaagactgaggagggctgtcagaagagaagcagattctcaatgagatgctggaggtggtggagcagagagactcactggtggcgctgctggaggagcagcggctccgggagagagaggaggacaaggacctggaggctgccatgctgtccaagggcttcagccttaactggtcctgagctcccacccaacgctccattttctgttggcatccgcctggccaggcagtggcatccaaaccacccggagccgcgatctgaggaggcctggcacctccttggagtttacgctcagatgcccgtgtgctgcttggaaagtggtcgagtcccgcgtgcagtggggagccccaggtgacagtggttatctgagacggctccacctcctgggaggaggcccacctggacctcccactcagaggagcagcacggcgtgtatggcatgacgcaggggaccaccccgcgcgctccctgaggatgtgctggctgtgccccttttttccactggcacatttggtaagagagggaagctgctccccgtcagaaccacagtgcgccgtgcgaggggcactgtcttcttcatgctccctggagcaccaccaaagaaacgtaaacaataccccacgaaagcagggtcaggggtcagggtgcgatcgagacccaggatgggggcgtccagtcatgcccaccccagcatcacaggagacatggaggtgcgggcaggctcctgaattattatgcaaattaggaggacgcaggaggggtctgccctccagccgaacaccacacactggaccctaagtggccaaatgcctgggccgcttgctggctgtggcctgaggcttgtgggttgctgcattttgcttgtagttcacaaccattttgacactggaaaatgctgactttgggggacaggatgaggccctacattctaagcccccagttggcagacaggcattgtccctgttccacatttatgtcgggacaggagatgaccttttcctccgtgtttttcctgtgtttgcacgttgaaatgaagctgacaacctggcaagacgctcagccgcttcaaaccctttttgtcaattaacttattttttaatacttgaaaagaagtaacttcgtttgtgtatctttactagaggaactgatcacctgcgcccgggtgcgggagccacagcggcatctggtgcgtcctacgcgacctggtccggggctgcccggtgctcctcacgtgcatctatttattagcctttctcttcgtatcactggcctggctggcatcagggagctgcccagaacccctgtgtgggtcctcctcacagctttctgtcccctcctccacccggtgcctgcctcaccctggcgctagaccatctggaccactcatgtgatgagggtgcatttccgttctgttttgggccaggccaacagcagagctgccactctcaccctcccagtgagaattccggctctgcagaactcgcccttgtctcagtttgggggccagggcatcaccttcctccgcacatatgttaaagaaggtttcaggatgggccctcatccacacaggccaagagggtgcaaggtgggaccctggaatcatgtggctggtgagaattccctcctcccagcctaagattcacccagacggaaacgcgagtgctgcagtggatgctgggatgcaggctggtgcctctcaagcagatcagcgactcccgcccttccttccgaaggcgacgggcacctgccttgtgccggatcttcatggggacataaagggcgagccccgaatcactagctcctatagccaaactgttcctttctcacggttccgcaccagcctggctgtgtacagctcatcaagccactgagctaatcggggtggggtgcttgtccatcaaagcagtcagcacatagcccagcgaggagccatccggaccagacccgcctgccaggggcgctccagccgcctgccgcctccgtgggctggggccagctgggagcagaggcctggcccctccaaggcgtcccgcagtggagcaggctgagtggctgtgctgaccttgggctttccatgggaaccacactgtgcttcaacttgaacattcatcccagctgcaaaggagcaaagaacctgtgtcatccttgtctgtccagaagctgccatctctctcccatgcacatccgggagataacgccgctagtggccgccacagcgctgattctccacctgttctcacgtgaggcaaaggtctccttttcttttctctttacttaaaaaaggggagaggagggtttctagattccatcttcaaaccccagtcgtcccataaaattggacgtgggaaaagaccttcactgcctgcgtggcctttcccagacctctcctcgaatgccacaaaaccggtccagccccggcagagccgccttcggcccttgtagctcctgctggccccacaacagggaaacagtttgcaaagtggcttggaaggagtgtggcctagggatctgctgtaagtggccagacgtagcaggagagcccagtgtcaccttctggtcctggtcagccttaacactgtggcatcctccacagcacacacggcagcctgcagtctggaaggtggacccgagcctttgcagagaggcgccgcagagccgcaggcctgcgccccagccttctgctcccgactgtgaggacacccagttctagtagagcactttttttaaagctcccattttgtaaccactagtttgcggttgacttgagtactctggtgacttcctgcgtcaagcgttctcaagctgtgagaatgtgcgcagctccaggcaggttttctctcggagagttaagtcttcccttgaaggcagggaagcaggatggatacacatatatcacacgcataaaacaccaggtgcgggagcagcccagactcaaggctgactaaactggaggctgaataccgtggaggtccacatgcagcttccctggagggcaggccggaggcgctcccgcccctgggcttgaggatgctgcaccccgtgggcttccaggcctgcccagatgatgccttcaggcctctgtccctggcggccatcctcaggccgattttgaccagcaatgatagactcttcttaaccctttcaaaataaatttttcagtgggacagaaaggagagttaaaaaacatttttttaaaggtggtaacatctgacccacaaagggaatgggtctgttttatgcaaaataaaagtttttcaaataaa

SEQ ID NO: 32083 - DNA, 6182 bp, Homo sapiens
  misc_feature (1618)..(1618): n is a, c, g, or t
  misc_feature (2257)..(2257): n is a, c, g, or t
caatgcccccaccttcagccgctcttctcttcccacttggcccctagcattgagaaatgcccacctcctgtgtttgggggccccgggccccccccagcacccatgctacgtgtggagagccccctgggcctggcagcatctcccctctcctggggcctgcatggcagcgccctgagaaaggcagtacctctcgcccccgtgaagatgcagcctgtctgtctgtcctccttttcttccttcctttgaacctttctgctttgcagccccattggatgagaatgacctagaggaagatgtggactcagaaccagccgagatagaaggggaggcagcagaggatggggacccaggggacactggtgctgagctggatgatgatcagcactggtctgacagcccgtcggatgctgacagagagctgcgtttgccgtgcccagctgagggggaagcagagctggagctgagggtgtcggaagatgaggagaagctgcccgcctcaccgaagcaccaagagagaggtccctcccaagccaccagccccatccggtctccccaggaatcagctcttctgttcattccagtccacagcccctcaacagaggggccccaactcccacctgtccctgccgccacccaggagaaatcacctgaggagcgccttttccctgagcctttgctccccaaagagaagcccaaagctgatgccccctcggatctgaaagctgtgcactctcccatccgatcacagccagtgaccctgccagaagctaggactcctgtctcaccagggagcccgcagccccagccacccgtggcggcctccacgcccccacccagcccactccccatctgctcccagccccagccttccaccgaggccactgtcccatcccctacccagtcccccatacgcttccagcctgccccggccaaaacatccaccccactggcccctctccctgtccaaagccaaagtgacaccaaggacagactgggcagcccccttgctgtggatgaggccctcagacggagcgacctggtggaggagttctggatgaagagtgcggagatccgccgcagcctcgggctcacacctgtggaccgcagcaaggggcccgagcccagcttccccacgcctgccttcaggccagtgtccctcaaatcctattccgttgaaaagtccccccaggatgagggactccaccttctcaagcctctgtccatccccaaaaggctgggcctgccaaagccggaaggcgagccgttgtccctgccaaccccccggtccccgtccgacagagagctacgcagcgcccaggaggagcgcagggagctgtccagcagctctggcctgggcctgcacgggagctcctccaacatgaagacactgggcagccagagcttcaacacctcggactccgccatgctcacgcccccctccagcccgcccccaccgccacccccgggcgaggagcccgccaccttgcggaggaagctcagggaggccgagcccaatgcctcggtggtcccgccgcccttgcccgccacctggatgcggcccccccgggagcctgctcagccccccagagaggaggtgcggaagtcgtttgtggagagngtggaggagattccctttgctgatgatgtggaggacacctatgacgacaagactgaggactcaagcctgcaggagaaattcttcacgcccccgtcctgctggccgcgccccgagaagcctcgccacccgcccctggccaaggagaacgggaggctgcctgctctggaggggacgctgcagccacagaagagggggctgcccttggtgtccgcggaagccaaggagttggccgaggagcgcatgcgagccagggagaagtccgtgaagagccaggcgctgcgggatgccatggccaggcagctgagcaggatgcagcagatggagctggcctcaggcgcccccaggccccgcaaggcgtcctcagcaccctcccagggcaaggagcgccggcctgactcccccacacgccccactctcaggggctccgaggagcccaccctgaagcatgaagccaccagcgaggaggtcctctccccgccgtcggactcagggggcccagatggctctttcacttcatccgagggctccagtgggaagagcaagaagaggtcgtcactcttctccccccgcagaaacaagaaggagaagaagtccaaaggcgagggccggcccccggagaagcccagctccaacctcctngaagaagccgccgccaaacccaagtccctgtggaagtccgtcttctccgggtacaagaaggacaagaagaagaaggccgacgacaagtcctgccccagcaccccctccagcggggccacggtggactctggaaagcacagggtgcttcccgtcgtaagggcagagctgcagctccggcgccagctgagcttctccgaggactcagacctctccagcgacgatgtccttgagaagtcctcacagaagtcccggcgagagccaagaacctacacggaggaggaactgaatgccaagctgacccggcgtgtgcaaaaggcagctcggagacaggccaagcaggaggagcttaagcggctgcatcgagcccagatcatccagcggcagctgcagcaggtggaggagaggcagcggcggctggaggaaaggggcgtggctgtggagaaggcgctccggggcgaagcaggcatgggcaagaaggacgaccccaagctgatgcaggagtggttcaagctagtgcaggagaagaacgccatggtgcgctacgagtcggagctgatgatctttgcccgggagctggagctggaagaccggcagagtcgactgcagcaggagctccgggaacgcatggcagtggaagatcaccttaagactgaggagggctgtcagaagagaagcagattctcaatgagatgctggaggtggtggagcagagagactcactggtggcgctgctggaggagcagcggctccgggagagagaggaggacaaggacctggaggctgccatgctgtccaagggcttcagccttaactggtcctgagctcccacccaacgctccattttctgttggcatccgcctggccaggcagtggcatccaaaccacccggagccgcgatctgaggaggcctggcacctccttggagtttacgctcagatgcccgtgtgctgcttggaaagtggtcgagtcccgcgtgcagtggggagccccaggtgacagtggttatctgagacggctccacctcctgggaggaggcccacctggacctcccactcagaggagcagcacggcgtgtatggcatgacgcaggggaccaccccgcgcgctccctgaggatgtgctggctgtgccccttttttccactggcacatttggtaagagagggaagctgctccccgtcagaaccacagtgcgccgtgcgaggggcactgtcttcttcatgctccctggagcaccaccaaagaaacgtaaacaataccccacgaaagcagggtcaggggtcagggtgcgatcgagacccaggatgggggcgtccagtcatgcccaccccagcatcacaggagacatggaggtgcgggcaggctcctgaattattatgcaaattaggaggacgcaggaggggtctgccctccagccgaacaccacacactggaccctaagtggccaaatgcctgggccgcttgctggctgtggcctgaggcttgtgggttgctgcattttgcttgtagttcacaaccattttgacactggaaaatgctgactttgggggacaggatgaggccctacattctaagcccccagttggcagacaggcattgtccctgttccacatttatgtcgggacaggagatgaccttttcctccgtgtttttcctgtgtttgcacgttgaaatgaagctgacaacctggcaagacgctcagccgcttcaaaccctttttgtcaattaacttattttttaatacttgaaaagaagtaacttcgtttgtgtatctttactagaggaactgatcacctgcgcccgggtgcgggagccacagcggcatctggtgcgtcctacgcgacctggtccggggctgcccggtgctcctcacgtgcatctatttattagcctttctcttcgtatcactggcctggctggcatcagggagctgcccagaacccctgtgtgggtcctcctcacagctttctgtcccctcctccacccggtgcctgcctcaccctggcgctagaccatctggaccactcatgtgatgagggtgcatttccgttctgttttgggccaggccaacagcagagctgccactctcaccctcccagtgagaattccggctctgcagaactcgcccttgtctcagtttgggggccagggcatcaccttcctccgcacatatgttaaagaaggtttcaggatgggccctcatccacacaggccaagagggtgcaaggtgggaccctggaatcatgtggctggtgagaattccctcctcccagcctaagattcacccagacggaaacgcgagtgctgcagtggatgctgggatgcaggctggtgcctctcaagcagatcagcgactcccgcccttccttccgaaggcgacgggcacctgccttgtgccggatcttcatggggacataaagggcgagccccgaatcactagctcctatagccaaactgttcctttctcacggttccgcaccagcctggctgtgtacagctcatcaagccactgagctaatcggggtggggtgcttgtccatcaaagcagtcagcacatagcccagcgaggagccatccggaccagacccgcctgccaggggcgctccagccgcctgccgcctccgtgggctggggccagctgggagcagaggcctggcccctccaaggcgtcccgcagtggagcaggctgagtggctgtgctgaccttgggctttccatgggaaccacactgtgcttcaacttgaacattcatcccagctgcaaaggagcaaagaacctgtgtcatccttgtctgtccagaagctgccatctctctcccatgcacatccgggagataacgccgctagtggccgccacagcgctgattctccacctgttctcacgtgaggcaaaggtctccttttcttttctctttacttaaaaaaggggagaggagggtttctagattccatcttcaaaccccagtcgtcccataaaattggacgtgggaaaagaccttcactgcctgcgtggcctttcccagacctctcctcgaatgccacaaaaccggtccagccccggcagagccgccttcggcccttgtagctcctgctggccccacaacagggaaacagtttgcaaagtggcttggaaggagtgtggcctagggatctgctgtaagtggccagacgtagcaggagagcccagtgtcaccttctggtcctggtcagccttaacactgtggcatcctccacagcacacacggcagcctgcagtctggaaggtggacccgagcctttgcagagaggcgccgcagagccgcaggcctgcgccccagccttctgctcccgactgtgaggacacccagttctagtagagcactttttttaaagctcccattttgtaaccactagtttgcggttgacttgagtactctggtgacttcctgcgtcaagcgttctcaagctgtgagaatgtgcgcagctccaggcaggttttctctcggagagttaagtcttcccttgaaggcagggaagcaggatggatacacatatatcacacgcataaaacaccaggtgcgggagcagcccagactcaaggctgactaaactggaggctgaataccgtggaggtccacatgcagcttccctggagggcaggccggaggcgctcccgcccctgggcttgaggatgctgcaccccgtgggcttccaggcctgcccagatgatgccttcaggcctctgtccctggcggccatcctcaggccgattttgaccagcaatgatagactcttcttaaccctttcaaaataaatttttcagtgggacagaaaggagagttaaaaaacatttttttaaaggtggtaacatctgacccacaaagggaatgggtctgttttatgcaaaataaaagtttttcaaataaaaaaaacctcgtgccgaattct

SEQ ID NO: 32084 - DNA, 6025 bp, Homo sapiens
  misc_feature (1618)..(1618): n is a, c, g, or t
  misc_feature (2257)..(2257): n is a, c, g, or t
caatgcccccaccttcagccgctcttctcttcccacttggcccctagcattgagaaatgcccacctcctgtgtttgggggccccgggccccccccagcacccatgctacgtgtggagagccccctgggcctggcagcatctcccctctcctggggcctgcatggcagcgccctgagaaaggcagtacctctcgcccccgtgaagatgcagcctgtctgtctgtcctccttttcttccttcctttgaacctttctgctttgcagccccattggatgagaatgacctagaggaagatgtggactcagaaccagccgagatagaaggggaggcagcagaggatggggacccaggggacactggtgctgagctggatgatgatcagcactggtctgacagcccgtcggatgctgacagagagctgcgtttgccgtgcccagctgagggggaagcagagctggagctgagggtgtcggaagatgaggagaagctgcccgcctcaccgaagcaccaagagagaggtccctcccaagccaccagccccatccggtctccccaggaatcagctcttctgttcattccagtccacagcccctcaacagaggggccccaactcccacctgtccctgccgccacccaggagaaatcacctgaggagcgccttttccctgagcctttgctccccaaagagaagcccaaagctgatgccccctcggatctgaaagctgtgcactctcccatccgatcacagccagtgaccctgccagaagctaggactcctgtctcaccagggagcccgcagccccagccacccgtggcggcctccacgcccccacccagcccactccccatctgctcccagccccagccttccaccgaggccactgtcccatcccctacccagtcccccatacgcttccagcctgccccggccaaaacatccaccccactggcccctctccctgtccaaagccaaagtgacaccaaggacagactgggcagcccccttgctgtggatgaggccctcagacggagcgacctggtggaggagttctggatgaagagtgcggagatccgccgcagcctcgggctcacacctgtggaccgcagcaaggggcccgagcccagcttccccacgcctgccttcaggccagtgtccctcaaatcctattccgttgaaaagtccccccaggatgagggactccaccttctcaagcctctgtccatccccaaaaggctgggcctgccaaagccggaaggcgagccgttgtccctgccaaccccccggtccccgtccgacagagagctacgcagcgcccaggaggagcgcagggagctgtccagcagctctggcctgggcctgcacgggagctcctccaacatgaagacactgggcagccagagcttcaacacctcggactccgccatgctcacgcccccctccagcccgcccccaccgccacccccgggcgaggagcccgccaccttgcggaggaagctcagggaggccgagcccaatgcctcggtggtcccgccgcccttgcccgccacctggatgcggcccccccgggagcctgctcagccccccagagaggaggtgcggaagtcgtttgtggagagngtggaggagattccctttgctgatgatgtggaggacacctatgacgacaagactgaggactcaagcctgcaggagaaattcttcacgcccccgtcctgctggccgcgccccgagaagcctcgccacccgcccctggccaaggagaacgggaggctgcctgctctggaggggacgctgcagccacagaagagggggctgcccttggtgtccgcggaagccaaggagttggccgaggagcgcatgcgagccagggagaagtccgtgaagagccaggcgctgcgggatgccatggccaggcagctgagcaggatgcagcagatggagctggcctcaggcgcccccaggccccgcaaggcgtcctcagcaccctcccagggcaaggagcgccggcctgactcccccacacgccccactctcaggggctccgaggagcccaccctgaagcatgaagccaccagcgaggaggtcctctccccgccgtcggactcagggggcccagatggctctttcacttcatccgagggctccagtgggaagagcaagaagaggtcgtcactcttctccccccgcagaaacaagaaggagaagaagtccaaaggcgagggccggcccccggagaagcccagctccaacctcctngaagaagccgccgccaaacccaagtccctgtggaagtccgtcttctccgggtacaagaaggacaagaagaagaaggccgacgacaagtcctgccccagcaccccctccagcggggccacggtggactctggaaagcacagggtgcttcccgtcgtaagggcagagctgcagctccggcgccagctgagcttctccgaggactcagacctctccagcgacgatgtccttgagaagtcctcacagaagtcccggcgagagccaagaacctacacggaggaggaactgaatgccaagctgacccggcgtgtgcaaaaggcagctcggagacaggccaagcaggaggagcttaagcggctgcatcgagcccagatcatccagcggcagctgcagcaggtggaggagaggcagcggcggctggaggaaaggggcgtggctgtggagaaggcgctccggggcgaagcaggcatgggcaagaaggacgaccccaagctgatgcaggagtggttcaagctagtgcaggagaagaacgccatggtgcgctacgagtcggagctgatgatctttgcccgggagctggagctggaagaccggcagagtcgactgcagcaggagctccgggaacgcatggcagtggaagatcaccttaagactgaggagggctgtcagaagagaagcagattctcaatgagatgctggaggtggtggagcagagagactcactggtggcgctgctggaggagcagcggctccgggagagagaggaggacaaggacctggaggctgccatgctgtccaagggcttcagccttaactggtcctgagctcccacccaacgctccattttctgttggcatccgcctggccaggcagtggcatccaaaccacccggagccgcgatctgaggaggcctggcacctccttggagtttacgctcagatgcccgtgtgctgcttggaaagtggtcgagtcccgcgtgcagtggggagccccaggtgacagtggttatctgagacggctccacctcctgggaggaggcccacctggacctcccactcagaggagcagcacggcgtgtatggcatgacgcaggggaccaccccgcgcgctccctgaggatgtgctggctgtgccccttttttccactggcacatttggtaagagagggaagctgctccccgtcagaaccacagtgcgccgtgcgaggggcactgtcttcttcatgctccctggagcaccaccaaagaaacgtaaacaataccccacgaaagcagggtcaggggtcagggtgcgatcgagacccaggatgggggcgtccagtcatgcccaccccagcatcacaggagacatggaggtgcgggcaggctcctgaattattatgcaaattaggaggacgcaggaggggtctgccctccagccgaacaccacacactggaccctaagtggccaaatgcctgggccgcttgctggctgtggcctgaggcttgtgggttgctgcattttgcttgtagttcacaaccattttgacactggaaaatgctgactttgggggacaggatgaggccctacattctaagcccccagttggcagacaggcattgtccctgttccacatttatgtcgggacaggagatgaccttttcctccgtgtttttcctgtgtttgcacgttgaaatgaagctgacaacctggcaagacgctcagccgcttcaaaccctttttgtcaattaacttattttttaatacttgaaaagaagtaacttcgtttgtgtatctttactagaggaactgatcacctgcgcccgggtgcgggagccacagcggcatctggtgcgtcctacgcgacctggtccggggctgcccggtgctcctcacgtgcatctatttattagcctttctcttcgtatcactggcctggctggcatcagggagctgcccagaacccctgtgtgggtcctcctcacagctttctgtcccctcctccacccggtgcctgcctcaccctggcgctagaccatctggaccactcatgtgatgagggtgcatttccgttctgttttgggccaggccaacagcagagctgccactctcaccctcccagtgagaattccggctctgcagaactcgcccttgtctcagtttgggggccagggcatcaccttcctccgcacatatgttaaagaaggtttcaggatgggccctcatccacacaggccaagagggtgcaaggtgggaccctggaatcatgtggctggtgagaattccctcctcccagcctaagattcacccagacggaaacgcgagtgctgcagtggatgctgggatgcaggctggtgcctctcaagcagatcagcgactcccgcccttccttccgaaggcgacgggcacctgccttgtgccggatcttcatggggacataaagggcgagccccgaatcactagctcctatagccaaactgttcctttctcacggttccgcaccagcctggctgtgtacagctcatcaagccactgagctaatcggggtggggtgcttgtccatcaaagcagtcagcacatagcccagcgaggagccatccggaccagacccgcctgccaggggcgctccagccgcctgccgcctccgtgggctggggccagctgggagcagaggcctggcccctccaaggcgtcccgcagtggagcaggctgagtggctgtgctgaccttgggctttccatgggaaccacactgtgcttcaacttgaacattcatcccagctgcaaaggagcaaagaacctgtgtcatccttgtctgtccagaagctgccatctctctcccatgcacatccgggagataacgccgctagtggccgccacagcgctgattctccacctgttctcacgtgaggcaaaggtctccttttcttttctctttacttaaaaaaggggagaggagggtttctagattccatcttcaaaccccagtcgtcccataaaattggacgtgggaaaagaccttcactgcctgcgtggcctttcccagacctctcctcgaatgccacaaaaccggtccagccccggcagagccgccttcggcccttgtagctcctgctggccccacaacagggaaacagtttgcaaagtggcttggaaggagtgtggcctagggatctgctgtaagtggccagacgtagcaggagagcccagtgtcaccttctggtcctggtcagccttaacactgtggcatcctccacagcacacacggcagcctgcagtctggaaggtggacccgagcctttgcagagaggcgccgcagagccgcaggcctgcgccccagccttctgctcccgactgtgaggacacccagttctagtagagcactttttttaaagctcccattttgtaaccactagtttgcggttgacttgagtactctggtgacttcctgcgtcaagcgttctcaagctgtgagaatgtgcgcagctccaggcaggttttctctcggagagttaagtcttcccttgaaggcagggaagcaggatggatacacatatatcacacgccccgtgggcttccaggcctgcccagatgatgccttcaggcctctgtccctggcggccatcctcaggccgattttgaccagcaatgatagactcttcttaaccctttcaaaataaatttttcagtgggacagaaaggagagttaaaaaacatttttttaaaggtggtaacatctgacccacaaagggaatgggtctgttttatgcaaaataaaagtttttcaaataaa

SEQ ID NO: 32085 - DNA, 4344 bp, Homo sapiens
  misc_feature (1618)..(1618): n is a, c, g, or t
  misc_feature (2257)..(2257): n is a, c, g, or t
caatgcccccaccttcagccgctcttctcttcccacttggcccctagcattgagaaatgcccacctcctgtgtttgggggccccgggccccccccagcacccatgctacgtgtggagagccccctgggcctggcagcatctcccctctcctggggcctgcatggcagcgccctgagaaaggcagtacctctcgcccccgtgaagatgcagcctgtctgtctgtcctccttttcttccttcctttgaacctttctgctttgcagccccattggatgagaatgacctagaggaagatgtggactcagaaccagccgagatagaaggggaggcagcagaggatggggacccaggggacactggtgctgagctggatgatgatcagcactggtctgacagcccgtcggatgctgacagagagctgcgtttgccgtgcccagctgagggggaagcagagctggagctgagggtgtcggaagatgaggagaagctgcccgcctcaccgaagcaccaagagagaggtccctcccaagccaccagccccatccggtctccccaggaatcagctcttctgttcattccagtccacagcccctcaacagaggggccccaactcccacctgtccctgccgccacccaggagaaatcacctgaggagcgccttttccctgagcctttgctccccaaagagaagcccaaagctgatgccccctcggatctgaaagctgtgcactctcccatccgatcacagccagtgaccctgccagaagctaggactcctgtctcaccagggagcccgcagccccagccacccgtggcggcctccacgcccccacccagcccactccccatctgctcccagccccagccttccaccgaggccactgtcccatcccctacccagtcccccatacgcttccagcctgccccggccaaaacatccaccccactggcccctctccctgtccaaagccaaagtgacaccaaggacagactgggcagcccccttgctgtggatgaggccctcagacggagcgacctggtggaggagttctggatgaagagtgcggagatccgccgcagcctcgggctcacacctgtggaccgcagcaaggggcccgagcccagcttccccacgcctgccttcaggccagtgtccctcaaatcctattccgttgaaaagtccccccaggatgagggactccaccttctcaagcctctgtccatccccaaaaggctgggcctgccaaagccggaaggcgagccgttgtccctgccaaccccccggtccccgtccgacagagagctacgcagcgcccaggaggagcgcagggagctgtccagcagctctggcctgggcctgcacgggagctcctccaacatgaagacactgggcagccagagcttcaacacctcggactccgccatgctcacgcccccctccagcccgcccccaccgccacccccgggcgaggagcccgccaccttgcggaggaagctcagggaggccgagcccaatgcctcggtggtcccgccgcccttgcccgccacctggatgcggcccccccgggagcctgctcagccccccagagaggaggtgcggaagtcgtttgtggagagngtggaggagattccctttgctgatgatgtggaggacacctatgacgacaagactgaggactcaagcctgcaggagaaattcttcacgcccccgtcctgctggccgcgccccgagaagcctcgccacccgcccctggccaaggagaacgggaggctgcctgctctggaggggacgctgcagccacagaagagggggctgcccttggtgtccgcggaagccaaggagttggccgaggagcgcatgcgagccagggagaagtccgtgaagagccaggcgctgcgggatgccatggccaggcagctgagcaggatgcagcagatggagctggcctcaggcgcccccaggccccgcaaggcgtcctcagcaccctcccagggcaaggagcgccggcctgactcccccacacgccccactctcaggggctccgaggagcccaccctgaagcatgaagccaccagcgaggaggtcctctccccgccgtcggactcagggggcccagatggctctttcacttcatccgagggctccagtgggaagagcaagaagaggtcgtcactcttctccccccgcagaaacaagaaggagaagaagtccaaaggcgagggccggcccccggagaagcccagctccaacctcctngaagaagccgccgccaaacccaagtccctgtggaagtccgtcttctccgggtacaagaaggacaagaagaagaaggccgacgacaagtcctgccccagcaccccctccagcggggccacggtggactctggaaagcacagggtgcttcccgtcgtaagggcagagctgcagctccggcgccagctgagcttctccgaggactcagacctctccagcgacgatgtccttgagaagtcctcacagaagtcccggcgagagccaagaacctacacggaggaggaactgaatgccaagctgacccggcgtgtgcaaaaggcagctcggagacaggccaagcaggaggagcttaagcggctgcatcgagcccagatcatccagcggcagctgcagcaggtggaggagaggcagcggcggctggaggaaaggggcgtggctgtggagaaggcgctccggggcgaagcaggcatgggcaagaaggacgaccccaagctgatgcaggagtggttcaagctagtgcaggagaagaacgccatggtgcgctacgagtcggagctgatgatctttgcccgggagctggagctggaagaccggcagagtcgactgcagcaggagctccgggaacgcatggcagtggaagatcaccttaagactgaggagggctgtcagaagagaagcagattctcaatgagatgctggaggtggtggagcagagagactcactggtggcgctgctggaggagcagcggctccgggagagagaggaggacaaggacctggaggctgccatgctgtccaagggcttcagccttaactggtcctgagctcccacccaacgctccattttctgttggcatccgcctggccaggcagtggcatccaaaccacccggagccgcgatctgaggaggcctggcacctccttggagtttacgctcagatgcccgtgtgctgcttggaaagtggtcgagtcccgcgtgcagtggggagccccaggtgacagtggttatctgagacggctccacctcctgggaggaggcccacctggacctcccactcagaggagcagcacggcgtgtatggcatgacgcaggggaccaccccgcgcgctccctgaggatgtgctggctgtgccccttttttccactggcacatttggtaagagagggaagctgctccccgtcagaaccacagtgcgccgtgcgaggggcactgtcttcttcatgctccctggagcaccaccaaagaaacgtaaacaataccccacgaaagcagggtcaggggtcagggtgcgatcgagacccaggatgggggcgtccagtcatgcccaccccagcatcacaggagacatggaggtgcgggcaggctcctgaattattatgcaaattaggaggacgcaggaggggtctgccctccagccgaacaccacacactggaccctaagtggccaaatgcctgggccgcttgctggctgtggcctgaggcttgtgggttgctgcattttgcttgtagttcacaaccattttgacactggaaaatgctgactttgggggacaggatgaggccctacattctaagcccccagttggcagacaggcattgtccctgttccacatttatgtcgggacaggagatgaccttttcctccgtgtttttcctgtgtttgcacgttgaaatgaagctgacaacctggcaagacgctcagccgcttcaaaccctttttgtcaattaacttattttttaatacttgaaaagaagtaacttcgtttgtgtatctttactagaggaactgatcacctgcgcccgggtgcgggagccacagcggcatctggtgcgtcctacgcgacctggtccggggctgcccggtgctcctcacgtgcatctatttattagcctttctcttcgtatcactggcctggctggcatcaggccgattttgaccagcaatgatagactcttcttaaccctttcaaaataaatttttcagtgggacagaaaggagagttaaaaaacatttttttaaaggtggtaacatctgacccacaaagggaatgggtctgttttatgcaaaataaaagtttttcaaataaa

SEQ ID NO: 32086 - DNA, 4004 bp, Homo sapiens
  misc_feature (1618)..(1618): n is a, c, g, or t
  misc_feature (2257)..(2257): n is a, c, g, or t
caatgcccccaccttcagccgctcttctcttcccacttggcccctagcattgagaaatgcccacctcctgtgtttgggggccccgggccccccccagcacccatgctacgtgtggagagccccctgggcctggcagcatctcccctctcctggggcctgcatggcagcgccctgagaaaggcagtacctctcgcccccgtgaagatgcagcctgtctgtctgtcctccttttcttccttcctttgaacctttctgctttgcagccccattggatgagaatgacctagaggaagatgtggactcagaaccagccgagatagaaggggaggcagcagaggatggggacccaggggacactggtgctgagctggatgatgatcagcactggtctgacagcccgtcggatgctgacagagagctgcgtttgccgtgcccagctgagggggaagcagagctggagctgagggtgtcggaagatgaggagaagctgcccgcctcaccgaagcaccaagagagaggtccctcccaagccaccagccccatccggtctccccaggaatcagctcttctgttcattccagtccacagcccctcaacagaggggccccaactcccacctgtccctgccgccacccaggagaaatcacctgaggagcgccttttccctgagcctttgctccccaaagagaagcccaaagctgatgccccctcggatctgaaagctgtgcactctcccatccgatcacagccagtgaccctgccagaagctaggactcctgtctcaccagggagcccgcagccccagccacccgtggcggcctccacgcccccacccagcccactccccatctgctcccagccccagccttccaccgaggccactgtcccatcccctacccagtcccccatacgcttccagcctgccccggccaaaacatccaccccactggcccctctccctgtccaaagccaaagtgacaccaaggacagactgggcagcccccttgctgtggatgaggccctcagacggagcgacctggtggaggagttctggatgaagagtgcggagatccgccgcagcctcgggctcacacctgtggaccgcagcaaggggcccgagcccagcttccccacgcctgccttcaggccagtgtccctcaaatcctattccgttgaaaagtccccccaggatgagggactccaccttctcaagcctctgtccatccccaaaaggctgggcctgccaaagccggaaggcgagccgttgtccctgccaaccccccggtccccgtccgacagagagctacgcagcgcccaggaggagcgcagggagctgtccagcagctctggcctgggcctgcacgggagctcctccaacatgaagacactgggcagccagagcttcaacacctcggactccgccatgctcacgcccccctccagcccgcccccaccgccacccccgggcgaggagcccgccaccttgcggaggaagctcagggaggccgagcccaatgcctcggtggtcccgccgcccttgcccgccacctggatgcggcccccccgggagcctgctcagccccccagagaggaggtgcggaagtcgtttgtggagagngtggaggagattccctttgctgatgatgtggaggacacctatgacgacaagactgaggactcaagcctgcaggagaaattcttcacgcccccgtcctgctggccgcgccccgagaagcctcgccacccgcccctggccaaggagaacgggaggctgcctgctctggaggggacgctgcagccacagaagagggggctgcccttggtgtccgcggaagccaaggagttggccgaggagcgcatgcgagccagggagaagtccgtgaagagccaggcgctgcgggatgccatggccaggcagctgagcaggatgcagcagatggagctggcctcaggcgcccccaggccccgcaaggcgtcctcagcaccctcccagggcaaggagcgccggcctgactcccccacacgccccactctcaggggctccgaggagcccaccctgaagcatgaagccaccagcgaggaggtcctctccccgccgtcggactcagggggcccagatggctctttcacttcatccgagggctccagtgggaagagcaagaagaggtcgtcactcttctccccccgcagaaacaagaaggagaagaagtccaaaggcgagggccggcccccggagaagcccagctccaacctcctngaagaagccgccgccaaacccaagtccctgtggaagtccgtcttctccgggtacaagaaggacaagaagaagaaggccgacgacaagtcctgccccagcaccccctccagcggggccacggtggactctggaaagcacagggtgcttcccgtcgtaagggcagagctgcagctccggcgccagctgagcttctccgaggactcagacctctccagcgacgatgtccttgagaagtcctcacagaagtcccggcgagagccaagaacctacacggaggaggaactgaatgccaagctgacccggcgtgtgcaaaaggcagctcggagacaggccaagcaggaggagcttaagcggctgcatcgagcccagatcatccagcggcagctgcagcaggtggaggagaggcagcggcggctggaggaaaggggcgtggctgtggagaaggcgctccggggcgaagcaggcatgggcaagaaggacgaccccaagctgatgcaggagtggttcaagctagtgcaggagaagaacgccatggtgcgctacgagtcggagctgatgatctttgcccgggagctggagctggaagaccggcagagtcgactgcagcaggagctccgggaacgcatggcagtggaagatcaccttaagactgaggagggctgtcagaagagaagcagattctcaatgagatgctggaggtggtggagcagagagactcactggtggcgctgctggaggagcagcggctccgggagagagaggaggacaaggacctggaggctgccatgctgtccaagggcttcagccttaactggtcctgagctcccacccaacgctccattttctgttggcatccgcctggccaggcagtggcatccaaaccacccggagccgcgatctgaggaggcctggcacctccttggagtttacgctcagatgcccgtgtgctgcttggaaagtggtcgagtcccgcgtgcagtggggagccccaggtgacagtggttatctgagacggctccacctcctgggaggaggcccacctggacctcccactcagaggagcagcacggcgtgtatggcatgacgcaggggaccaccccgcgcgctccctgaggatgtgctggctgtgccccttttttccactggcacatttggtaagagagggaagctgctccccgtcagaaccacagtgcgccgtgcgaggggcactgtcttcttcatgctccctggagcaccaccaaagaaacgtaaacaataccccacgaaagcagggtcaggggtcagggtgcgatcgagacccaggatgggggcgtccagtcatgcccaccccagcatcacaggagacatggaggtgcgggcaggctcctgaattattatgcaaattaggaggacgcaggaggggtctgccctccagccgaacaccacacactggaccctaagtggccaaatgcctgggccgcttgctggctgtggcctgaggcttgtgggttgctgcattttgcttgtagttcacaaccattttgacactggaaaatgctgactttgggggacaggatgaggccctacattctaagcccccagttggcagacaggcattgtccctgttccacatttatgtcgggacaggagatgaccttttcctccgtgtttttcctgtgtttgcacgttgaaatgaagctgacaacctggcaagacgctcagccgcttcaaaccctttttgtcaattaacttattttttaatacttga

SEQ ID NO: 32087 - DNA, 3031 bp, Homo sapiens
  misc_feature (1618)..(1618): n is a, c, g, or t
  misc_feature (2257)..(2257): n is a, c, g, or t
caatgcccccaccttcagccgctcttctcttcccacttggcccctagcattgagaaatgcccacctcctgtgtttgggggccccgggccccccccagcacccatgctacgtgtggagagccccctgggcctggcagcatctcccctctcctggggcctgcatggcagcgccctgagaaaggcagtacctctcgcccccgtgaagatgcagcctgtctgtctgtcctccttttcttccttcctttgaacctttctgctttgcagccccattggatgagaatgacctagaggaagatgtggactcagaaccagccgagatagaaggggaggcagcagaggatggggacccaggggacactggtgctgagctggatgatgatcagcactggtctgacagcccgtcggatgctgacagagagctgcgtttgccgtgcccagctgagggggaagcagagctggagctgagggtgtcggaagatgaggagaagctgcccgcctcaccgaagcaccaagagagaggtccctcccaagccaccagccccatccggtctccccaggaatcagctcttctgttcattccagtccacagcccctcaacagaggggccccaactcccacctgtccctgccgccacccaggagaaatcacctgaggagcgccttttccctgagcctttgctccccaaagagaagcccaaagctgatgccccctcggatctgaaagctgtgcactctcccatccgatcacagccagtgaccctgccagaagctaggactcctgtctcaccagggagcccgcagccccagccacccgtggcggcctccacgcccccacccagcccactccccatctgctcccagccccagccttccaccgaggccactgtcccatcccctacccagtcccccatacgcttccagcctgccccggccaaaacatccaccccactggcccctctccctgtccaaagccaaagtgacaccaaggacagactgggcagcccccttgctgtggatgaggccctcagacggagcgacctggtggaggagttctggatgaagagtgcggagatccgccgcagcctcgggctcacacctgtggaccgcagcaaggggcccgagcccagcttccccacgcctgccttcaggccagtgtccctcaaatcctattccgttgaaaagtccccccaggatgagggactccaccttctcaagcctctgtccatccccaaaaggctgggcctgccaaagccggaaggcgagccgttgtccctgccaaccccccggtccccgtccgacagagagctacgcagcgcccaggaggagcgcagggagctgtccagcagctctggcctgggcctgcacgggagctcctccaacatgaagacactgggcagccagagcttcaacacctcggactccgccatgctcacgcccccctccagcccgcccccaccgccacccccgggcgaggagcccgccaccttgcggaggaagctcagggaggccgagcccaatgcctcggtggtcccgccgcccttgcccgccacctggatgcggcccccccgggagcctgctcagccccccagagaggaggtgcggaagtcgtttgtggagagngtggaggagattccctttgctgatgatgtggaggacacctatgacgacaagactgaggactcaagcctgcaggagaaattcttcacgcccccgtcctgctggccgcgccccgagaagcctcgccacccgcccctggccaaggagaacgggaggctgcctgctctggaggggacgctgcagccacagaagagggggctgcccttggtgtccgcggaagccaaggagttggccgaggagcgcatgcgagccagggagaagtccgtgaagagccaggcgctgcgggatgccatggccaggcagctgagcaggatgcagcagatggagctggcctcaggcgcccccaggccccgcaaggcgtcctcagcaccctcccagggcaaggagcgccggcctgactcccccacacgccccactctcaggggctccgaggagcccaccctgaagcatgaagccaccagcgaggaggtcctctccccgccgtcggactcagggggcccagatggctctttcacttcatccgagggctccagtgggaagagcaagaagaggtcgtcactcttctccccccgcagaaacaagaaggagaagaagtccaaaggcgagggccggcccccggagaagcccagctccaacctcctngaagaagccgccgccaaacccaagtccctgtggaagtccgtcttctccgggtacaagaaggacaagaagaagaaggccgacgacaagtcctgccccagcaccccctccagcggggccacggtggactctggaaagcacagggtgcttcccgtcgtaagggcagagctgcagctccggcgccagctgagcttctccgaggactcagacctctccagcgacgatgtccttgagaagtcctcacagaagtcccggcgagagccaagaacctacacggaggaggaactgaatgccaagctgacccggcgtgtgcaaaaggcagctcggagacaggccaagcaggaggagcttaagcggctgcatcgagcccagatcatccagcggcagctgcagcaggtggaggagaggcagcggcggctggaggaaaggggcgtggctgtggagaaggcgctccggggcgaagcagactattggggagagtcttattacagtgacctcatcgacttgcatctgggtggtatgtatggcagcgcctgtgctgacactaaccccgctgacgccctttctccacccacgcttcccagtccctgctcacaaaaacaaggagaaatcaacccaataaccaaatggcaaaagcacagacccttttccagctcaaaacagagcagcgtgctgatctccccgctgcccacatgtgctccagaggaagatctgagcttgcttttgctgcctggggtcgtttttaattttttataataaaactttgcccacccgact

SEQ ID NO: 32088 - DNA, 3158 bp, Homo sapiens
  misc_feature (1618)..(1618): n is a, c, g, or t
  misc_feature (2257)..(2257): n is a, c, g, or t
caatgcccccaccttcagccgctcttctcttcccacttggcccctagcattgagaaatgcccacctcctgtgtttgggggccccgggccccccccagcacccatgctacgtgtggagagccccctgggcctggcagcatctcccctctcctggggcctgcatggcagcgccctgagaaaggcagtacctctcgcccccgtgaagatgcagcctgtctgtctgtcctccttttcttccttcctttgaacctttctgctttgcagccccattggatgagaatgacctagaggaagatgtggactcagaaccagccgagatagaaggggaggcagcagaggatggggacccaggggacactggtgctgagctggatgatgatcagcactggtctgacagcccgtcggatgctgacagagagctgcgtttgccgtgcccagctgagggggaagcagagctggagctgagggtgtcggaagatgaggagaagctgcccgcctcaccgaagcaccaagagagaggtccctcccaagccaccagccccatccggtctccccaggaatcagctcttctgttcattccagtccacagcccctcaacagaggggccccaactcccacctgtccctgccgccacccaggagaaatcacctgaggagcgccttttccctgagcctttgctccccaaagagaagcccaaagctgatgccccctcggatctgaaagctgtgcactctcccatccgatcacagccagtgaccctgccagaagctaggactcctgtctcaccagggagcccgcagccccagccacccgtggcggcctccacgcccccacccagcccactccccatctgctcccagccccagccttccaccgaggccactgtcccatcccctacccagtcccccatacgcttccagcctgccccggccaaaacatccaccccactggcccctctccctgtccaaagccaaagtgacaccaaggacagactgggcagcccccttgctgtggatgaggccctcagacggagcgacctggtggaggagttctggatgaagagtgcggagatccgccgcagcctcgggctcacacctgtggaccgcagcaaggggcccgagcccagcttccccacgcctgccttcaggccagtgtccctcaaatcctattccgttgaaaagtccccccaggatgagggactccaccttctcaagcctctgtccatccccaaaaggctgggcctgccaaagccggaaggcgagccgttgtccctgccaaccccccggtccccgtccgacagagagctacgcagcgcccaggaggagcgcagggagctgtccagcagctctggcctgggcctgcacgggagctcctccaacatgaagacactgggcagccagagcttcaacacctcggactccgccatgctcacgcccccctccagcccgcccccaccgccacccccgggcgaggagcccgccaccttgcggaggaagctcagggaggccgagcccaatgcctcggtggtcccgccgcccttgcccgccacctggatgcggcccccccgggagcctgctcagccccccagagaggaggtgcggaagtcgtttgtggagagngtggaggagattccctttgctgatgatgtggaggacacctatgacgacaagactgaggactcaagcctgcaggagaaattcttcacgcccccgtcctgctggccgcgccccgagaagcctcgccacccgcccctggccaaggagaacgggaggctgcctgctctggaggggacgctgcagccacagaagagggggctgcccttggtgtccgcggaagccaaggagttggccgaggagcgcatgcgagccagggagaagtccgtgaagagccaggcgctgcgggatgccatggccaggcagctgagcaggatgcagcagatggagctggcctcaggcgcccccaggccccgcaaggcgtcctcagcaccctcccagggcaaggagcgccggcctgactcccccacacgccccactctcaggggctccgaggagcccaccctgaagcatgaagccaccagcgaggaggtcctctccccgccgtcggactcagggggcccagatggctctttcacttcatccgagggctccagtgggaagagcaagaagaggtcgtcactcttctccccccgcagaaacaagaaggagaagaagtccaaaggcgagggccggcccccggagaagcccagctccaacctcctngaagaagccgccgccaaacccaagtccctgtggaagtccgtcttctccgggtacaagaaggacaagaagaagaaggccgacgacaagtcctgccccagcaccccctccagcggggccacggtggactctggaaagcacagggtgcttcccgtcgtaagggcagagctgcagctccggcgccagctgagcttctccgaggactcagacctctccagcgacgatgtccttgagaagtcctcacagaagtcccggcgagagtcaatttatgtaccacacgccttggcattcaggagatcatgtgcatcaaagccaagaacctacacggaggaggaactgaatgccaagctgacccggcgtgtgcaaaaggcagctcggagacaggccaagcaggaggagcttaagcggctgcatcgagcccagatcatccagcggcagctgcagcaggtggaggagaggcagcggcggctggaggaaaggggcgtggctgtggagaaggcgctccggggcgaagcagactattggggagagtcttattacagtgacctcatcgacttgcatctgggtggcatgggcaagaaggacgaccccaagctgatgcaggagtggttcaagctagtgcaggagaagaacgccatggtgcgctacgagtcggagctgatgatctttgccggagctggagctggaaaccggagagtcactggagcgagccggacgctgcgtggaatccttaaatgagggggctgcaaaaagcgattcaggtgcggggggggccaaacccgggcctgggcacggccgaaagaggaagcgggtgctcccggccttgtgccccgctttgtccggggggtaccggccggggcgtacggtaagccgggcatccacccagtctctttccctcccctct

SEQ ID NO: 32089 - DNA, 708 bp, Homo sapiens
tcactctgtggatcttaggtgtgcccgtggcactgagggctgctgcaggctggggactctgcagacctcatgccttctgcctatcagcacccccgtcctgctagcactctactctacagaggacagcttgtcctatctgcccgggtaccagctccgacatgggggacagacctctccaggcccctgttggcctgctgcccacccctgtcccaggcctccgtgcacctgactgaggaagtttctcttgttctctccagccaagaacctacacggaggaggaactgaatgccaagctgacccggcgtgtgcaaaaggcagctcggagacaggccaagcaggaggagcttaagcggctgcatcgagcccaggtaaaaccatggaggatgggaccagggcacatgcatgggagggttgggcagcatctccctatccacccagctgctccctgccacacaagcacagtgcagagcagagcagaggtagacgggcctccctgccacccaggtcacctttggctggtgcagccacagaggccctgccttggtggagctgtcagtcaaaagggaagagcaggctgggcgtggtggctcaatgcctgtaatcccagcactttgggaggctgaggcaggcggatcacttcaggtcaggagttcgagaccagcctggccaacatggcaaaaccccgtctctactaaaaaaacaaaaatt

SEQ ID NO: 32090 - DNA, 728 bp, Homo sapiens
gcttatcatgaaaacagtaagcatctcccccaatcccgtctctaaccctcactcctgctccccactggcaaccttttagctctttcttctcgtaataactatcatatttctaaatactatgctattgtgaaatttaataattcattaggataatgaggagttagctcttttacatgccccattttcttcccttattttccgaaatgtctgttcttatttaaatcattgttagtatttacatgaagattcctatataaatgttcattttagagccaaatagggcactataacatttcccttttctaaacagcttttaattttcccttgaataaataatgacctcattattaagcgtgcagaatattctatatgtgattttttcaatgtgttagtgattctctatcatgttttctatgatcgtatctattctgttgagtctactttttcacccagagctcttccttccctgctagaagtttccagcctccaagtccagtttggactagatgctgtcaagagctgctctcgtcctgggagtttcctttatttcttatggattgaaaccatactttttctatatactatttcttcctatgtatttactacaattttgctggtgcatatcttccattagcttcttaggaaacatgacactgaaggtgaactttcaatacccttacatgtctatacattcattgagctaggaactcagtcggctctttaaagtt

SEQ ID NO: 32091 - DNA, 100 bp, Homo sapiens
aaaaggctgaacattatttttacaataaaagcacacaagctgtaacttgaaaaaccagcttgccctcccaagatctgagagtgttagcaaaccactatct

SEQ ID NO: 32092 - DNA, 329 bp, Homo sapiens
ccgagaagtctgccttgaccaccctacataaaataacctcctgttccgggtgcggtggctcacgcctgtaatcccagcactttaggaggctgaggcagacagatcacctggggtcaggagttcgagaccagcctgaccaacatggagaaaccctgtctctactaaaaatacaaaaaattagcggggcgtggtggtgcatgcctgtaatcccagctactcgggaggctgaggcaggagaattgcttgaacccagcgggtggaggttgtgagccaagatcgtgccattgcactccagcctgggcaacaagagcaaaactctgtctccaaaa

SEQ ID NO: 32093 - DNA, 439 bp, Homo sapiens
accaagattattctacatatacttttattttcttttttccccactcaacctgctgtatattgagcctgttttaacctctttaatatttgtacacaccatttttaacagttgtataatgttctatttaacgggtatattatttatttaactggccctctattattggacatatgtagtatttctggttttgccatcataaatattgctgaagtaaatatctttgaaccaaatttgtttgcatttctgattgttacctcaggatagatttctagtaggattaatgagccaaagaatattaatattaaaaagaatattactggccaggtgctgtggctcatgcttgtattcccagcattttgggaggctgagatgggaggatcactagagcccaggagttcgagaccagcctaagaaacataggaagatcctatctcttaaa

SEQ ID NO: 32094 - DNA, 190 bp, Homo sapiens
ggggagggaggggagggatggggggaaagcaagctggaggacaggtgagacagcaggacaggaccggagcagggccccaagcccccgggcctggtgggggacgcgcttcttcccacactgtgagccccaactcccccacctcgggtgtaagcgacaggaagaaataataataatttaagattcaaaaaaa

SEQ ID NO: 32095 - DNA, 374 bp, Homo sapiens
gccttgtgtgtgatcttttctgtcttccccaagtttgcattttcgacattaaagtttactttttagttaaaagttttaagaatatatatatatagatgcactgtagataacatttgtatgccagctacacctttttctacttctgtttggctttttttccccacaccaatggtaatttatcttcacagattgttcttcatttctagaaattgttacttcatggtaattacttgagcaaaagcttgaaaatccctgacaagtacttttcatctcatagtatctccccccctcctattcccttccccccaccccaactcccccacctcgggtgtaagcgacaggaagaaataataataatttaagattcaaaaaaa

SEQ ID NO: 32096 - DNA, 335 bp, Homo sapiens
cacaaggaggtggacagcacagaggaggtggacacaggaggacagaggaggtggacagcacagaggaggcacagaggaggtggacactacagaggaggtggacagcacagggagggctgaaggaaggaaagcaaagggtggacttgtggagggaagacaagggtcggaggaggcaatgaggggacagaaccaggaggccaagctgctgctcctggagaagcctggccaggcccctctcaggctccctggcagagcctagaggtaggggccttggaacctggggagggggggctctgcgtgcctgtgtcccaggcccatatctattttctctgctg

SEQ ID NO: 32097 - DNA, 3676 bp, Homo sapiens
tcacctgtctgaacctcagtttccttgtctgtgaaacagatgatgatcatacttcagagggttctggaagatgaaatgagtgtaaagtactcagaagggtgactggcatgcagtcatccctcaataagtattggctaaagttggtcctctttccccagaccctgtgggctgagcgctcttaatctcccctctacttgactctgcaggagaagatggggagccccgaggatgacctgattgggattccattcccggaccacagcagtgagctcctgagctgcctcaatgagcagcgccagctgggccacctatgtgacctcaccatccggacgcagggccttgaataccgcacccacagggctgtgctagctgcctgtagccactacttcaagaagcttttcactgagggcggtggcggagctgtcatgggggccgggggtagcgggacggccactgggggagcaggggccggtgtgtgtgagctggactttgtagggccagaggcactaggcgccctccttgaatttgcctatacagccacactgaccaccagcagcgccaacatgccagctgtgctccaggctgcccgcctgctggagatcccgtgtgtcatcgctgcttgcatggagattctgcagggcagtgggctagaagctcccagcccggacgaggatgactgtgagcgagcccgccagtatctggaggcctttgccacagccacggcctctggagttcccaatggtgaagacagtcctccacaggtgcccctcccaccacctccgccaccgccacctcggcctgttgcccgccgcagccgcaagccccggaaagctttcctgcaaaccaagggggccagagcaaaccacctagtccctgaggtgcccacagtgcccgcccatcccttgacctatgaggaggaggaggtggcgggcagagtgggcagcagtgggggcagtgggccgggggacagctacagccctcccacaggaactgcctcccctcctgagggtccccagagctacgaaccctatgagggtgaggaagaagaagaggagctggtatatcccccagcctatgggctggcgcagggtggcgggcccccgctgtccccagaggagctgggctcagatgaggatgccatcgatcctgacctgatggcctacctaagctccctgcaccaggacaacctggcaccaggcctggacagccaagacaagctggtgcgcaaacgccgctcccagatgcctcaggagtgccctgtctgccacaagatcatccatggggcaggcaaactgcctcgccacatgaggacccacacaggcgagaagccctttgcctgcgaggtctgcggtgttcgattcaccaggaacgacaagctgaagatccacatgcggaagcacacgggagagcgcccctactcatgcccgcactgcccagcccgcttcctgcacagctacgacctcaagaaccacatgcacctgcacacaggggaccggccctatgagtgccacctgtgccacaaggctttcgccaaggaggaccacctgcagcgccacctcaaaggccagaactgcctggaggtgcgcacccgacggcgccgcaaggacgatgcaccaccccactacccgccaccctctaccgctgctgcatcccccgctggcctcgacctctccaatggccacctggacaccttccgcctctctctagctcgattctgggagcagtcagcccccactgggcccccggtctctaccccagggccccctgatgacgatgaggaggaaggggcacccaccacaccccaggctgaaggtgccatggagtcctcttaaagagggacgagggccagactgaagcagcacaaggccggggacacccatgccaagcagtgggagcacgcaggacagacacagcaggggtctggggcacggagccttgctggcatcagcatcagcccttcctcccagagccctcattccaattccaagctaagaaggtattggggcagaggctccccaaattggggtgatcccccaaggagtgatacatatattgtgtatatatttacagctgtattgtaaaagtggggtccctgtccccagctgctcctggggagtagaagcaataatgtatttctaatttgtgggtcccacttcggctatgcgggtttctagggggtgggggcttgggaccaaagccttgccccgcccctatgccccttgggggttttggctgtgtaagggggtgaaggactgcccctcccttccgagacccctccttcctggtttctgttcctttttcctggcagtgaattatgcaaagggggccggcaaaggaagggtaggtgggggaaagccaggtggaagcttgaaagactgggggactgggcctgtaaggaaggagccatcccagtccccctccgccctgctcccggcgctgagtcatggggtcgtggagaagggggcggggtggcctgattggctcgcctgcccctgggggcagtagaggggccccgcccagctaggggagccgctccgttccactcccctccctagccctccctccccacggccctgggcagggaatgtcttgttcccgccgctccctccccggggccagagggcagggcgggccgggcggcgtcctaccctcttctcctcctccccatctcctccccgcccaggtgcgagccggagccgccgccaccgctgccgcccctgactcacgccgcccccgggctggcgcagcgaagggtgtgggacagggtaaggggttggaagagccttgtggagagcgggcgagccggcgccatctggcggccatgctctgagtgggcgagcgccccccgcggccactggagcgagctgtcttcacgctcctcatccaccccagctggtgagcggcgcccccttgccaaggcagtgggcacagaacttctcgcttggccgcaggggaaggggctgcggagctgtgggaaagtgatccccttcccagatccttgccagccgggcttcctgtcaggcaggggagaataatccccactctgctcttaggattgaatccacccccattctgtacatagcctcttctgttggtcttgttgaaatctagtttcagatttttaactacccaattctgctgggggtgggggacacccccccttcctcgctgggtgctggaccccttttgcagcctgggctctgccttgcactatttccccttcctggcctgacggctcctccccctccttaaaaggggcaggttcaggggcccggtgctcttcctcccttccatgcacccccatgcccatttgcacagctgcccaggtacccctaacagtggggaggggtcacagggagggggtagcgggaccagtccctgttatctatttaaaaagtgatgatgtaatatattggggtggcggggagatcgggttgtcctgggcctcatcttagcatttcaggtgatggggggagcccagggctggggagacctggggcccagccccagaaagtggggacaatgtggcctcccttctccctactttcggctttcccagtcagtgccttagggggagaggcactccccccctcctattcccttccccccaccccaactcccccacctcgggtgtaagcgacaggaagaaataataataatttaagattcaaaaaaa

SEQ ID NO: 32098 - DNA, 3632 bp, Homo sapiens
ggggagggaggggagggatggggggaaagcaagctggaggacaggtgagacagcaggacaggaccggagcagggccccaagcccccgggcctggtgggggacgcgcttcttcccacactgtgagcctcagcagctccagccagcggacccgacggctgagaggagaagatggggagccccgaggatgacctgattgggattccattcccggaccacagcagtgagctcctgagctgcctcaatgagcagcgccagctgggccacctatgtgacctcaccatccggacgcagggccttgaataccgcacccacagggctgtgctagctgcctgtagccactacttcaagaagcttttcactgagggcggtggcggagctgtcatgggggccgggggtagcgggacggccactgggggagcaggggccggtgtgtgtgagctggactttgtagggccagaggcactaggcgccctccttgaatttgcctatacagccacactgaccaccagcagcgccaacatgccagctgtgctccaggctgcccgcctgctggagatcccgtgtgtcatcgctgcttgcatggagattctgcagggcagtgggctagaagctcccagcccggacgaggatgactgtgagcgagcccgccagtatctggaggcctttgccacagccacggcctctggagttcccaatggtgaagacagtcctccacaggtgcccctcccaccacctccgccaccgccacctcggcctgttgcccgccgcagccgcaagccccggaaagctttcctgcaaaccaagggggccagagcaaaccacctagtccctgaggtgcccacagtgcccgcccatcccttgacctatgaggaggaggaggtggcgggcagagtgggcagcagtgggggcagtgggccgggggacagctacagccctcccacaggaactgcctcccctcctgagggtccccagagctacgaaccctatgagggtgaggaagaagaagaggagctggtatatcccccagcctatgggctggcgcagggtggcgggcccccgctgtccccagaggagctgggctcagatgaggatgccatcgatcctgacctgatggcctacctaagctccctgcaccaggacaacctggcaccaggcctggacagccaagacaagctggtgcgcaaacgccgctcccagatgcctcaggagtgccctgtctgccacaagatcatccatggggcaggcaaactgcctcgccacatgaggacccacacaggcgagaagccctttgcctgcgaggtctgcggtgttcgattcaccaggaacgacaagctgaagatccacatgcggaagcacacgggagagcgcccctactcatgcccgcactgcccagcccgcttcctgcacagctacgacctcaagaaccacatgcacctgcacacaggggaccggccctatgagtgccacctgtgccacaaggctttcgccaaggaggaccacctgcagcgccacctcaaaggccagaactgcctggaggtgcgcacccgacggcgccgcaaggacgatgcaccaccccactacccgccaccctctaccgctgctgcatcccccgctggcctcgacctctccaatggccacctggacaccttccgcctctctctagctcgattctgggagcagtcagcccccactgggcccccggtctctaccccagggccccctgatgacgatgaggaggaaggggcacccaccacaccccaggctgaaggtgccatggagtcctcttaaagagggacgagggccagactgaagcagcacaaggccggggacacccatgccaagcagtgggagcacgcaggacagacacagcaggggtctggggcacggagccttgctggcatcagcatcagcccttcctcccagagccctcattccaattccaagctaagaaggtattggggcagaggctccccaaattggggtgatcccccaaggagtgatacatatattgtgtatatatttacagctgtattgtaaaagtggggtccctgtccccagctgctcctggggagtagaagcaataatgtatttctaatttgtgggtcccacttcggctatgcgggtttctagggggtgggggcttgggaccaaagccttgccccgcccctatgccccttgggggttttggctgtgtaagggggtgaaggactgcccctcccttccgagacccctccttcctggtttctgttcctttttcctggcagtgaattatgcaaagggggccggcaaaggaagggtaggtgggggaaagccaggtggaagcttgaaagactgggggactgggcctgtaaggaaggagccatcccagtccccctccgccctgctcccggcgctgagtcatggggtcgtggagaagggggcggggtggcctgattggctcgcctgcccctgggggcagtagaggggccccgcccagctaggggagccgctccgttccactcccctccctagccctccctccccacggccctgggcagggaatgtcttgttcccgccgctccctccccggggccagagggcagggcgggccgggcggcgtcctaccctcttctcctcctccccatctcctccccgcccaggtgcgagccggagccgccgccaccgctgccgcccctgactcacgccgcccccgggctggcgcagcgaagggtgtgggacagggtaaggggttggaagagccttgtggagagcgggcgagccggcgccatctggcggccatgctctgagtgggcgagcgccccccgcggccactggagcgagctgtcttcacgctcctcatccaccccagctggtgagcggcgcccccttgccaaggcagtgggcacagaacttctcgcttggccgcaggggaaggggctgcggagctgtgggaaagtgatccccttcccagatccttgccagccgggcttcctgtcaggcaggggagaataatccccactctgctcttaggattgaatccacccccattctgtacatagcctcttctgttggtcttgttgaaatctagtttcagatttttaactacccaattctgctgggggtgggggacacccccccttcctcgctgggtgctggaccccttttgcagcctgggctctgccttgcactatttccccttcctggcctgacggctcctccccctccttaaaaggggcaggttcaggggcccggtgctcttcctcccttccatgcacccccatgcccatttgcacagctgcccaggtacccctaacagtggggaggggtcacagggagggggtagcgggaccagtccctgttatctatttaaaaagtgatgatgtaatatattggggtggcggggagatcgggttgtcctgggcctcatcttagcatttcaggtgatggggggagcccagggctggggagacctggggcccagccccagaaagtggggacaatgtggcctcccttctccctactttcggctttcccagtcagtgccttagggggagaggcactccccccctcctattcccttccccccaccccaactcccccacctcgggtgtaagcgacaggaagaaataataataatttaagattcaaaaaaa

SEQ ID NO: 32099 - DNA, 3624 bp, Homo sapiens
gaggagccccccagcagcgagcggcgagcaactgaccgcggccttctgaccaggaccggagcagggccccaagcccccgggcctggtgggggacgcgcttcttcccacactgtgagcctcagcagctccagccagcggacccgacggctgagaggagaagatggggagccccgaggatgacctgattgggattccattcccggaccacagcagtgagctcctgagctgcctcaatgagcagcgccagctgggccacctatgtgacctcaccatccggacgcagggccttgaataccgcacccacagggctgtgctagctgcctgtagccactacttcaagaagcttttcactgagggcggtggcggagctgtcatgggggccgggggtagcgggacggccactgggggagcaggggccggtgtgtgtgagctggactttgtagggccagaggcactaggcgccctccttgaatttgcctatacagccacactgaccaccagcagcgccaacatgccagctgtgctccaggctgcccgcctgctggagatcccgtgtgtcatcgctgcttgcatggagattctgcagggcagtgggctagaagctcccagcccggacgaggatgactgtgagcgagcccgccagtatctggaggcctttgccacagccacggcctctggagttcccaatggtgaagacagtcctccacaggtgcccctcccaccacctccgccaccgccacctcggcctgttgcccgccgcagccgcaagccccggaaagctttcctgcaaaccaagggggccagagcaaaccacctagtccctgaggtgcccacagtgcccgcccatcccttgacctatgaggaggaggaggtggcgggcagagtgggcagcagtgggggcagtgggccgggggacagctacagccctcccacaggaactgcctcccctcctgagggtccccagagctacgaaccctatgagggtgaggaagaagaagaggagctggtatatcccccagcctatgggctggcgcagggtggcgggcccccgctgtccccagaggagctgggctcagatgaggatgccatcgatcctgacctgatggcctacctaagctccctgcaccaggacaacctggcaccaggcctggacagccaagacaagctggtgcgcaaacgccgctcccagatgcctcaggagtgccctgtctgccacaagatcatccatggggcaggcaaactgcctcgccacatgaggacccacacaggcgagaagccctttgcctgcgaggtctgcggtgttcgattcaccaggaacgacaagctgaagatccacatgcggaagcacacgggagagcgcccctactcatgcccgcactgcccagcccgcttcctgcacagctacgacctcaagaaccacatgcacctgcacacaggggaccggccctatgagtgccacctgtgccacaaggctttcgccaaggaggaccacctgcagcgccacctcaaaggccagaactgcctggaggtgcgcacccgacggcgccgcaaggacgatgcaccaccccactacccgccaccctctaccgctgctgcatcccccgctggcctcgacctctccaatggccacctggacaccttccgcctctctctagctcgattctgggagcagtcagcccccactgggcccccggtctctaccccagggccccctgatgacgatgaggaggaaggggcacccaccacaccccaggctgaaggtgccatggagtcctcttaaagagggacgagggccagactgaagcagcacaaggccggggacacccatgccaagcagtgggagcacgcaggacagacacagcaggggtctggggcacggagccttgctggcatcagcatcagcccttcctcccagagccctcattccaattccaagctaagaaggtattggggcagaggctccccaaattggggtgatcccccaaggagtgatacatatattgtgtatatatttacagctgtattgtaaaagtggggtccctgtccccagctgctcctggggagtagaagcaataatgtatttctaatttgtgggtcccacttcggctatgcgggtttctagggggtgggggcttgggaccaaagccttgccccgcccctatgccccttgggggttttggctgtgtaagggggtgaaggactgcccctcccttccgagacccctccttcctggtttctgttcctttttcctggcagtgaattatgcaaagggggccggcaaaggaagggtaggtgggggaaagccaggtggaagcttgaaagactgggggactgggcctgtaaggaaggagccatcccagtccccctccgccctgctcccggcgctgagtcatggggtcgtggagaagggggcggggtggcctgattggctcgcctgcccctgggggcagtagaggggccccgcccagctaggggagccgctccgttccactcccctccctagccctccctccccacggccctgggcagggaatgtcttgttcccgccgctccctccccggggccagagggcagggcgggccgggcggcgtcctaccctcttctcctcctccccatctcctccccgcccaggtgcgagccggagccgccgccaccgctgccgcccctgactcacgccgcccccgggctggcgcagcgaagggtgtgggacagggtaaggggttggaagagccttgtggagagcgggcgagccggcgccatctggcggccatgctctgagtgggcgagcgccccccgcggccactggagcgagctgtcttcacgctcctcatccaccccagctggtgagcggcgcccccttgccaaggcagtgggcacagaacttctcgcttggccgcaggggaaggggctgcggagctgtgggaaagtgatccccttcccagatccttgccagccgggcttcctgtcaggcaggggagaataatccccactctgctcttaggattgaatccacccccattctgtacatagcctcttctgttggtcttgttgaaatctagtttcagatttttaactacccaattctgctgggggtgggggacacccccccttcctcgctgggtgctggaccccttttgcagcctgggctctgccttgcactatttccccttcctggcctgacggctcctccccctccttaaaaggggcaggttcaggggcccggtgctcttcctcccttccatgcacccccatgcccatttgcacagctgcccaggtacccctaacagtggggaggggtcacagggagggggtagcgggaccagtccctgttatctatttaaaaagtgatgatgtaatatattggggtggcggggagatcgggttgtcctgggcctcatcttagcatttcaggtgatggggggagcccagggctggggagacctggggcccagccccagaaagtggggacaatgtggcctcccttctccctactttcggctttcccagtcagtgccttagggggagaggcactccccccctcctattcccttccccccaccccaactcccccacctcgggtgtaagcgacaggaagaaataataataatttaagattcaaaaaaa

SEQ ID NO: 32100 - DNA, 3711 bp, Homo sapiens
ggggagggaggggagggatggggggaaagcaagctggaggacaggtgagacagcaggacaggaccggagcagggccccaagcccccgggcctggtgggggacgcgcttcttcccacactgtgagcctcagcagctccagccagcggacccgacggctgagagtgtcctaaccgctttggagagcgataacttgagttaaagcacctgtctgtgcctggcctccagcagatcttggtccagtgagaagatggggagccccgaggatgacctgattgggattccattcccggaccacagcagtgagctcctgagctgcctcaatgagcagcgccagctgggccacctatgtgacctcaccatccggacgcagggccttgaataccgcacccacagggctgtgctagctgcctgtagccactacttcaagaagcttttcactgagggcggtggcggagctgtcatgggggccgggggtagcgggacggccactgggggagcaggggccggtgtgtgtgagctggactttgtagggccagaggcactaggcgccctccttgaatttgcctatacagccacactgaccaccagcagcgccaacatgccagctgtgctccaggctgcccgcctgctggagatcccgtgtgtcatcgctgcttgcatggagattctgcagggcagtgggctagaagctcccagcccggacgaggatgactgtgagcgagcccgccagtatctggaggcctttgccacagccacggcctctggagttcccaatggtgaagacagtcctccacaggtgcccctcccaccacctccgccaccgccacctcggcctgttgcccgccgcagccgcaagccccggaaagctttcctgcaaaccaagggggccagagcaaaccacctagtccctgaggtgcccacagtgcccgcccatcccttgacctatgaggaggaggaggtggcgggcagagtgggcagcagtgggggcagtgggccgggggacagctacagccctcccacaggaactgcctcccctcctgagggtccccagagctacgaaccctatgagggtgaggaagaagaagaggagctggtatatcccccagcctatgggctggcgcagggtggcgggcccccgctgtccccagaggagctgggctcagatgaggatgccatcgatcctgacctgatggcctacctaagctccctgcaccaggacaacctggcaccaggcctggacagccaagacaagctggtgcgcaaacgccgctcccagatgcctcaggagtgccctgtctgccacaagatcatccatggggcaggcaaactgcctcgccacatgaggacccacacaggcgagaagccctttgcctgcgaggtctgcggtgttcgattcaccaggaacgacaagctgaagatccacatgcggaagcacacgggagagcgcccctactcatgcccgcactgcccagcccgcttcctgcacagctacgacctcaagaaccacatgcacctgcacacaggggaccggccctatgagtgccacctgtgccacaaggctttcgccaaggaggaccacctgcagcgccacctcaaaggccagaactgcctggaggtgcgcacccgacggcgccgcaaggacgatgcaccaccccactacccgccaccctctaccgctgctgcatcccccgctggcctcgacctctccaatggccacctggacaccttccgcctctctctagctcgattctgggagcagtcagcccccactgggcccccggtctctaccccagggccccctgatgacgatgaggaggaaggggcacccaccacaccccaggctgaaggtgccatggagtcctcttaaagagggacgagggccagactgaagcagcacaaggccggggacacccatgccaagcagtgggagcacgcaggacagacacagcaggggtctggggcacggagccttgctggcatcagcatcagcccttcctcccagagccctcattccaattccaagctaagaaggtattggggcagaggctccccaaattggggtgatcccccaaggagtgatacatatattgtgtatatatttacagctgtattgtaaaagtggggtccctgtccccagctgctcctggggagtagaagcaataatgtatttctaatttgtgggtcccacttcggctatgcgggtttctagggggtgggggcttgggaccaaagccttgccccgcccctatgccccttgggggttttggctgtgtaagggggtgaaggactgcccctcccttccgagacccctccttcctggtttctgttcctttttcctggcagtgaattatgcaaagggggccggcaaaggaagggtaggtgggggaaagccaggtggaagcttgaaagactgggggactgggcctgtaaggaaggagccatcccagtccccctccgccctgctcccggcgctgagtcatggggtcgtggagaagggggcggggtggcctgattggctcgcctgcccctgggggcagtagaggggccccgcccagctaggggagccgctccgttccactcccctccctagccctccctccccacggccctgggcagggaatgtcttgttcccgccgctccctccccggggccagagggcagggcgggccgggcggcgtcctaccctcttctcctcctccccatctcctccccgcccaggtgcgagccggagccgccgccaccgctgccgcccctgactcacgccgcccccgggctggcgcagcgaagggtgtgggacagggtaaggggttggaagagccttgtggagagcgggcgagccggcgccatctggcggccatgctctgagtgggcgagcgccccccgcggccactggagcgagctgtcttcacgctcctcatccaccccagctggtgagcggcgcccccttgccaaggcagtgggcacagaacttctcgcttggccgcaggggaaggggctgcggagctgtgggaaagtgatccccttcccagatccttgccagccgggcttcctgtcaggcaggggagaataatccccactctgctcttaggattgaatccacccccattctgtacatagcctcttctgttggtcttgttgaaatctagtttcagatttttaactacccaattctgctgggggtgggggacacccccccttcctcgctgggtgctggaccccttttgcagcctgggctctgccttgcactatttccccttcctggcctgacggctcctccccctccttaaaaggggcaggttcaggggcccggtgctcttcctcccttccatgcacccccatgcccatttgcacagctgcccaggtacccctaacagtggggaggggtcacagggagggggtagcgggaccagtccctgttatctatttaaaaagtgatgatgtaatatattggggtggcggggagatcgggttgtcctgggcctcatcttagcatttcaggtgatggggggagcccagggctggggagacctggggcccagccccagaaagtggggacaatgtggcctcccttctccctactttcggctttcccagtcagtgccttagggggagaggcactccccccctcctattcccttccccccaccccaactcccccacctcgggtgtaagcgacaggaagaaataataataatttaagattcaaaaaaa

SEQ ID NO: 32101 - DNA, 3228 bp, Homo sapiens
ggggagggaggggagggatggggggaaagcaagctggaggacaggtgagacagcaggacaggaccggagcagggccccaagcccccgggcctggtgggggacgcgcttcttcccacactgtgagcctcagcagctccagccagcggacccgacggctgagaggagaagatggggagccccgaggatgacctgattgggattccattcccggaccacagcagtgagctcctgagctgcctcaatgagcagcgccagctgggccacctatgtgacctcaccatccggacgcagggccttgaataccgcacccacagggctgtgctagctgcctgtagccacgccacctcggcctgttgcccgccgcagccgcaagccccggaaagctttcctgcaaaccaagggggccagagcaaaccacctagtccctgaggtgcccacagtgcccgcccatcccttgacctatgaggaggaggaggtggcgggcagagtgggcagcagtgggggcagtgggccgggggacagctacagccctcccacaggaactgcctcccctcctgagggtccccagagctacgaaccctatgagggtgaggaagaagaagaggagctggtatatcccccagcctatgggctggcgcagggtggcgggcccccgctgtccccagaggagctgggctcagatgaggatgccatcgatcctgacctgatggcctacctaagctccctgcaccaggacaacctggcaccaggcctggacagccaagacaagctggtgcgcaaacgccgctcccagatgcctcaggagtgccctgtctgccacaagatcatccatggggcaggcaaactgcctcgccacatgaggacccacacaggcgagaagccctttgcctgcgaggtctgcggtgttcgattcaccaggaacgacaagctgaagatccacatgcggaagcacacgggagagcgcccctactcatgcccgcactgcccagcccgcttcctgcacagctacgacctcaagaaccacatgcacctgcacacaggggaccggccctatgagtgccacctgtgccacaaggctttcgccaaggaggaccacctgcagcgccacctcaaaggccagaactgcctggaggtgcgcacccgacggcgccgcaaggacgatgcaccaccccactacccgccaccctctaccgctgctgcatcccccgctggcctcgacctctccaatggccacctggacaccttccgcctctctctagctcgattctgggagcagtcagcccccactgggcccccggtctctaccccagggccccctgatgacgatgaggaggaaggggcacccaccacaccccaggctgaaggtgccatggagtcctcttaaagagggacgagggccagactgaagcagcacaaggccggggacacccatgccaagcagtgggagcacgcaggacagacacagcaggggtctggggcacggagccttgctggcatcagcatcagcccttcctcccagagccctcattccaattccaagctaagaaggtattggggcagaggctccccaaattggggtgatcccccaaggagtgatacatatattgtgtatatatttacagctgtattgtaaaagtggggtccctgtccccagctgctcctggggagtagaagcaataatgtatttctaatttgtgggtcccacttcggctatgcgggtttctagggggtgggggcttgggaccaaagccttgccccgcccctatgccccttgggggttttggctgtgtaagggggtgaaggactgcccctcccttccgagacccctccttcctggtttctgttcctttttcctggcagtgaattatgcaaagggggccggcaaaggaagggtaggtgggggaaagccaggtggaagcttgaaagactgggggactgggcctgtaaggaaggagccatcccagtccccctccgccctgctcccggcgctgagtcatggggtcgtggagaagggggcggggtggcctgattggctcgcctgcccctgggggcagtagaggggccccgcccagctaggggagccgctccgttccactcccctccctagccctccctccccacggccctgggcagggaatgtcttgttcccgccgctccctccccggggccagagggcagggcgggccgggcggcgtcctaccctcttctcctcctccccatctcctccccgcccaggtgcgagccggagccgccgccaccgctgccgcccctgactcacgccgcccccgggctggcgcagcgaagggtgtgggacagggtaaggggttggaagagccttgtggagagcgggcgagccggcgccatctggcggccatgctctgagtgggcgagcgccccccgcggccactggagcgagctgtcttcacgctcctcatccaccccagctggtgagcggcgcccccttgccaaggcagtgggcacagaacttctcgcttggccgcaggggaaggggctgcggagctgtgggaaagtgatccccttcccagatccttgccagccgggcttcctgtcaggcaggggagaataatccccactctgctcttaggattgaatccacccccattctgtacatagcctcttctgttggtcttgttgaaatctagtttcagatttttaactacccaattctgctgggggtgggggacacccccccttcctcgctgggtgctggaccccttttgcagcctgggctctgccttgcactatttccccttcctggcctgacggctcctccccctccttaaaaggggcaggttcaggggcccggtgctcttcctcccttccatgcacccccatgcccatttgcacagctgcccaggtacccctaacagtggggaggggtcacagggagggggtagcgggaccagtccctgttatctatttaaaaagtgatgatgtaatatattggggtggcggggagatcgggttgtcctgggcctcatcttagcatttcaggtgatggggggagcccagggctggggagacctggggcccagccccagaaagtggggacaatgtggcctcccttctccctactttcggctttcccagtcagtgccttagggggagaggcactccccccctcctattcccttccccccaccccaactcccccacctcgggtgtaagcgacaggaagaaataataataatttaagattcaaaaaaa

SEQ ID NO: 32102 - DNA, 2437 bp, Homo sapiens
ggggagggaggggagggatggggggaaagcaagctggaggacaggtgagacagcaggacaggaccggagcagggccccaagcccccgggcctggtgggggacgcgcttcttcccacactgtgagcctcagcagctccagccagcggacccgacggctgagaggagaagatggggagccccgaggatgacctgattgggattccattcccggaccacagcagtgagctcctgagctgcctcaatgagcagcgccagctgggccacctatgtgacctcaccatccggacgcagggccttgaataccgcacccacagggctgtgctagctgcctgtagccactacttcaagaagcttttcactgagggcggtggcggagctgtcatgggggccgggggtagcgggacggccactgggggagcaggggccggtgtgtgtgagctggactttgtagggccagaggcactaggcgccctccttgaatttgcctatacagccacactgaccaccagcagcgccaacatgccagctgtgctccaggctgcccgcctgctggagatcccgtgtgtcatcgctgcttgcatggagattctgcagggcagtgggctagaagctcccagcccggacgaggatgactgtgagcgagcccgccagtatctggaggcctttgccacagccacggcctctggagttcccaatggtgaagacagtcctccacaggtgcccctcccaccacctccgccaccgccacctcggcctgttgcccgccgcagccgcaagccccggaaagctttcctgcaaaccaagggggccagagcaaaccacctagtccctgaggtgcccacagtgcccgcccatcccttgacctatgaggaggaggaggtggcgggcagagtgggcagcagtgggggcagtgggccgggggacagctacagccctcccacaggaactgcctcccctcctgagggtccccagagctacgaaccctatgagggtgaggaagaagaagaggagctggtatatcccccagcctatgggctggcgcagggtggcgggcccccgctgtccccagaggagctgggctcagatgaggatgccatcgatcctgacctgatggcctacctaagctccctgcaccaggacaacctggcaccaggcctggacagccaagacaagctggtgcgcaaacgccgctcccagatgcctcaggagtgccctgtctgccacaagatcatccatggggcaggcaaactgcctcgccacatgaggacccacacaggcgagaagccctttgcctgcgaggtctgcggtgttcgattcaccaggaacgacaagctgaagatccacatgcggaagcacacgggagagcgcccctactcatgcccgcactgcccagcccgcttcctgcacagctacgacctcaagaaccacatgcacctgcacacaggggaccggccctatgagtgccaccgctgccgcccctgactcacgccgcccccgggctggcgcagcgaagggtgtgggacagggtaaggggttggaagagccttgtggagagcgggcgagccggcgccatctggcggccatgctctgagtgggcgagcgccccccgcggccactggagcgagctgtcttcacgctcctcatccaccccagctggtgagcggcgcccccttgccaaggcagtgggcacagaacttctcgcttggccgcaggggaaggggctgcggagctgtgggaaagtgatccccttcccagatccttgccagccgggcttcctgtcaggcaggggagaataatccccactctgctcttaggattgaatccacccccattctgtacatagcctcttctgttggtcttgttgaaatctagtttcagatttttaactacccaattctgctgggggtgggggacacccccccttcctcgctgggtgctggaccccttttgcagcctgggctctgccttgcactatttccccttcctggcctgacggctcctccccctccttaaaaggggcaggttcaggggcccggtgctcttcctcccttccatgcacccccatgcccatttgcacagctgcccaggtacccctaacagtggggaggggtcacagggagggggtagcgggaccagtccctgttatctatttaaaaagtgatgatgtaatatattggggtggcggggagatcgggttgtcctgggcctcatcttagcatttcaggtgatggggggagcccagggctggggagacctggggcccagccccagaaagtggggacaatgtggcctcccttctccctactttcggctttcccagtcagtgccttagggggagaggcactccccccctcctattcccttccccccaccccaactcccccacctcgggtgtaagcgacaggaagaaataataataatttaagattcaaaaaaa

SEQ ID NO: 32103 - DNA, 476 bp, Homo sapiens
ggggagggaggggagggatggggggaaagcaagctggaggacaggtgagacagcaggacaggaccggagcagggccccaagcccccgggcctggtgggggacgcgcttcttcccacactgtgagcctcagcagctccagccagcggacccgacggctgagaggagccccagaaccaggactgggggatttggagctgggcagagacttaacccccacagcaccgggaagcagccaactcccctcgcctccttcccccttcgtggcttgcggtctctcttccccgcctcggcccccaggaagtgaagatgttacagcctggtcctcatcctccctcaccccaagctgctgctcctggagaagcctggccaggcccctctcaggctccctggcagagcctagaggtaggggccttggaacctggggagggggggctctgcgtgcctgtgtcccaggcccatatctattttctctgctg

SEQ ID NO: 32104 - DNA, 312 bp, Homo sapiens
ctgttttgctttctagctggtggctttgtgaacaaagcatagcggtacagatatcctcaaataccctcatgtaccttgaagaggtcacttgggtagtaaacccttttggttcccgtgccactaacacaggagcaattgagagcctaaactgggtttgcctcagcaatagaggccagtagtaaaaattcagccgtaaagaccagcagtaagaaaagtagtcaaggtcaggggcaaactatctgctggagtgaaatgtttaaagcttccaatgaggctttaattagattcaaaaaacatcccgctgttaaactg

SEQ ID NO: 32105 - DNA, 397 bp, Homo sapiens
ttttggaaaaaaataagaatagttggagaatgttaaaacattattgaaaaacatatcgactaaaaaagataaaaacaatcccaaatcactttaatactttaaataaattcacaatagaattctactcagtgttaaaatactggagaaggctgggtgcagtggctcatgactgtaatctcaatactttgggagcctgagaccggaggattgcttgagcccaggaattcaagaccagcctcagcaacatggcaataccccatctctacaaaaaaatttttaaaaattagctgggtacagctgggcacagtggctcatgtctgtaatcccagcactttgggtggctgaggtgggtggaccacttgaggtcagttcaagaccagcctggccaacatggtga

SEQ ID NO: 32106 - DNA, 398 bp, Homo sapiens
agtctggcaaggggcgcttggcagatgagagtggaggttgtaaatcaccctccatgcaatggttcatcataaaggatatggagcaaaattagaggaggcacgagaaggaaagccggtgatgaacaaggatttgcctcaactacagagacagcatggaacacgccctcctaggctgcccacatcctcatctgcatgggggcacagaagcctggccattcatcccatgggagactcaggacatgctcccagcaacctgatgggctgcccaaggcttggctgatcctgcatccctgcatcacatctcagcttctccctctgcccaaatctacttcctccccattcctttcacaggcattgattccctgataaacaccttgcaccccaaaaaatccatctca

SEQ ID NO: 32107 - DNA, 431 bp, Homo sapiens
agtctggcaaggggcgcttggcagatgagagtggaggttgtaaatcaccctccatgcaatggttcatcataaaggatatggagcaaaattagaggaggcacgagaaggaaagccggtgatgaacaagaaagtgcctggttgaagctagcttgcaatcccaaagtcagaaggttgcctgggaagccatgaaacaaagcgccaaatcaaggcaaagcagacacatggagattttgagactgagaagaggaaaactgaggacattcatgtgagatggtttcaagtttcccttagaaggagaagttatcttcagaaggtcaggttggtgaggtgggagttcaaaaacaacaaagtatgtagctaccattgtgaggaagaccatggaaaatggacgaatcagaatgaaaggctttctgaacaagagtaagtacccc

SEQ ID NO: 32108 - DNA, 1366 bp, Homo sapiens
atccccaccatcccagctgctgtgaaatgggcaaatgtcttgcctccaggacctgggaagggtgatgcagctcacctccctcctgttcacaccccagccaccccagccatcccagccgggtcccagccacccacacagcacctcctcctggccccgccctgcccagcccctcccaggtgcctgaggtggagccgccagttcccacagcaccccagcggcctgccatggggggtctaaggccctggtcccgatacgggctcctggttgtggcccacttgctggccctggggcttggggctgtggtgttccaggccctggaggggcctcctgcatgcaggcttcaggctgagctcagggcagagctggcagccttccaggcagagcatagggcctgcctgccacccggagctctggaagagctgctgggcactgccctggccacccaggcccatggggtctccaccctgggcaacagctcagagggcaggacctgggaccttccctcagccctgctcttcgctgccagcatcctcaccaccacaggttatggccacatggccccactatcgccaggcggaaaggccttctgcatggtctatgcagccctggggctgccagcctccttagctctcgtggccaccctgcgccattgcctgctgcctgtgctcagccgcccacgtgcctgggtagcggtccactggcagctgtcaccggccagggctgcgctgctgcaggcagttgcactgggactgctggtggccagcagctttgtgctgctgccagcgctggtgctgtggggccttcagggcgactgcagcctgctgggggccgtctacttctgcttcagctcgctcagcaccattggcctggaggacttgctgcccggccgcggccgcagcctgcaccccgtgatttaccacctgggccagctcgcacttcttggtggagggacctcactccagggcacggcgtgggaggggtagtcgaagagctctggtggcagcgttgagaaggggttgcttctaggactcttggccatgctgctggcagtggagaccttctctgagctgccgcaggtccgtgccatggggaagttcttcagacccagtggtcctgtgactgctgaggaccaaggtggcatcctagggcaggatgaactggctctgagcaccctgccgcccgcggccccagcttcaggacaagcccctgcttgctgaagcgtcaggtgaccgagttcagctccgtaaggtggcggcacctgaggaggaagcagccaggagtggctggggaagaatctggagatggagccgcggtgagggtgggcgggaggcctcaggggatactgttaatcataaaatgagcaacg

SEQ ID NO: 32109 - DNA, 1292 bp, Homo sapiens
atccccaccatcccagctgctgtgaaatgggcaaatgtcttgcctccaggacctgggaagggtgatgcagctcacctccctcctgttcacaccccagccaccccagccatcccagccgggtcccagccacccacacagcacctcctcctggccccgccctgcccagcccctcccaggtgcctgaggtggagccgccagttcccacagcaccccagcggcctgccatggggggtctaaggccctggtcccgatacgggctcctggttgtggcccacttgctggccctggggcttggggctgtggtgttccaggccctggaggggcctcctgcatgcaggcttcaggctgagctcagggcagagctggcagccttccaggcagagcatagggcctgcctgccacccggagctctggaagagctgctgggcactgccctggccacccaggcccatggggtctccaccctgggcaacagctcagagggcaggacctgggaccttccctcagccctgctcttcgctgccagcatcctcaccaccacaggttatggccacatggccccactatcgccaggcggaaaggccttctgcatggtctatgcagccctggggctgccagcctccttagctctcgtggccaccctgcgccattgcctgctgcctgtgctcagccgcccacgtgcctgggtagcggtccactggcagctgtcaccggccagggctgcgctgctgcaggcagttgcactgggactgctggtggccagcagctttgtgctgctgccagcgctggtgctgtggggccttcagggcgactgcagcctgctgggggccgtctacttctgcttcagctcgctcagcaccattggcctggaggacttgctgcccggccgcggccgcagcctgcaccccgtgatttaccacctgggccagctcgcacttcttgttgcttctaggactcttggccatgctgctggcagtggagaccttctctgagctgccgcaggtccgtgccatggggaagttcttcagacccagtggtcctgtgactgctgaggaccaaggtggcatcctagggcaggatgaactggctctgagcaccctgccgcccgcggccccagcttcaggacaagcccctgcttgctgaagcgtcaggtgaccgagttcagctccgtaaggtggcggcacctgaggaggaagcagccaggagtggctggggaagaatctggagatggagccgcggtgagggtgggcgggaggcctcaggggatactgttaatcataaaatgagcaacg

SEQ ID NO: 32110 - DNA, 1562 bp, Homo sapiens
atccccaccatcccagctgctgtgaaatgggcaaatgtcttgcctccaggacctgggaagggtgatgcagctcacctccctcctgttcacaccccagccaccccagccatcccagccgggtcccagccacccacacagcacctcctcctggccccgccctgcccagcccctcccaggtgcctgaggtggagccgccagttcccacagcaccccagcggcctgccatggggggtctaaggccctggtcccgatacgggctcctggttgtggcccacttgctggccctggggcttggggctgtggtgttccaggccctggaggggcctcctgcatgcaggcttcaggctgagctcagggcagagctggcagccttccaggcagagcatagggcctgcctgccacccggagctctggaagagctgctgggcactgccctggccacccaggcccatggggtctccaccctgggcaacagctcagagggcaggacctgggaccttccctcagccctgctcttcgctgccagcatcctcaccaccacaggttatggccacatggccccactatcgccaggcggaaaggccttctgcatggtctatgcagccctggggctgccagcctccttagctctcgtggccaccctgcgccattgcctgctgcctgtgctcagccgcccacgtgcctgggtagcggtccactggcagctgtcaccggccagggctgcgctgctgcaggcagttgcactgggactgctggtggccagcagctttgtgctgctgccagcgctggtgctgtggggccttcagggcgactgcagcctgctgggggccgtctacttctgcttcagctcgctcagcaccattggcctggaggacttgctgcccggccgcggccgcagcctgcaccccgtgatttaccacctgggccagctcgcacttcttggtaagtccagccacctaacagcgtgtgggggaagggggaagaggagcctggactaggactcccataaatcactggggggctgggccttgcaggtggagggacctcactccagggcacggcgtgggaggggtagtcgaagagctctggtggcagcgttgagaagggggtgagtggtgccagttgccagggcaagtcactgcgctgggaggtgggcggggagcatcaccagaacccaggcgctgccccagcaccttctcctccccaggttacttgcttctaggactcttggccatgctgctggcagtggagaccttctctgagctgccgcaggtccgtgccatggggaagttcttcagacccagtggtcctgtgactgctgaggaccaaggtggcatcctagggcaggatgaactggctctgagcaccctgccgcccgcggccccagcttcaggacaagcccctgcttgctgaagcgtcaggtgaccgagttcagctccgtaaggtggcggcacctgaggaggaagcagccaggagtggctggggaagaatctggagatggagccgcggtgagggtgggcgggaggcctcaggggatactgttaatcataaaatgagcaacg

SEQ ID NO: 32111 - DNA, 1083 bp, Homo sapiens
ctgacgaagaggagcagagccagctagaacctgggcctggccagttcaaggccaccagagggcagccttctgcggaaggcagtattggggtaggcagggaccccagcagacatggcactcagagctctcactgtccactgactctctcttctccaggttatggccacatggccccactatcgccaggcggaaaggccttctgcatggtctatgcagccctggggctgccagcctccttagctctcgtggccaccctgcgccattgcctgctgcctgtgctcagccgcccacgtgcctgggtagcggtccactggcagctgtcaccggccagggctgcgctgctgcaggcagttgcactgggactgctggtggccagcagctttgtgctgctgccagcgctggtgctgtggggccttcagggcgactgcagcctgctgggggccgtctacttctgcttcagctcgctcagcaccattggcctggaggacttgctgcccggccgcggccgcagcctgcaccccgtgatttaccacctgggccagctcgcacttcttggtggagggacctcactccagggcacggcgtgggaggggtagtcgaagagctctggtggcagcgttgagaagggggtgagtggtgccagttgccagggcaagtcactgcgctgggaggtgggcggggagcatcaccagaacccaggcgctgccccagcaccttctcctccccaggttacttgcttctaggactcttggccatgctgctggcagtggagaccttctctgagctgccgcaggtccgtgccatggggaagttcttcagacccagtggtcctgtgactgctgaggaccaaggtggcatcctagggcaggatgaactggctctgagcaccctgccgcccgcggccccagcttcaggacaagcccctgcttgctgaagcgtcaggtgaccgagttcagctccgtaaggtggcggcacctgaggaggaagcagccaggagtggctggggaagaatctggagatggagccgcggtgagggtgggcgggaggcctcaggggatactgttaatcataaaatgagcaacg

SEQ ID NO: 32112 - DNA, 448 bp, Homo sapiens
agtagaaaaaaatatttttattgatttttattttaaaattgtatgtatttattattttttaaagacaggatctcactttattgcccaggctggtctcaaactcgtgggctcaagcgatcctcccatctcagcctcccaagtagctgggattacaggtacgagccaccgcatccagccaaaaaaagctttagcatatatttttttcatgcaaagtcataaatatcccttgaaggatgcaagagccagtatcactgattgcctttgaagaagggaagtgggtgtctgaggggtacagtgtggaaggagatttttccctgctactctttcagactcttggaattttaaaccgtgatcgatgcagtgccctatttaaaaatttaaataagagaaaataatgcgctgtgtattaaattcacatacattaaagcataccctgaataaagaaaca

SEQ ID NO: 32113 - DNA, 362 bp, Homo sapiens
gcaaccaatatttgaaactcctatatataatgattaagatagtggtagaaaaaaatagtccatgggccgggcgcggtggctcacgcctgtaatcccagcactttgggaggccgaggcgggtggatcatgaggtcaggagatcgagaccatcctggctaacaaggtgaaaccccgtctctactaaaaatacaaaaaattagccgggcgcggtggcgggcgcctgtagtcccagctactcgggaggctgaggcaggagaatggcgtgaacccgggaagcggagcttgcagtgagccgagattgcgccactgcagtccgcagtccggcctgggcgacagagcgagactccgtctcaaaaaaaaaa

SEQ ID NO: 32114 - DNA, 437 bp, Homo sapiens
tcttaaatgttcttttggtaacatctttgaggaagtcaactctagtcgatattgtcttttcagtgacaaagtgtcaagtaccttataaggtgggcattgtgtcttggatcatttttgtaacaaagttcctctttcctttgagctacatttggtgatccagagttttctactctttctccctgcttctattctttttgctagtacaaaacaatctgtagacaagacagctaacagttcctccaagtaatttcttaacaataaaaaatgaacacctcccagcgttcctgaaatcattccttatatgtctctgattcaagcacttttaccagggtatcctgtaggtactattctgtccccacccacatcagggagacactggaatatgatagcattgagtcacctaatttcagaatcagcctagtctgctcagtgtgttg

SEQ ID NO: 32115 - DNA, 314 bp, Homo sapiens
tacctgcatccatgtcctgctttgatttctcttcgctttccctcctgtgtcctcccccttccaactcttttcacagtacccttgaagtttgcctgttcatgccagcgaaccctcacagttttagtctctttatagagttccttccctatcttctgccctaattgaaacttggtctcccctacttgttggaagtcctcttaatggtcttctaagacatgtaaagtctcaccctaaatttggagctatgtgactttttcttatatcccacattactgttccaaaatgttattcttcctgcaattcaacatttatct

SEQ ID NO: 32116 - DNA, 497 bp, Homo sapiens
gcgtgagccaccgcgcccggccgcattctctgtcttttcactttctaatatttaaaagaggcagctcaaggccacacttacccccttttagtgtccattttaatctttccttggtctgtagtgcacagatttagtagactccaatatttcaaataatggccccatgccccaagtgttttccttacagctctgtagacatcatgtggtaaaacaaaaacattaaaagcattcagaaaccaaacaaaacagaatagctttggtgttaccatttatacttcatttgaattactggatactagttctttgtagacatttggaggtttctccgtaaagtcctgataagaattttcagaaaaggaaggcatagctcttaggtgactgagtatattggggagtagtgtggattggtgacacaatagagtgctttacagagctagaggggatcattacagtgaagtatttctgagcaaggataggcatcaaaaatagggatggaa

SEQ ID NO: 32117 - DNA, 387 bp, Homo sapiens
gagtgtctaccacatgccaggaatgttcatctgtgctattttatcttcccaaatagataagatggttgagatgattgtctcattaatatctgaagacacaggctaagagaagttaagcaatttgtccaaagactcacagctgggtaatggtggagccacgactccaaacccacccctgcctcctagcatccagtctcttatgtcccatggggcttctcagtcagggactcctcctcctctcccttcttgaaagacaccttcttgaatccctggaccaaagatgcttccagaaatggtagttgaggtttcttggccccctttgaggagaggattaggcggctctttcacctgctgccttaagtacctgctctgggcatgtggatggac

SEQ ID NO: 32118 - DNA, 415 bp, Homo sapiens
aaaaccatgactcttgtgcctgacttcccatttagtctgatgagattgggagaacaatgccagattgattcattttgtttttaattgtcgtaaagaccattgaggggtgaggagaatgttgtttgaatttgacattttgaactgggaaacagcttggaaatgtaggcacaattccaggtaaataaactaaatatacttatgtgtgtatgtatatgtaagtctaattgcttaaaggtatacctctaagattccaaattgattgatgctagaaggcagctgtttgaggaccagaggcatggcttatatgcaaaatgatatggaaaaaaaataattggatcacagaaagacagtattatttaatcagaatttgaaatctggcagctctcctaggagaataaaatactattggattgca

SEQ ID NO: 32119 - DNA, 238 bp, Homo sapiens
tatataaaaacattgctgctattgcttgaactctttgggagagagagagagagagagagagagagtgtgtgtgtgtgtgtgtgtgtgtgtgtgtgaagttacttactgggtactatgtacattatttgggtaatgaaagcactgaaagtctaaacttcaccactatgcagtatacccaggtaacatcattgcacctgtaatctttaaatttacacaaataaaaagtaatagttggatt

SEQ ID NO: 32120 - DNA, 406 bp, Homo sapiens
tgagacgtagcctcactttgccgcccaggctggagtgcagtggcacgatctcagctcactgcaagccccgcctcccaggttcacgccattctcctgcctcagcttcccgagtagctgggactacaggcgtgagccactgtgcccagcgaaagtgattcttaatcttagtgaaattctgaaatacttgataattctttaaaagctgtctggttaagagtagaaaggaaatggttattgaatcagatagaccagttctgttgagggtcttaaagagtctcaattttctcatctataaaaccaatacctttccctcctggggctagtaagatttttttttttttttttttttttttgagacagagtctccactctgttgcccaggctggagtgcagtggtgcaatatcg

SEQ ID NO: 32121 - DNA, 274 bp, Homo sapiens
gcttagcttcaactttctcactttctcacggaacatttcattttggaatccacccatcaggctgtaagaagcccaggtcacatggagaggtcataaccaaggaaaacactgaccatccagcagacagtcaactccaactgccagccacgtgagtcagtcatcttcaacttcctagcccagtctaacctttgaataactgcagtcaagtcagcactatttggagatttgaaattctacattcaactaacctttaagaatcatcacacaacaaatt

SEQ ID NO: 32122 - DNA, 179 bp, Homo sapiens
tatgagagaggcttagcttttctctttcaaaggaaaccatcatttttctaaataaaccctactggtttgatgctcttttctctacttgaaacacattttctccctcctacccgagcaggatatttgcagtggagtgattctggtttctctttgttctccctgtctgacatgcctttgat

SEQ ID NO: 32123 - DNA, 609 bp, Homo sapiens
ggcctcaaaacttcacacagcaaatttatctagcagtggcatgcagggtaggttgagggttgagcaaggaggtcagttagcaaattcttcaggagtgaggtgatgggagtcttgttctaaagtggcgagaatggagaggaaacatgagagctgttggttgggccattgttcaggcagctgttgccatgtgtctgtttatttctctgtgcacttgggttaatctgtgatgaccatttaaggtgcagactcctggtgtgtggcagtggttctgtatggcgaattgggcaggtgccaagagggaattcataatccatcgctgacattatggagtacttacagtgggccacacatcctatgctaagtcctgaattacctctttcattcctcaccataactcagtgaggtatctgccattattctccctcttttacagacgagggaaccaaggctcagtgagcttcagtaatttgccacaagtcacacaactaggattcaaacccaagtctgtctgaccgcaaggtctttaaccatcatgtatactgcccgcctcattattgattgatagtaatgactgtttatagcatctttctcatgtttcttccttattta

SEQ ID NO: 32124 - DNA, 162 bp, Homo sapiens
attgctattaagtatttgttttgatcttgaaacttcatgtacacagaagggctttttgactacatttgaatttagaaaatataaaagtattagtgaaagcaaatttttaaggtctattttaagctctgttatatgttagttattaatagatttcacctatta

SEQ ID NO: 32125 - DNA, 471 bp, Homo sapiens
gcgggcggatcacgaggtcaggagatcaagaccatcctggctaacatggtgaaaccctgtctctactaaaaatacaaaaaaacacaatagctaacttcctatagcgtttttgagtataattacttacattattaaataagtttttttgatcagttaaagcactatttatgtactaaaaatcaagaggaaaagtagttctgctgtttgggaagagactattaaatcatttagattctaaatgaaatatgctttatgcagttaagaaagggagggagtgatgatactcatgttaactgagaggtatagcaggtcgtagactaagtacttaaaatgcttcatcttcaagaatcctcattaccctatttaatattctttttacaagtgagagaaacagatttgtctggcagagcatgagacagaatagcaggagagttacttgccaggtctaatctccatgtttgaataatacct

SEQ ID NO: 32126 - DNA, 434 bp, Homo sapiens
ttttcagtgaacccagatcacgccattgcactgcagcctaggcaacagagagagactccatctcaaaaaaaaaaaaaaagaaagaaagaaaaaagaacattttttacttatataattaatgaagttaactttcatttgagaaagacatcttagctcagatgggtcaaatccctaaaatcacttccccttcggaacttttcataaaagtcctgagagtcactcagcaacatgggtgcttgatacgcaaccttgaagactttgcgatgtccgggtagaatttcgccttaaccaactaatgaatgaaaacttaaaataactttttgttcttattccacaacgttaccacttttttaggagagctggtaaccaaagtgaatgatgtctgtagaccagtagttcctacacctaggtacaaattgcagttatctatggag

SEQ ID NO: 32127 - DNA, 1732 bp, Homo sapiens
  misc_feature (185)..(185): n is a, c, g, or t
ttaagtgaaggaatatgacacagaattttatgtatagagttccagatatcctgctcactacagactgaaattccatgcagtctaatagatgaatcagagcgtttccgtcttgtctgggtagtccctgggttccctttttggagggatttgtttttagataattataaattggtccaacagtgtantttcagtgcctcctacctccctctaccaagtatgaactgcatgcatggctaatgtatgatttcagctattattgcttcatttgcattgttcagtattttgtaattgttattaaaataaaaaactgacttggaacatgaattttaaaatggtgttttatccttctagtattgattaccacttttagaaaaattggtgtcatccagtgagttttatacagaaggattttttctcttatacatacatacatacatacatacaaaaaaaatttgtcatttgccctgtggttgttcattatgctgtagactttgaggttaaatagtcttttctctctagtatgggtttatcttctagaaacgataaaggattttctgttgcttaaaaacaagatttaaaaactaaatttgttgatgaaaagaccagccaatataaaactaaatggacagaggaaaaaattcaaccagaatgtaatatacatgtgaactaaatgttttctgttgctgacattttgtaggcttctgaaatttaatgggacttttacaaggtttaccttttttcctaaagtttaatttttaaactgacttaaatgttctttgaccctttggttatatttaagaagttgacttccctaatttccttgttatgtttatttttaaatatctttctttctagaagttgggatattataataaatactcagcaagtattgttttgcatttaaatataaaatcttgttatttggattttaatagtttatattaaatgcccttaagatttattaaaattttggattaactgaactctgcttttttgtcactggattgataagcaggcttatatctgacataacagcttaataaggtagtggcagtttaaatttgtcatgaatatgaattgaaaaaccataacaatttagaaatctgagattgaatatttcatggcatttatatttagtgttttatataatgattaatgaaaagaagcaaaacttaaaattttttttcaaaaatggataggttcaggccagatgcaatggcttacgcctgtaatcccagcactttggggaccaaggcaggaggaccattgcttgaggccacagactaggcaacatagtgagatcccatctctacaaaaaattaaaaagttagttgaggctgggcgcagtggctcacacctgtaattctagcactttgagaggctgaggcaggtggatcacctgaggtcaggagttcaagaccagcctggccaacatggtgaaacctcgtctctactaaaaatacaaaaattagccaggcttggtggtggatgcctgtaatcccagctactcaggaggctgaggcaggagaattgcttgaacccgggaggcggagattgcagtgagccaagattgtgccactgcactccagactgagcaataagagtgaaactaaaaaaagaaaaaaaaattagctgggcctgggggtgcactctgtagtcctagctacccaggagtcaaagtggaagaattggaggctatggtgagctatgactacaccactgcactccagcc

SEQ ID NO: 32128 - DNA, 600 bp, Homo sapiens
atcctttttaactaactcaggaaataaggtattatgaaatccacacactgttacctccttaaagtatgaggatacttcccactgtttggtccactagtggctgattattttgtttgtggattatttgtaattttctttttaattcttccttaaagagcatggcatttggagtcacagacctatatttgaatcctgtcatttactagcgttttgaccttgaacaattatgctcagagtctcagttttttcttgtaaagtgatgatgatactacttaactcacagggttgtagtgaagatcaaatgagatcatgtctgtagaacaccctgcccggcactcaataagtattaataggaacccatatacctcttttgaaaattttaattgtcagacaaataaaaaaaaaagccagtgctttgtaaatattcgtgaatatttagtgttcattctgtttttttgtcatgatggagagagagttgggtttctgtgaattactgttacagctttacattaatatttttaaatcactttttgggtatgaagaatttcaaatgaaaggtgatagagtagtatagtgaatcctcatgtactcatcagtcgg

SEQ ID NO: 32129 - DNA, 1044 bp, Homo sapiens
ctcactgtggggcatttcaccattcaaacaggtcgagctgtgctcgggtgctgccagctgctcccaatgtgccgatgtccgtgggcagaatgacttttattgagctcttgttccgtgccaggcattcaatcctcaggtctccaccaaggaggcaggattcttcccatggataggggagggggcggtaggggctgcagggacaaacatcgttggggggtgagtgtgaaaggtgctgatggccctcatctccagctaactgtggagaagcccctgggggctccctgattaatggaggcttagctttctggatggcatctagccagaggctggagacaggtgcgcccctggtggtcacaggctgtgccttggtttcctgagccacctttactctgctctatgccaggctgtgctagcaacacccaaaggtggcctgcggggagccatcacctaggactgactcggcagtgtgcagtggtgcatgcactgtctcagccaacccgctccactacccggcagggtacacattcgcacccctacttcacagaggaagaaacctggaaccagagggggcgtgcctgccaagctcacacagcaggaactgagccagaaacgcagattgggctggctctgaagccaagcctcttcttacttcacccggctgggctcctcatttttacgggtaacagtgaggctgggaaggggaacacagaccaggaagctcggtgagtgatggcagaacgatgcctgcaggcatggaactttttccgttatcacccaggcctgattcactggcctggcggagatgcttctaaggcatggtcgggggagagggccaacaactgtccctccttgagcaccagccccacccaagcaagcagacatttatcttttgggtctgtcctctctgttgcctttttacagccaacttttctagacctgttttgcttttgtaacttgaagatatttattctgggttttgtagcatttttattaatatggtgactttttaaaataaaaacaaacaaacgttgtcctaaaaaaaaa

SEQ ID NO: 32130 - DNA, 378 bp, Homo sapiens
ccaataatcttaatactgtagaccttcaagtcttcctgagtgtacctgttggttgtgcccttttagaagtatgctctttcaaaagtatgtttcttggctgggcgtggtggctcacatctgtaatcccagccctttgggaggcctaggcgggtggatcacttgaggtcaggagtttgagaccagcctggccaacatggcgaaaccccgtctttactaaaaatacaaaaaatagccgggcctggtgacatatgcctgtaatcccagctactcgagaggctgaggcaggagaattgcttgaacccaggaggcagaggttgtagtgagccgagatcgcgccattgcactccagcctgggcaacagagtgagactcaaaaaaa

SEQ ID NO: 32131 - DNA, 391 bp, Homo sapiens
  misc_feature (14)..(14): n is a, c, g, or t
  misc_feature (101)..(101): n is a, c, g, or t
ctcgcacacgcgcngtgttcgtgtggaagtcgttgcccaggcgcgtgtagtacttttctatgatgacccgggccgccttcttcacggttttggtgcgaacnggcccatgttggcgggtccttggtaaaagaactgctcaagatcccattgcttttttttttttttttgtaatagtgcgtgtttatattcaggagtgcttaatccaagaacctgtgatttctgctcttgttttacctcctatgaacgaaaaattgttgtccttacggttttttctgctttctttgaaatgttccttacagaataactacatgaatgtaatcacatgcatttaaaatagtctagagaatatagtgtgaaactataatggtatttttttagatgaggtttctgg

SEQ ID NO: 32132 - DNA, 258 bp, Homo sapiens
gagtgaagtggcagcaaggaaatgggcaaactggaaaggaacgctgaaggtagtccggcgaggctgagtgatggacggaatgggtgagggaagagcaggccagcggcaaccctcagtcaccttcctcacgggtgcgtcgagatgaaggagccgagagtcatcgggccaggagacccggagcagcgctgggagtgctacgcacgcattccttatgttcaaaggccgagtgcagctcattactgctgaccctgaaactgc

SEQ ID NO: 32133 - DNA, 265 bp, Homo sapiens
aaaatcaggaaaaagtaatctcttataaaatgaataacagactacttaaaagtgtacctttattttgtagttgttaacatttccagatttaaagagaatattgcattttatgagacacttaggagaacacaaaaagtgctctttaatgttattgaaagatgtatattcaaaatatcttggaatgaatttcaagaaaagcaacagatcgtagtgtttacatgatttacaatctctcagcagatttcaactaattaatagctaatat

SEQ ID NO: 32134 - DNA, 410 bp, Homo sapiens
tctacagtatgaaaggtgtttttggaaagtagtgctaaaattataaaaggagcctcaaatttgactttctgttccataaagtttctgccatccccaatctgaaccccagccttccctgcagacagcaattggcatccccgctcccttctctcagctatcttaggcagatgcagaacaaacaagagaaagacatcttcaaacaggcattaaacaaggcagtgctatcgtttcttcaagggccaaggtcttgtttagggctcaaggagcttctattccactgagacctcctaggctggggctctcatagtgttaccaaggagaccattggcttgttagggaagaactcagcagcctccattatctcctaaagtcttgcaccttgtttcatgagcaattaaaaatgaaaacac

SEQ ID NO: 32135 - DNA, 330 bp, Homo sapiens
agtacatggtatttggccacatttcaaatgggtgatagtgaacattcactgaagtgtcatagatggctcttatttgccaggtcaaatcttctttgcgagaaagtctcagccaactgttgtcaagcatttctggtggttcctagatacatgaacaaaacctcactagactggtttactgagagcagaattaaaaacacccgggtgccaggttattaaaaacatttttacatttttacatttatggaaaaaaaaatgtgatgtggtgtgtggcttggtttgaatacatcttcactgagctaagtagctgattgaatttacctaacctgaagg

SEQ ID NO: 32136 - DNA, 357 bp, Homo sapiens
taaaattgcagctgttactgaataagcaggataggtttaaaatttggcctccataattaaattcaccttaatgaatatttttagaaaaacggcattctttttcagagtgtcaccttgaagacatgtgtttattctttttttaaattttcccaaaatagctgctatgctccttgaaagtctaggggtaagcattttttatttgctatgtattctttatgtgattatttaaaattagtgtataaaaatggttttcttgataaatgtggcttatctaaattagtgttaagttttcttattgtgtttacatgacatattttttgacagtaacagctaccttttacggtccgctaggtcgca

SEQ ID NO: 32137 - DNA, 3825 bp, Homo sapiens
gtgcgctggtgaggtggcgtccgttctacccggtcgctcccgttccgcgccatgcagagcccagtctctggcacctggctgctctgatctggtctcagcgcggagggagcagagggagtccatggaggatccctccgagcccgaccggttggcgtccgcggacggcgggagcccggaggaggaggaggatggggagcgggagccgctgctaccgcggatcgcctgggcccacccgcggagaggcgccccaggcagcgccgtgaggctgctggacgctgccggggaggagggcgaggccggcgacgaggagctgcccctcccgcccggggacgtgggggtctcccggagttcgcccgccgagctggaccggagccgccccgcggtttcagtaactattggtacttcagagatgaatgcattcttggatgacccagaatttgctgatattatgctgagagcagagcaagcaatagaagttggaatttttccagaaagaatctctcaaggttcaagtggaagttactttgtgaaggatcctaagaggaaaattattggtgtgtttaaacccaaatcagaagagccttatggtcaactcaatccaaaatggaccaaatatgtccataaggtctgctgcccttgctgctttggccgaggctgcctgattcctaatcaggggtacctttccgaagcgggtgcctatcttgtggacaacaagcttcatctgagcattgtacctaaaacaaaggtggtttggcttgtcagtgagacatttaactataatgcgattgaccgtgcaaaatcaagaggcaaaaagtatgctttagaaaaagtgccaaaagtgggtagaaagtttcataggataggactccctcctaagattggttcctttcagttatttgttgaaggttacaaggaggctgaatattggcttaggaaatttgaagctgaccctttgcctgagaatattagaaaacaatttcagtcacaatttgaaagattagttattttggattacatcatcagaaatacagacaggggcaatgataattggttagtcagatacgaaaagcagaaatgtgaaaaggaaattgaccataaggaatcaaaatggattgatgatgaagaattccttattaaaatagctgcaattgataatggtctagcatttccttttaaacatcctgatgaatggagagcatatccatttcactgggcttggcttcctcaagcaaaagttcccttttctgaagaaataagaaatttgattctaccatatatttctgacatgaactttgtgcaagatttatgtgaagatctctatgaactttttaagactgacaaaggatttgacaaagccacttttgaaagtcagatgtctgtgatgaggggtcagatcttaaaccttactcaggcattgagagacgggaagagtcctttccagctagtacagataccttgtgtgattgtggaacgcagtcaaggtggaagtcagggtcggattgtccacctgagcaattcctttacccagactgtcaattgcaggaagccatttttttcctcctggtagtaaatgtcagagtaagagaaacaaactgtttagaattatcatgtttttaaaacatcatagtaatataaatctgctgttaggagctccagttgctaaaacctcaatttaagtctttaaaaggttgtattttgaatgtaaccaaaagtttacagttttttgtccaaatattaaatttctatttcagggaagaagtgctatatctcctatattgtatttttgtagaaaatttgtattttatgttgttgttagtttaaaaggtaattttacacatgctggaatgactgtaattactctagaattccaagtagaatacaataacttttaatattgagaagaatgttcatgctaattcttcttacattacaaaaggcctttgaggatgcctacgtctgaaattgctcttacgaactttaataaaatagttagctaatagaaaaacaggtaagaataaagcaatgttgccttaatttcaaaagctgctattttagaatttgaataagtactcctaaagtgaccattattagggaccagaaaattatatcttggctaagtaatagaggaccattttggtttttgtacttgagaatatttttggtgaattactttgttgtagtgaggaaaaaacctaagaaatttcccctttttttaaaaaatggaaatattcaattgagacttgaggggaataatagaaaattaaggtagatccccaatattttggaataccaaaattgccttaaaaattcccttctgtttcttacatgggatcaaatacttgagattagtacttcagagtactggccttgttcaatttagtacttcaattagtattaaacttcactaaaaagtaaaccatactccaaattgtatattggattgcattttggggtcctaggtcatacgttcttcaaaattattatgattgtactattgtacttgaaattacagatgttattataattacagtcaaatgtagactatcaggccaaattaaaggggagcatggcagataaccataaagtcatttatatttgattttgaaatgtatttttgtactttattttgaatatcatccatatgtctgacattattggaatttgtaacattgttaatgcactaagtgatttaaattcaattgatgaagatgtgattttacagaagcagaagtttcattttcttgaggcttaaaaccaatgtcaccacttgggcttaactgggtaatttgtggtctaggccttttgttttctaagcttactatcttgtgtttgtttatttgcttttaatgaagtattttgtgtagaaggttaaattaggatgcaaaacagatctgccattcctttttcccttatatcttccttttggtcttcatggacgagatgaatgaggattctgctgccctgagggagttcattggaaacctgcgttctcctacctcttccaaccctccattagctcaattttgagataatggaaaattgactggaaattcaaaactcaaactactatctttagatataaacactagtaattaaaatgtgccttttgaagatgttttctaagagaaaggaaatacgttgcagtgatgtgggtactgctttcataaaacagttttttcagtattttgagaattgccatattaatttttataatggaaaacttaataaattgctactgttttatatcataaaattaaaataccatggtaatatttgcaaaaggtctggccataccagaaaagtacagttgagatagttaagatataaccacaagtcagagtacattggttgtattttgtaaactttcatgaactgaattcttatttaaatagtatggttttttttcaataagtatatttatagtgacaaatgtggtagactaaaggtaataaaaatcattgtcttaagattatgttcttctgtatgtacgtgtttggaatatttagaatgtttatgaacacatttactataaatgatgccaaactatcattttcttcatatattaaaggtatagtttaattctttttttttttttttttttgagacggagtctcactctgtaatcccagctactcaagaggctgaggcacaagaattattgaacccaggagggagggtggaggttgcagtgagccgagatcacaccactgccttccagcctgggtgacagagtagattctgtctcaaacaaacaaacaaacaaacaaacaaaaaaattgaagtactgtactatatggaattaaaaccttttttaaaaatgacggt

SEQ ID NO: 32138 - DNA, 3466 bp, Homo sapiens
gtgcgctggtgaggtggcgtccgttctacccggtcgctcccgttccgcgccatgcagagcccagtctctggcacctggctgctctgatctggtctcagcgcggagggagcagagggagtccatggaggatccctccgagcccgaccggttggcgtccgcggacggcgggagcccggaggaggaggaggatggggagcgggagccgctgctaccgcggatcgcctgggcccacccgcggagaggcgccccaggcagcgccgtgaggctgctggacgctgccggggaggagggcgaggccggcgacgaggagctgcccctcccgcccggggacgtgggggtctcccggagttcgcccgccgagctggaccggagccgccccgcggtttcagtaactattggtacttcagagatgaatgcattcttggatgacccagaatttgctgatattatgctgagagcagagcaagcaatagaagttggaatttttccagaaagaatctctcaaggttcaagtggaagttactttgtgaaggatcctaagaggaaaattattggtgtgtttaaacccaaatcagaagagccttatggtcaactcaatccaaaatggaccaaatatgtccataaggtctgctgcccttgctgctttggccgaggctgcctgattcctaatcaggggtacctttccgaagcgggtgcctatcttgtggacaacaagcttcatctgagcattgtacctaaaacaaaggtggtttggcttgtcagtgagacatttaactataatgcgattgaccgtgcaaaatcaagaggcaaaaagtatgctttagaaaaagtgccaaaagtgggtagaaagtttcataggataggactccctcctaagattggttcctttcagttatttgttgaaggttacaaggaggctgaatattggcttaggaaatttgaagctgaccctttgcctgagaatattagaaaacaatttcagtcacaatttgaaagattagttattttggattacatcatcagaaatacagacaggggcaatgataattggttagtcagatacgaaaagcagaaatgtgaaaaggaaattgaccataaggaatcaaaatggattgatgatgaagaattccttattaaaatagctgcaattgataatggtctagcatttccttttaaacatcctgatgaatggagagcatatccatttcactgggcttggcttcctcaagcaaaagttcccttttctgaagaaataagaaatttgattctaccatatatttctgacatgaactttgtgcaagatttatgtgaagatctctatgaactttttaagactgacaaaggatttgacaaagccacttttgaaagtcagatgtctgtgatgaggggtcagatcttaaaccttactcaggcattgagagacgggaagagtcctttccagctagtacagataccttgtgtgattgtggaacgcagtcaaggtggaagtcagggtcggattgtccacctgagcaattcctttacccagactgtcaattgcaggaagccatttttttcctcctggtagtaaatgtcagagtaagagaaacaaactgtttagaattatcatgtttttaaaacatcatagtaatataaatctgctgttaggagctccagttgctaaaacctcaatttaagtctttaaaaggttgtattttgaatgtaaccaaaagtttacagttttttgtccaaatattaaatttctatttcagggaagaagtgctatatctcctatattgtatttttgtagaaaatttgtattttatgttgttgttagtttaaaaggtaattttacacatgctggaatgactgtaattactctagaattccaagtagaatacaataacttttaatattgagaagaatgttcatgctaattcttcttacattacaaaaggcctttgaggatgcctacgtctgaaattgctcttacgaactttaataaaatagttagctaatagaaaaacaggtaagaataaagcaatgttgccttaatttcaaaagctgctattttagaatttgaataagtactcctaaagtgaccattattagggaccagaaaattatatcttggctaagtaatagaggaccattttggtttttgtacttgagaatatttttggtgaattactttgttgtagtgaggaaaaaacctaagaaatttcccctttttttaaaaaatggaaatattcaattgagacttgaggggaataatagaaaattaaggtagatccccaatattttggaataccaaaattgccttaaaaattcccttctgtttcttacatgggatcaaatacttgagattagtacttcagagtactggccttgttcaatttagtacttcaattagtattaaacttcactaaaaagtaaaccatactccaaattgtatattggattgcattttggggtcctaggtcatacgttcttcaaaattattatgattgtactattgtacttgaaattacagatgttattataattacagtcaaatgtagactatcaggccaaattaaaggggagcatggcagataaccataaagtcatttatatttgattttgaaatgtatttttgtactttattttgaatatcatccatatgtctgacattattggaatttgtaacattgttaatgcactaagtgatttaaattcaattgatgaagatgtgattttacagaagcagaagtttcattttcttgaggcttaaaaccaatgtcaccacttgggcttaactgggtaatttgtggtctaggccttttgttttctaagcttactatcttgtgtttgtttatttgcttttaatgaagtattttgtgtagaaggttaaattaggatgcaaaacagatctgccattcctttttcccttatatcttccttttggtcttcatggacgagatgaatgaggattctgctgccctgagggagttcattggaaacctgcgttctcctacctcttccaaccctccattagctcaattttgagataatggaaaattgactggaaattcaaaactcaaactactatctttagatataaacactagtaattaaaatgtgccttttgaagatgttttctaagagaaaggaaatacgttgcagtgatgtgggtactgctttcataaaacagttttttcagtattttgagaattgccatattaatttttataatggaaaacttaataaattgctactgttttatatcataaaattaaaataccatggtaatatttgcaaaaggtctggccataccagaaaagtacagttgagatagttaagatataaccacaagtcagagtacattggttgtattttgtaaactttcatgaactgaattcttatttaaatagtatggttttttttcaataagtatatttatagtgacaaatgtggtagactaaaggtaataaaaatcattgtctta

SEQ ID NO: 32139 - DNA, 3771 bp, Homo sapiens
gtgcgctggtgaggtggcgtccgttctacccggtcgctcccgttccgcgccatgcagagcccagtctctggcacctggctgctctgatctggtctcagcgcggagggagcagagggagtccatggaggatccctccgagcccgaccggttggcgtccgcggacggcgggagcccggaggaggaggaggatggggagcgggagccgctgctaccgcggatcgcctgggcccacccgcggagaggcgccccaggcagcgccgtgaggctgctggacgctgccggggaggagggcgaggccggcgacgaggagctgcccctcccgcccggggacgtgggggtctcccggagttcgcccgccgagctggaccggagccgccccgcggtttcagtaactattggtacttcagagatgaatgcattcttggatgacccagaatttgctgatattatgctgagagcagagcaagcaatagaagttggaatttttccagaaagaatctctcaaggttcaagtggaagttactttgtgaaggatcctaagaggaaaattattggtgtgtttaaacccaaatcagaagagccttatggtcaactcaatccaaaatggaccaaatatgtccataaggtctgctgcccttgctgctttggccgaggctgcctgattcctaatcaggggtacctttccgaagcgggtgcctatcttgtggacaacaagcttcatctgagcattgtacctaaaacaaaggtggtttggcttgtcagtgagacatttaactataatgcgattgaccgtgcaaaatcaagaggcaaaaagtatgctttagaaaaagtgccaaaagtgggtagaaagtttcataggataggactccctcctaagattggttcctttcagttatttgttgaaggttacaaggaggctgaatattggcttaggaaatttgaagctgaccctttgcctgagaatattagaaaacaatttcagtcacaatttgaaagattagttattttggattacatcatcagaaatacagacaggggcaatgataattggttagtcagatacgaaaagcagaaatgtgaaaaggaaattgaccataaggaatcaaaatggattgatgatgaagaattccttattaaaatagctgcaattgataatggtctagcatttccttttaaacatcctgatgaatggagagcatatccatttcactgggcttggcttcctcaagcaaaagttcccttttctgaagaaataagaaatttgattctaccatatatttctgacatgaactttgtgcaagatttatgtgaagatctctatgaactttttaagactgacaaaggatttgacaaagccacttttgaaagtcagatgtctgtgatgaggggtcagatcttaaaccttactcaggcattgagagacgggaagagtcctttccagctagtacagataccttgtgtgattgtggaacgcagtcaaggtggaagtcagggtcggattgtccacctgagcaattcctttacccagactgtcaattgcaggaagccatttttttcctcctggtagtaaatgtcagagtaagagaaacaaactgtttagaattatcatgtttttaaaacatcatagtaatataaatctgctgttaggagctccagttgctaaaacctcaatttaagtctttaaaaggttgtattttgaatgtaaccaaaagtttacagttttttgtccaaatattaaatttctatttcagggaagaagtgctatatctcctatattgtatttttgtagaaaatttgtattttatgttgttgttagtttaaaaggtaattttacacatgctggaatgactgtaattactctagaattccaagtagaatacaataacttttaatattgagaagaatgttcatgctaattcttcttacattacaaaaggcctttgaggatgcctacgtctgaaattgctcttacgaactttaataaaatagttagctaatagaaaaacaggtaagaataaagcaatgttgccttaatttcaaaagctgctattttagaatttgaataagtactcctaaagtgaccattattagggaccagaaaattatatcttggctaagtaatagaggaccattttggtttttgtacttgagaatatttttggtgaattactttgttgtagtgaggaaaaaacctaagaaatttcccctttttttaaaaaatggaaatattcaattgagacttgaggggaataatagaaaattaaggtagatccccaatattttggaataccaaaattgccttaaaaattcccttctgtttcttacatgggatcaaatacttgagattagtacttcagagtactggccttgttcaatttagtacttcaattagtattaaacttcactaaaaagtaaaccatactccaaattgtatattggattgcattttggggtcctaggtcatacgttcttcaaaattattatgattgtactattgtacttgaaattacagatgttattataattacagtcaaatgtagactatcaggccaaattaaaggggagcatggcagataaccataaagtcatttatatttgattttgaaatgtatttttgtactttattttgaatatcatccatatgtctgacattattggaatttgtaacattgttaatgcactaagtgatttaaattcaattgatgaagatgtgattttacagaagcagaagtttcattttcttgaggcttgttttctaagcttactatcttgtgtttgtttatttgcttttaatgaagtattttgtgtagaaggttaaattaggatgcaaaacagatctgccattcctttttcccttatatcttccttttggtcttcatggacgagatgaatgaggattctgctgccctgagggagttcattggaaacctgcgttctcctacctcttccaaccctccattagctcaattttgagataatggaaaattgactggaaattcaaaactcaaactactatctttagatataaacactagtaattaaaatgtgccttttgaagatgttttctaagagaaaggaaatacgttgcagtgatgtgggtactgctttcataaaacagttttttcagtattttgagaattgccatattaatttttataatggaaaacttaataaattgctactgttttatatcataaaattaaaataccatggtaatatttgcaaaaggtctggccataccagaaaagtacagttgagatagttaagatataaccacaagtcagagtacattggttgtattttgtaaactttcatgaactgaattcttatttaaatagtatggttttttttcaataagtatatttatagtgacaaatgtggtagactaaaggtaataaaaatcattgtcttaagattatgttcttctgtatgtacgtgtttggaatatttagaatgtttatgaacacatttactataaatgatgccaaactatcattttcttcatatattaaaggtatagtttaattctttttttttttttttttttgagacggagtctcactctgtaatcccagctactcaagaggctgaggcacaagaattattgaacccaggagggagggtggaggttgcagtgagccgagatcacaccactgccttccagcctgggtgacagagtagattctgtctcaaacaaacaaacaaacaaacaaacaaaaaaattgaagtactgtactatatggaattaaaaccttttttaaaaatgacggt

SEQ ID NO: 32140 - DNA, 1617 bp, Homo sapiens
gtgcgctggtgaggtggcgtccgttctacccggtcgctcccgttccgcgccatgcagagcccagtctctggcacctggctgctctgatctggtctcagcgcggagggagcagagggagtccatggaggatccctccgagcccgaccggttggcgtccgcggacggcgggagcccggaggaggaggaggatggggagcgggagccgctgctaccgcggatcgcctgggcccacccgcggagaggcgccccaggcagcgccgtgaggctgctggacgctgccggggaggagggcgaggccggcgacgaggagctgcccctcccgcccggggacgtgggggtctcccggagttcgcccgccgagctggaccggagccgccccgcggtttcagtaactattggtacttcagagatgaatgcattcttggatgacccagaatttgctgatattatgctgagagcagagcaagcaatagaagttggaatttttccagaaagaatctctcaaggttcaagtggaagttactttgtgaaggatcctaagaggaaaattattggtgtgtttaaacccaaatcagaagagccttatggtcaactcaatccaaaatggaccaaatatgtccataaggtctgctgcccttgctgctttggccgaggctgcctgattcctaatcaggggtacctttccgaagcgggtgcctatcttgtggacaacaagcttcatctgagcattgtacctaaaacaaaggtggtttggcttgtcagtgagacatttaactataatgcgattgaccgtgcaaaatcaagaggcaaaaagtatgctttagaaaaagtgccaaaagtgggtagaaagtttcataggataggactccctcctaagattggttcctttcagttatttgttgaaggttacaaggaggctgaatattggcttaggaaatttgaagctgaccctttgcctgagaatattagaaaacaatttcagtcacaatttgaaagattagttattttggattacatcatcagaaatacagacaggggcaatgataattggttagtcagatacgaaaagcagaaatgtgaaaaggaaattgaccataaggaatcaaaatggattgatgatgaagaattccttattaaaatagctgcaattgataatggtctagcatttccttttaaacatcctgatgaatggagagcatatccatttcactgggcttggcttcctcaagcaaaagttcccttttctgaagaaataagaaatttgattctaccatatatttctgacatgaactttgtgcaagatttatgtgaagatctctatgaactttttaagactgacaaaggatttgacaaagccacttttgaaagtcagatgtctgtgatgaggggtcagatcttaaaccttactcaggcattgagagacgggaagagtcctttccagctagtacagataccttgtgtgattgtggaacgcagtcaaggtggaagtcagggtcggattgtccacctgagcaattcctttacccagactgtcaattgcaggaagccatttttttcctcctggtagtaaatgtcagagtaagagaaaaccaggctgcaggagaaaaccagctcaga

SEQ ID NO: 32141 - DNA, 1545 bp, Homo sapiens
  misc_feature (1519)..(1519): n is a, c, g, or t
  misc_feature (1521)..(1521): n is a, c, g, or t
  misc_feature (1528)..(1528): n is a, c, g, or t
gtgcgctggtgaggtggcgtccgttctacccggtcgctcccgttccgcgccatgcagagcccagtctctggcacctggctgctctgatctggtctcagcgcggagggagcagagggagtccatggaggatccctccgagcccgaccggttggcgtccgcggacggcgggagcccggaggaggaggaggatggggagcgggagccgctgctaccgcggatcgcctgggcccacccgcggagaggcgccccaggcagcgccgtgaggctgctggacgctgccggggaggagggcgaggccggcgacgaggagctgcccctcccgcccggggacgtgggggtctcccggagttcgcccgccgagctggaccggagccgccccgcggtttcagtaactattggtacttcagagatgaatgcattcttggatgacccagaatttgctgatattatgctgagagcagagcaagcaatagaagttggaatttttccagaaagaatctctcaaggttcaagtggaagttactttgtgaaggatcctaagaggaaaattattggtgtgtttaaacccaaatcagaagagccttatggtcaactcaatccaaaatggaccaaatatgtccataaggtctgctgcccttgctgctttggccgaggctgcctgattcctaatcaggggtacctttccgaagcgggtgcctatcttgtggacaacaagcttcatctgagcattgtacctaaaacaaaggtggtttggcttgtcagtgagacatttaactataatgcgattgaccgtgcaaaatcaagaggcaaaaagtatgctttagaaaaagtgccaaaagtgggtagaaagtttcataggataggactccctcctaagattggttcctttcagttatttgttgaaggttacaaggaggctgaatattggcttaggaaatttgaagctgaccctttgcctgagaatattagaaaacaatttcagtcacaatttgaaagattagttattttggattacatcatcagaaatacaggtattgaagttctctcatttgttcacgtaaatcttgttcattttcaaactatattcttgttatccaaatcaaagcggtaaacttttgttgcagaagtcttgaagccactttctctgtctgtcttggcaaacagatgtagtattgactctcctgggcagaattcatcctgtgtgggatagattctgactcatagcaggctcctagatcagttcctgtcccctagggaggaatttcctaggggcagggcaaagtcagatattggaaatgttatctgcataatgtgagtaattaaggcttcattgtataaattatgttaggtgcttattttgacattatgtaactcttagtgtagtctataaatacactaaactcttaatttttcctgtgctataaaggagcaatgacgtagaccagggatgtccagtcttttggcttccctgggccacactggaagaagaattgtcttgggccacacataaaaacagtancnctaatgncagctgatgagcttaaa

SEQ ID NO: 32142 - DNA, 1454 bp, Homo sapiens
gtgcgctggtgaggtggcgtccgttctacccggtcgctcccgttccgcgccatgcagagcccagtctctggcacctggctgctctgatctggtctcagcgcggagggagcagagggagtccatggaggatccctccgagcccgaccggttggcgtccgcggacggcgggagcccggaggaggaggaggatggggagcgggagccgctgctaccgcggatcgcctgggcccacccgcggagaggcgccccaggcagcgccgtgaggctgctggacgctgccggggaggagggcgaggccggcgacgaggagctgcccctcccgcccggggacgtgggggtctcccggagttcgcccgccgagctggaccggagccgccccgcggtttcagtaactattggtacttcagagatgaatgcattcttggatgacccagaatttgctgatattatgctgagagcagagcaagcaatagaagttggaatttttccagaaagaatctctcaaggttcaagtggaagttactttgtgaaggatcctaagaggaaaattattggtgtgtttaaacccaaatcagaagagccttatggtcaactcaatccaaaatggaccaaatatgtccataaggtctgctgcccttgctgctttggccgaggctgcctgattcctaatcaggggtacctttccgaagcgggtgcctatcttgtggacaacaagcttcatctgagcattgtacctaaaacaaaggtggtttggcttgtcagtgagacatttaactataatgcgattgaccgtgcaaaatcaagaggcaaaaagtatgctttagaaaaagtgccaaaagtgggtagaaagtttcataggataggactccctcctaagagggtctcactctgttgccccagctggagtacagtgttgtgaacagggcttactgcagcctcgacctcgtgggctcggataatcttcctgcctcaggcttctgagtagctgggaccacaggtgcacaccaccacacctggctaattaaaaaaaattttttttgtagagatagagtctcaccatgttgcctaggctggtcttgaattcctgggctgaagcaatcctctcgctttggcctcccaaagtgctgggattacaggtgttagccgctgtgcctggccaagttccttactctaagctccagtttctataaaatgagaatgacaaaaactacctcttaggttgttgtgaggagaaaactaagaaattcatgtcaaggacttggtacatagtaaaggttaagtaaatggcagcagctatgtttacttactacacattaggttttcttttttcttatcacctttaagtaaacctgagggatgatgagcagccagctaaacaagggtagagagggttaatgggaaaggcattctagaaaaagctttaagacttattttttagaaatgtatttggctta

SEQ ID NO: 32143 - DNA, 487 bp, Homo sapiens
aattcaagcttctaacgatgtacggggacatgaactgaattcttatttaaatagtatggttttttttcaataagtatatttatagtgacaaatgtggtagactaaaggtaataaaaatcattgtcttaagattatgttcttctgtatgtacgtgtttggaatatttagaatgtttatgaacacatttactataaatgatgccaaactatcattttcttcatatattaaaggtatagtttaattctttttttttttttttttttgagacggagtctcactctgtaatcccagctactcaagaggctgaggcacaagaattattgaacccaggagggagggtggaggttgcagtgagccgagatcacaccactgccttccagcctgggtgacagagtagattctgtctcaaacaaacaaacaaacaaacaaacaaaaaaattgaagtactgtactatatggaattaaaaccttttttaaaaatgacggt

SEQ ID NO: 32144 - DNA, 386 bp, Homo sapiens
ttgtgtttacatgacatattttttgacagtactgctgagaaatataaatattaatccccttgttcttgtactttcttttctaactatagttcttaaaattatagattggttcctttcagttatttgttgaaggttacaaggaggctgaatattggcttaggaaatttgaagctgaccctttgcctgagaatattagaaaacaatttcagtcacaatttgaaagattagttattttggattacatcatcagaaatacaggtattgaagttctctcatttgttcacgtaaatcttgttcattttcaaactatattcttgttatccaaatcaaagcggtaaacttttgttgcagaagtcttgaagccactttctctgtctgtcttggca

SEQ ID NO: 32145 - DNA, 173 bp, Homo sapiens
aaaagagaaagccccacctgagtatcaggaagaacccagtcctgctaactccacacaggttgcagttgcaaaggcaattaaagccactgtacagagcccacttcagcaccactcagaggctgggctggttctgagatccccaaagcggaagcaaccgtcctagcaaagtcttc

SEQ ID NO: 32146 - DNA, 544 bp, Homo sapiens
tctaaaatattgaaataaaatcatgtttggcttacttttcaaggaaataaaactgctgtactttcattcacagctgatgaaagaattacagaagaatatgggcaacaacaattgtagtagatttttaagtacctagttaaaaagtgttctgggccatccagatatatggaaagcaatattccttaatcttctctcctggagctcatttgctcacgtaaaagttaattataaaacattgctatatgacttctactggaggagaattcaccatgctgggaatggcagcaggttgcagtggagaaggctctgaatcgaccatgagggggctttgagttcaagggcaattacccaaccactctctgtgcctgttctccaaccagtcaaacaaatgggttggacatgatgaacttaaaggtccctttcattttgaaaaatgacacaaaaaggacagaaagacacattcagattcactttggtttctaagataacaccaaacactttgaaacttcccccttcatgtttttcaagcagaggaagtaaaaaa

SEQ ID NO: 32147 - DNA, 385 bp, Homo sapiens
atgttttgtcttaacatggtacacccaatccttgtaagacaaactaggaacacagcgatgggataccaaagccaacagacagcatctaattaggcattgcagaacactgtcctcaaaggaaaatgccaaagagcctggggatagggagagagtgggtccactcacaagcagagaccttccctaccccacacagccttctctggctttcttgagacatctgagctttcatgagtccaaacatctttcatggaaatatctgcatcaagaacaaatgcagtttggatcaatgttttccaccaatttctagatttgtgagaaaatgccaagcattcttttcttaccagtaaaagaatcacatgtcctaaataaaagaattaaattcttc

SEQ ID NO: 32148 - DNA, 1214 bp, Homo sapiens
caaaatgcattcagaaaatattgatgaatgctaatactaacttaattgtggaagtgttaggtgttcatcataggaaaaccttcattaccatggatacttttctctcagtcctgcctctagattgatgagaaagaatgatctacaataaattcaattcgtgcttctcccagatacagggttaaatgtgagacagcaacattttagttgcattaaaaatgtccctggttattgcttcggcctccctctgctgtaaaggctggatatgagtttgcatagcaagtagctaaacttaaactttcccactcttctgaaagatggtagaaagtttaaccagtaaaaatataatgcacaaaaggtaagttcatttttagtgtcttgcagcctgcttagttggtgtaaagaatggactactgaaagatagtaaaagcaccgaacttaaaattttactatcagaaacatgaaattgtcaccgaaattttatttaaaaactcacagaattgttggcataacagtgacttacagcttattcatcagagcaagttagtagaaacccaaatgctattctcagatatccattcttttctcagatattgacttgcgtgtttttacacttcctaatgaaattgtttaaaagcaacatatgtagttgtcaagcaagctaaattggtagccgaatgaacccaacgacgtgaggctgcattacattttgtaaatcctaagtcatattcaacttgttctatatactgatttccttattcctgttaggaaaggaagttgaaagtttagacttgtccagatttcagctttgaggattcctctatcacatgaggcttggggtggtctgcgtttgtttcagcttaagagccatagcaaagatgcttcggggtgttgaaagcaacagctacattgcagagaagcaaggacagaactcgcaggtgtccagaaggagagtgagctgtgggagagagtctgggaatgggcagcgatggaggaaaagagaaatgttgaggacccctcacctcccttgtactttgtttcttcaagcctaacgttgtgtaatctattgtgttgtcttgcttatccaggacgaaaaatggatctctaatgaatacaatcatatctgtaagctacagattttaccatcaaaaatatgatttattagtaaagctgccacatggcactgatttactggcctttgtattaatcatataaaa

SEQ ID NO: 32149 - DNA, 518 bp, Homo sapiens
gatatacagatgtccgaaaaagcacatcaagagatgttcaacattactagtcattagggaaatacaagtaaaactacaatgagatactactacatacctattaacatgactacacacacatacacacacacacacacacacacacaaaactgaggataccaagtgctggtgaggatgtggagtaattggaactcttacacattgctggtgagagtgcaaaataatacagtcactttggaaaacagtttgacagtgtcttttaaagttaaacatacaatatgatctagttattccacttctagatatttatacaaatataatgaaaacctatgtttgtacaaaaaaaaacttgtttgtgaatgtttattgatgccttattcataatcatcaaaacccggaaacaacccaaagatccctcaactggggaatgaattaaaaatgtaaaccaactatggtacatgtatacaataaatgagtactcagcaataaatgagagtaaactattgttacatgcaata

SEQ ID NO: 32150 - DNA, 592 bp, Homo sapiens
tctactgttaagactctactactaagacacagatgctcttgttgcactgttcagctgacatttaccagactgggacactggtttcctggcagtagtagctattggctgactcatgtctgccctcttctctggaggattgcacttgactgatgagagccatcttatgttgagatgattgggagattagactccttagcaaagctccattggtcctgtactgaagccagtggccaacccatggggtcatagcagcacaaaccactactttataagtataatggctttgtgccatgatctacacagcagaatttctcggggaaatacgtgaggacagacatctcctaaaatcacacttttgtttagttcaagggtgggtaaatttttctgtatggggacagatagtaaatattttagggtctgcaaagccatatggtctctattgcaacaactcaacaatgctggtgtagggacaaaggagacagtaattagcagagtagggtaccagcataaagacagataaatagagcagaatagagcccagaatataacccatcaatagaatatcaagtgatcttctacaagggtgccaaga

SEQ ID NO: 32151 - DNA, 181 bp, Homo sapiens
tctgttacccagaaagtagtgtcaagtatgttaaataaatatttaagtgacttacatagtgaagttaagatgtttctgtcacatagttgtaagaaatagtgtgtccccatttgagttcgttccataatttttgttagaatatattcctggaaatatgtgcctgccaagtacagtttttatt

SEQ ID NO: 32152 - DNA, 619 bp, Homo sapiens
gccccaggagttatgtcctggggttttaaagaatgtattaatttattacctggtcccttaaaagtgacttttcttatatatcaccttggcttgcatcgaatgcacctgcttttcagttctttttttttcacatagtacattaaataagagtttgttgaatgactattttctttttgtccagaattttgtatatgcttagcatagtatgtaaacaatgaaaagcattgtatagattttttgctcaattaagcatccagacatattgactcagaaatcccataagaatatatcttttgttaattagctggacgtggtggtgcgtgcctgtagtcccagctactcgggaggctaaggcaggaagaatcgctttaaacccaggaggcagaggttccagtgagctgagatcttaccactgcactccatcctggggacagaacaagactccgtctcaaaaaggaaaaaaaaaaagaatattatcttttgttgaggtgacaggaggagagaaggtgccttgtggggctggtgtcgcctttaagctgagtggactgttggctgtcctggggagatggggaattcagcacagtgcaggcagcagctagggaaggagctggagctggac

SEQ ID NO: 32153 - DNA, 260 bp, Homo sapiens
gcagagaaacatcattaaacaccattaagttccagtgagctgagatcttaccactgcactccatcctggggacagaacaagactccgtctcaaaaaggaaaaaaaaaaagaatattatcttttgttgaggtgacaggaggagagaaggtgccttgtggggctggtgtcgcctttaagctgagtggactgttggctgtcctggggagatggggaattcagcacagtgcaggcagcagctagggaaggagctggagctggac

SEQ ID NO: 32154 - DNA, 411 bp, Homo sapiens
  misc_feature (105)..(105): n is a, c, g, or t
  misc_feature (129)..(129): n is a, c, g, or t
  misc_feature (135)..(135): n is a, c, g, or t
  misc_feature (150)..(150): n is a, c, g, or t
  misc_feature (270)..(270): n is a, c, g, or t
atggctcgtactaaacagacagctcggaaatccaccggcggtaaagcgccacgcaagcagctggctaccaaggctgctcgcaagagcgcgccggctaccggcggngtgaaaaagcctcaccgttaccgnccgggnactgtggctctgcgngagatccgccgctaccaaaagtcgaccgagttgctgattcggaagctgccgttccagcgcctggtgcgagaaatcgcccaagacttcaagaccgatcttcgcttccagagctctgcggtnatggcgctgcaggaggcttgtgaggcctacttggtagggctctttgaggacacaaacctttgcgccatccatgctaagcgagtgactattatgcccaaagacatccagctcgctcgccgcattcgcggagaaagagcgtaa

SEQ ID NO: 32155 - DNA, 381 bp, Homo sapiens
tcattgagactctgggattcgggccattacatgaaaatgaagttgtttctgtgattttgctgcttaaatccttttggacacttgagccatccacagctaccctacattccagccactctaagactggcagtccccctacttgtcgcgatggttcacatctccatgcgtttgccaggctcttctctttcttggggatgttcttccccttctggtgtgtttgacccagtttcaatacaccttttaaaaaaactgctttatcgagatctaatatacatactggcaaggtttacccttaacccattttaaataaaaaattcaataagttttaggtatatttacagagttatggcaaccaccattcatacacatttttttgagact

SEQ ID NO: 32156 - DNA, 206 bp, Homo sapiens
attgttaccttaagcttgtatgcggctcccattagtaaaagaaaaaaggacaatggatgttggatatataactaacagttgggtaccaattgctacatgcacttgatggatgatttagtgcatttggttgtgtataaaataataatgcagagtattttataaaacagaacatctggaaacaaattagttatatgtatttaaaaata

SEQ ID NO: 32157 - DNA, 949 bp, Homo sapiens
ccaccttggcctcccaaagtgctgggattataggcatgagccaccatgcccagccaaaaaactactaataataaaattcttaataaagaatagcagcagttaaaccatagttaactcaaaacaacactgatgatacaatatatatatcatcagttgatacaatatacatatgatacgatagttacagagagtcttttctaagaattatggagattctgattgtctttgtgtatacattgcagtgggagcttcttgctatgcatgatgttggcagtttggtttcttatttttagtagggtaaagaatttgagttctcaataaattccattaacatactgatttagtttatgaatgtcaacttttagaaacccttaatttacatagttattagtataacctttagcctcataaaaattatggaattatgtctttttgtacatcattatatttgatatcaatttaaataaagcattatcccattgttacttctttttaaaggattttaaatttgttttagcctaaacttttacatatcccttgtaaaagtaaataaaaatatgagaactaatttgtcagcatagaatttccagacatgcaatacaaatttctttaacttgggacatttgcaagtttaaaataaaatgggtctttcaaaaaatggtgttgtatgggagtggtggttcacacctgtaatcctagcactttgggaggccgaggcaggtggatcacctgaggtcaggagttggagaccagcatgggcaacatgtagaaaccctgtctctactaaaatacaaaaattagccaggcatggtggtgcatgcctgtaatccctgctacttgggaggctgaggcagcagaatcgcttgagcctggaaggcggaggttgcagggagccaagatcgtgccactgcatgccagcctggacgacagagcaagactgtgtctcaaa

SEQ ID NO: 32158 - DNA, 658 bp, Homo sapiens
ctgatctccaggacaagcatggttgagaatcagtgatgtgatctggtggctttgtctcccaagctgcttattttttagtagtgtgtgtgtattttgtttaatcttcaagtgaattttaagtttccagttagatagtacaatagtatggtataggggttcatagtagctgagtacatacgtgatccctaagtaacagtgctgatctggctccttgccttcagttcctgccttgtgttgtcagcccggtcttgtcagcccagtctcttcagcttagccaccctagtcttcttttagtgttaactaacgtatgatttttcttcctaccacagggtcgttttccatgtttttcctggctgagaccacccatccgtggccacccccttaccccacccctgggcccagacgtggccacaatttttgaaaaagtccttgatgttcctgtcctttggaacacttccctcatttgcaattttctatccatgtgtgtgattatttgcttgtttggctcccttattagaccaagctttttggatctgcctattcttatccacttttatttctagcatctcctcagtgcctgagatacagcagatgttgaatgaatgaataaatgaaaagtgcaaggtaactagacagaaattcaattagttgtatgtgt

SEQ ID NO: 32159 - DNA, 430 bp, Homo sapiens
ttacttgaaggtgttcataattcagttgcgaagtaattttctcagtagcgtgtgcacaaatctcagctgatctgaatctatctgaaattaaaatacggtgtaaggaaatgttgagatacaagtatttttcattaatttttttctgaaatgctctgaaccctttcagcctggagacttttttccgctagcaaagttctttcccatgtgctcttatcattgtttctcttcctgttctgatttcagccttaagaatatgtataattcttaaaatggaacttcttagatctcatcctccaactcatcatttcctcttcgatcttcttctgtgtattctaggagaacatttcacatttgtcctgtacatcactgggtcaatattctgcaggatttgttctgctcttgagtgccttaaatgcagatttaaattctg

SEQ ID NO: 32160 - DNA, 407 bp, Homo sapiens
cagctactcgggaggctgaggcaggagaatcgcttgaacccaggaaggggaggttgcaggcagtgagccgaggccgcgccattgcactccagcctaggcgacagagcgagactccgtctccaataaataaataaataaataaataaagttgaatttctgagtctgagaataggcatttaacatttcaagaaatacagagagagagacagacagagagagagagagattgttagggcccacttccatcattatagcctaactgtattgtcagggcttgacttatgaaacctttcccaaggtctcctccatctgcctgcacattcccctgcctcactggattatagtttacttttagttagctattcttaagatttatttctctaaatgaagcagtaaatgttgattga

SEQ ID NO: 32161 - DNA, 681 bp, Homo sapiens
ccacctagaagtgagaatacgtggtgttttacctttctgttcctggcttattccacttaacacagtgtcctctagttccatccaagttgccaagaatgacaggattccattctttttgaagacggatttcattctttatggctgaagtattccactgtgttcacttctttgtaagtccatggttggcacttcatttatgatttagtatcttctctgatgccctccaaacctagctatcaagctattcagtaagaaattctccacacaatttttagtatttttcaaaagaaaggatacttccactgctcaaaaaatcttaattatacagatcagtaaaagattaagtgctctccaaatgtgcatgtggactgatgggaagatgattaaagatcaagaaagggtcgggcgcggtggctcacacctgtaatcccagcactttgggcagctgaggcgggcagatcacaaggtcaggagttcgagaccagcctggccaacatagtgatctctactaaaagtacaaaatcccgtctctactaaaagtacaaaaattagcctgtagtcccagcttctcaagaggctgaggcaggagaatcacttgaacctgggaggcggaggttgcagtgagctgagatcaggccactgcactccagactgggcgatagagcaagactccgtctcaaa

SEQ ID NO: 32162 - DNA, 434 bp, Homo sapiens
ctttctgtgactcatttccttgtccataaaatgggaatattaattgtacatgtcttatggattggtgtgtgaattcagttagcgagtgtagaatataacttatagatcaaagtagagtaaatggaaagggctcaactatggtgttgctactgccattgttattacaggcacacagttcgagctataatcatttcaagggaaattcttatgtgtcagttctggatcgaggtctgagattctgcatttcaaacaaacttccaggaatgctgctgcttcttggtccacacttggagaaataagtcagcagagagtcctctcgtttcctattgtaccatgtctgtcttttgtctcctgcttattggcctctgtaaggaactcacagctgctataataaagtaccaaaaactgggtggcttaaaacaacagaaacttac

SEQ ID NO: 32163 - DNA, 670 bp, Homo sapiens
ggccattagtaaaatgggaatgcctgctgtgttagtttattgatgctgccataactaattacctcaaatttggccacttcagacagcagaaactgattttcttgccgttggggagaccagaagtccaaaattgagcagggcctcactccctctaggaacctgggggagaatccggtctttgctccttccagcctccagtgcatgccccagcattgctgggctgtggctgcatcacctcagtctcagtctccctcttcacagctctttctactcttttcaagatccttaacctaatggcatcttttgtcttgtaatatttactcttttaaaaaactatatgtgtgtgtgtgtgtgtatagatacatatataagtgcaccctactactcacaggttatggggaatccaatgtgtgtatattggggggctactgtaccatcagcctgctccaccgtgttacctgccccacagtaggtgagaacactctgagaactgtaaagccctgtccagtatggcgtgtacatatccctaatgcagaaacagatgtgcaagttattgttcctgtcttcaccaagcttacacactaacaagatgaaaaaataacagtaagacaactgcatgatctttttgcttttatttttcatgcaagaaatttaattggaaaaaattaaa

SEQ ID NO: 32164 - DNA, 2607 bp, Homo sapiens
tccttttaatgtgttttaacattttttaatcaacatcgtttaaaaataatttactaaggattagattatttaatgaatgtctttttttctatatattgaattagatgttatcccaaaaaaaatatcttttcacttcaaaatgaaaatatatgttcaaagatgttttatttttagaatagttataaaaagtattagtcttaacataatgtgtcttgttctttttaccaataataatttatcaaaataagagggaaagtgcaatcaaatctgaattattttactatttgtttctagacacactacttaacactcctaaagactactttgagtaggcaacataactaaatttttctagtttcttatgatacaggttcataaactacaatatttggatttttttccccaaggcacaaaatgtataatggagaccaaatagtgatctgatccatagtatcctatgcctatacactttaaaatgtatatacattttagacaaaaatgcacactccagtattaatatttgtgctaccatctacttggagaagtttaatgagaaaattttagaagaaaagtattacaaacaatattttgactctattacctgttttgccttatacattttagaaactggaaattttttaaagaaaatgctttagttttcttctgttcttcactgtctacagtgtgcttttgtatatggatcaggactgagcaaagtaattacatgtatcagagatacttatctctatactaattcacagacagctcctgatgtaaggatttagagggccttctgccctctgaatatatggtgaggagaatggggtatctggaaaaggaaaatgatctggataaatctgagacctggggggaagtttgttttatatgttcattattggttgttacatatcaaggctgttttggttatgtatcaatattgtggtttatttgagctggaagtgattttttctgtgtatgtatatgtatacacttcaataggttttaattttgaagtgaatatttgccatgactccattttccccataccacttcagactttagcctgtttagttttaaggactgaaaatggtaggtttgggcagaagaatgaatttgaactttgatggggtttttttgtttttactttctatcttcataaccatttaaagcgatttagcttgaaattaaattttatcaggctaccaacatgttatttatttatttaataaacacatttattgaaaacctatactattgtattggcaccatacagggtattgtatttatactagtgagcagaccagggcatttccatcctcatggagttcatggtctaatgaaaatagctggggccgggtgtggtggctcacccctgtaatcccagcactttgggaggctgaggtgggaggattgtttgagcccaggagtttgagaccagccagggcaacatggcaaaaccccatgtgtacaaaagattaaaaaattagccagatgcagtggcacatggctggggtcccagctacccaggaggctgagttgggaggatcatctgagcctgggaggttgaagcttgcagtgagctatgattgccactgtactctatactccagcctgggtgacagagtgaaaccctgtctcaaaaaaaaaagaggaaagaaaatagctaggagacaatcagagcagatcttgggcttctgtggctcatctcagccctttataactggcctgagaagagggtttatctacttgtgcaagtggcccagaaatctcactcgtacatgaggctttggaacatccttgcaaaggtacgctgaaagcaaattgctgttttcctggtggttctgcacgtttcctaacttttatcatagtttgattttcattatttaagaaaaaataaaaaatccaaagaccataagatggcattagattttttaccattaaattattaatgcctatttggtgctcataaagattaatcatgtcacgcatgtttccaatctttcttttgcagtatattattttctaaaaattgttacatgcaaatttaaaccaagatttatcagtaaaagaaaaaaatagaatccttaataatgtaaatgttgttatatatgctaccctggtgaaaatatttttataaatcatgttgtcatttatgctttatgtagcctatttttcaataacctttttttaaaagcaattttttttgacaccaagattgttgatttttaattaacaccagttggtggcactagaaacctgaaatttttcaaagatgaacaaagaaaaattgaaaaggtaatctaaacatggagaatttttaggaaaataaatgaaaaatataattgtatattagagatgtatttttcttctggaatggaattctttttctaaaatgcaaatcgctatccattttgactgcaatgatgaaacttgtttatcttccagaggacatatatatatgtgtgtgtgtgtgtattgtacagatacctttaatttgattacactgtttcttgtaaatatgtttctgtataaaatgaaacttttcaagaggattctatgtatatattgtacttattaaataggtaatgcctatttaccaaaaaaaag

SEQ ID NO: 32165 - DNA, 564 bp, Homo sapiens
ttcactgagcccgaacttacacctcccctggctgtggcgctgcacagcgccctgagagtgactttgtctgacttcttcccggtggctcgccgggccgccgccgcgtggttggcgccagcgcactggggcagtcgcgcgcgcccaggtgcgggccgcgttacctcagcagacgctagagagtgaatgagccgcgcgggcccgggacccttggggctcttcactctccaggccgtcccgtgggcgcgctagccttttcaagtgatagtaatcggagacttttccgttacatgaggctcaacaaaagattgtaattccagcagctctgtttgggaaggcactaccgcggcgagtccagggcccggccgggggtcggcggctgccgggcggctggggcgaccgcggaccgtgcgggaccggtagggggtcgcgggccggctaggctcccccgcgcccctcctcgtggtatagcctgcatttctaatacaatgctgttatgctaatcaggtgacatcaccgcccagcacacggcgagtggctcctgataaaattacaaaccggcggccg

SEQ ID NO: 32166 - DNA, 500 bp, Homo sapiens
tcaatgggaagtttctaaggtagccgtgtaattgaaggtggaccttggaggagaggcaggattggggtggaaagaggataggaggtattctagatagataggagctggctaaggaaagatccagaaactggtgggaacttaaatattcagctgccatgacgatggttggtatgtagggttcgtatgaatgaaacgtgactaccagggcagataatgaaaggctttcaatcccagagtaagagatatagggccaggcgtggtgtctcatgcctgtaatcccagcactttgggaggccaaggcaggtggatcacttgaggtcaggagtttgaaacccgcctggccaccatgtcaaaaccctactaaaaagtacaaaaattagccagatgtggtggctcacacctgtagtcccagctacttgggaggctgaggcatgaatcgcttgaacccaggaggcggaggtttcagtgagccgagactgcatcactgcactccagcctgg

SEQ ID NO: 32167 - DNA, 750 bp, Homo sapiens
atcttaaggaaagagagaggcctgggattgtggactaaggcagaggagggacagaaagacctagagtaggtctggcactggaaggtggtattaatacatttcttttcttctcccagttgaatttggccagcactgtttcttttgactttagagattatttcccaatgtttgatgaaagttttgaaatctttagatatgttgggaaaattgtggacagtctttcaacatagtacaagttccttttccaccagctgaggtactggcagctataattttaattccttttctagttgggtaagttttctcttcagttcagccatcctttagagctccttcacccagctctctctgctctctctgtccccttcatcaccaagacagacattctgggtcagagatggaggttgtgtccttgtcaccacatggaggaattctgtgatcagaagcagagcacctgtgttttatgcatttaaaaacatctagaccgggcacggtggctcatgcctgtaatcccagcactttgagaggccgaggcaggtggatcacctgaggtcaggagtttgagaccagcctagccaacatggtgaaactccatctctattaaaaatataaaaattagctgggcatggtggcgtgcacctataatcccagctactcaggaggctgaggcaagagaatcgcctgaacccggcaggtggaggttgcagtgagccaagatcacgccactgcactccagcctgggtaacagag

SEQ ID NO: 32168 - DNA, 235 bp, Homo sapiens
cgagtagctgggattacaggcacgcaccaccatgcccagctaatttttgtactttttgtagagacagggttttgccatgttggccaggctggtcttgaactcctggcctcatgtgatccacctgctttggcctcccagagtgctgggattacaggtgtcagccaccacgctgggcctgatactgccacactttttaatgttctaattaaaatattttttaaaaaaatactgtgta

SEQ ID NO: 32169 - DNA, 167 bp, Homo sapiens
tggtttccctcccccaaggctgggcagggggaggggtatatctgaggtcgctggccctccacgagtgacttcccaagaagttctggacctggggaatcctaacctggggcgagggtgaggggagtggatgagactagaaactctttgttccaggtggattttcacag

SEQ ID NO: 32170 - DNA, 318 bp, Homo sapiens
tcgccctgtgttcctcatcacaggtcctgattgctccctaaaccaactccaggacaaagctggatgtgtctagtgtttttattagaacccgctttccgtaataagagcacatgtggttttgctgcactccagcactcgcctgaaaatatggagagaactagggtccagacacattaattttcaggtacttctgacatttaacttattttttctatctttcttgtcaaagttttactccttccttgtctaagtttctgtttgtttgcttgtaatacattttatgaggcttaattgaaaggtaatatacttcacacattt

SEQ ID NO: 32171 - DNA, 221 bp, Homo sapiens
aagaaatgcctgggaaacatatggctgggaactgactctgctttcatagagaagacttttggatcccgcagatggtaccccttatactaagaagggagtacttctgttgggatcataacctctttttaaaactaaggtgatttttgtcattttaacaccatttggaagcactgtaaagcttgactttttatctatttatttatttactttttaagagacag

SEQ ID NO: 32172 - DNA, 556 bp, Homo sapiens
gttttatgtaataattttcttggtgaggtcaatttacatagttttggtactttcatgtcagatttctaaggtagtataatttagtttagaggaagaatttctacacagatcatgtaattgtctcttcattatatatcagggtaaaatctataaaaaacaaaattggtttgagaacaaagctgtcattacttgcaagatgaaaacagaaaaattgcatgtgtttattaaaacacagaagtatattcctgtgcaaattaatgcagattctgaagtgaaagacaggacttttgagagattttgagtccaagggttcacctcttcaaacacaactgaaaaaactctattttttttatttttaaatctaatcagtttatatatgcccaggtccagcaaaaagaagctgggttgataatgtgttttgcagttattcaagctagtttgaaagagtacctagcagtgattgtgaagaccaatgattgtgctactaaggtctctcaattgccagacacccaccaagtattttttaaatatgctattctgttttgaaactcaaaac

SEQ ID NO: 32173 - DNA, 645 bp, Homo sapiens
aagctgcggttctccaggagtctggttgttcctcgcagccgggacggaatgctcaagtctgtcaccacacagctgtcagccaagggaggtgcagagctggaggtggaagggagtcgtcttcttagcttgacctttgaagccctttgctttacgactggatgcttgatcatttttctcggcctttgatcttcttgaaatcgcaattgtatctgatgcctcagactatataaactaatggatgagttaagtcccagacaagatgtatgtctgcgttcacagagtcacctgcatatgaaaatgagactgaagaatgtagcctgagcatccccttcctgcgcacttggccctggagtctataggattcccctccaccccatccaagccctccaggatttcacacaacaaaaactgagtatgtaacccaattataacatagggcccaaggaaagtgcattgattgcttcttgggtaactatggcattcacagcgtttgaaatgtcatcttgaacgccatttctgcctaacgatgtgtgcaaatgtatatttacacttacaaagcctcttttgctgtgttcactgtttagagctttgcctttgtaaagtgcagccttcatagaaaacaataaaagtgtgttcatataaaag

SEQ ID NO: 32174 - DNA, 429 bp, Homo sapiens
gaattcctaacttacaaggtggccatgaggaaaagaggagaaaaatctaatgtacctggcatcatggggtaggcactgttttttgtttttgtttttgttttaagatactagttctcaatccagaccatatattagagtctcctggagatcttttaaaggcatatttatcttctatgccaattcagtcacaatctctgccattgtgaccccagcatcaggattttttttttattattatcatactttaagttctgggatacatgtgcagaatgtgcaggtttgttacataggtatacatgtgctatggtggtttgctgcacccatcaacccatcatctaggttttaagccctcatgcttatggtatttgtcctaatgctctccctcccccttggcccccagctcccgacaggccccagtgtgtgatgttc

SEQ ID NO: 32175 - DNA, 483 bp, Homo sapiens
cgcctccagtggtgagtctgtgaggccagagaagagaagctatgaccgtgcaaacatgcatgttatggtgttggctgatgcggaatcaggaagcttggaggagctcttgcatgaggaattgcagaacttaggggcatgaatttgcacttccagatgtgaaggttgcaggcaccgggcgttgcagaggaagtgggcaagctcaccttgtagagaacttacttggggtttgtaatttgtatacacttcttacccagcagaaacagcttactgaacacccctcgggtggctggatgatgtgctagcaactgaaaccatctctgcgacttaagcttctctggtgcgtcgcgccccacgtgcttctccagaatcccgtttggaggggccaagcaagtccaatatagataggtttatactgaagccatcagttttgtttcttacatcgtttgtaaacagcagtattatcctggaacttgtttcctacag

SEQ ID NO: 32176 - DNA, 835 bp, Homo sapiens
ctttttatgaaaaaagtagaattttttaaagagcagagaaaagcacaatgaagacagaaagatcacctgtatattcttattgaccaaagatgatctatttggggtaaatccttttttttttttttgagacgggagttttgctattgttgcccaggctggagtgcaatggcacgattctcggcttaccgcaacctctgcctcccagggtttaaacaattctcctgcctcagcctcctgagtagctggggattacagggcatgcaccaccacggcccggctaattttgtatttttaataggaggacagggtttctccatgttgaggctgggcttgaactccagacctcaggtgatctgactgcctcggcctcccaaagtgctgggattacaggcaggatccacgtgcccggccggtaaatccttttaatagaggagtttcaatatttctcctctgccatagtattagaaagaaaagaatcattattgacatctttacgacattgagtttttctcttgtacctggtgtgtctttatttcagtaggtattcttttatgtgctttagtaagtctttatatttttagcataaaagtgtacacatttcttgttttacttatttctagatacttaatggcttttgtttataatatgattgggatattttttctgttgtgtaattgattactattactatgtactaaactgttggtttttgtctaaggattgtaacattgatgaactactttagtagatgaaatggtttcttcatgagattgaattgtctaaagagatgttggtattatttgtaaataaaagtatttgcctattcctttctata

SEQ ID NO: 32177 - DNA, 655 bp, Homo sapiens
ctactactattaaattgacgaccgctcgacttccgttctcaaaaatgttgactattaatgagtcaagcaataagtagagtgataggaaccacagctgctggagggctctctctgatctggcatggtagttttttatctcccagaagcctgtaaaccaaaaataaaagtctaagccccccaaccaactgaatggacccctcctatcggccaagggcattccaaagttaacctaaagaactagttcaggccatgatgggaagaggtgggggtcagacatgcctcgttctaccctcctcccattggaatccaggcacagctgaccagcattaacattaacacagggaccttaatactggacaaacagattgtttttagcaatgacatcccaacagcacagatagcaggccctgaaagaaattgaagtattttaccgcaaactacatttgaggactaaactctaatttttttcctatcttgcccaaattcctatctaaggggcctggataggacccctacaaaccataaattttcatcagataggttttatttaaccctatatatcgtgacttactttccaatctgattctggtgtaacattacatgacaaagaagaaaaaaaaaaagtcgacgcggccgcgaaattaatagtagtagg

SEQ ID NO: 32178 - DNA, 4224 bp, Homo sapiens
atgcaaaagtccaggacagtgggccactttcagtcttcaaagagaaagataagaaattctggattttcaaaatccttttgaagccttttaagccattgattattattattcctaaagaaaatgaagataattacatatttttgcatttgggcagtagcatgggccattccagttcctcaaagcaaaccactggagagacatgtcgaaaaatccatgaatttgcatctcctagcaagatcaaatgtgtcagtacaggatgagttaaatgccagtggaaccatcaaagaaagtggtgtcctggtgcatgaaggtgatagaggaaggcaagagaatacccaagatggtcacaagggagaagggaatggctctaagtgggcagaagtaggagggaagagtttttctacatattccacattagcaaacgaagaggggaatattgagggctggaatggggacacaggaaaagcagaaacatatggtcatgatggaatacatgggaaagaagaaaacatcacagcaaatggcatccagggacaagtaagcatcattgacaatgctggagccacaaacagaagcaacactaatggaaatactgataagaatacccaaaatggggatgttggcgatgcaggtcacaatgaggatgtcgctgttgtccaagaagatggacctcaagtagctggaagcaataacagtacagacaatgaggatgaaataattgagaattcctgtagaaacgagggtaatacaagtgaaataacacctcagatcaacagcaagagaaatgggactaaggaagctgaggtaacaccaggcactggagaagatgctggcctggataattccgatgggagtcctagtgggaatggagcagatgaggatgaagacgagggttctggtgatgatgaagatgaagaagcagggaatggaaaagacagtagtaataacagcaagggccaggagggccaggaccatgggaaagaagatgatcatgatagtagcataggtcaaaattcggatagtaaagaatattatgaccctgaaggcaaagaagatccccataatgaagttgatggagacaagacctccaagagtgaggagaattctgctggtattccagaagacaatggcagccaaagaatagaggacacccagaagctcaaccatagagaaagcaaacgcgtagaaaatagaatcaccaaagaatcagagacacatgctgttgggaagagccaagataagggaatagaaatcaagggtcccagcagtggcaacagaaatattaccaaagaagttgggaaaggcaacgaaggtaaagaggataaaggacaacatggaatgatcttgggcaaaggcaatgtcaagacacaaggagaggttgtcaacatagaaggacctggccaaaaatcagaaccaggaaataaagttggacacagcaatacaggtagtgacagcaatagtgatggatatgacagttatgattttgatgataagtccatgcaaggagatgatcccaatagcagtgatgaatctaatggcaatgatgatgctaattcagaaagtgacaataacagcagtagccgaggagatgcttcttataactctgatgaatcaaaagataatggcaatggcagtgactcaaaaggagcagaagatgatgacagtgatagcacatcagacactaataatagtgacagtaatggcaatggtaacaatgggaatgatgacaatgacaaatcagacagtggcaaaggtaaatcagatagcagtgacagtgatagtagtgatagcagcaatagcagtgatagtagtgacagcagtgacagtgacagcagtgatagcaacagtagcagtgatagtgacagcagtgacagtgacagcagtgatagcagtgacagtgatagtagtgatagcagcaatagcagtgacagtagtgacagcagtgatagcagtgacagtagtgatagtagtgacagcagtgacagcaagtcagacagcagcaaatcagagagcgacagcagtgatagtgacagtaagtcagacagcagtgacagcaacagcagtgacagtagtgacaacagtgatagcagcgacagcagcaatagcagtaacagcagtgatagtagtgacagcagtgatagcagtgacagcagcagtagcagtgacagcagcagtagcagtgacagcagcaacagcagtgatagtagtgacagtagtgacagcagcaatagcagtgagagcagtgatagtagtgacagcagtgatagtgacagcagtgatagtagtgacagcagtaatagtaacagcagcgatagtgacagcagcaacagcagcgatagcagtgacagcagtgatagcagtgacagcagcaacagcagtgacagtagcgatagcagtgacagcagcaacagcagtgacagcagtgatagcagtgacagcagtgatagtagtgacagcagcaacagcagtgatagcaacgacagcagcaatagcagtgacagcagtgatagcagcaacagcagtgatagcagcaacagcagtgatagcagtgatagcagtgacagcagtgatagcgacagcagcaatagcagtgacagcagtaatagtagtgacagcagcgatagcagcaacagcagtgatagcagcgacagcagcgatagcagtgacagcagtgatagcgacagcagcaatagaagtgacagtagtaatagtagtgacagcagcgatagcagtgacagcagcaacagcagtgacagcagtgatagtagtgacagcagtgacagcaacgaaagcagcaatagcagtgacagcagtgatagcagcaacagcagtgatagtgacagcagtgatagcagcaacagcagtgacagcagtgatagcagcaacagcagtgatagcagtgaaagcagtaatagtagtgacaacagcaatagcagtgacagcagcaacagcagtgacagcagtgatagcagtgacagcagtaatagtagtgacagcagcaatagcggtgacagcagcaacagcagtgacagcagtgatagcaatagcagcgacagcagtgacagcagcaacagcagcgatagcagtgacagcagtgatagcagtgacagcagtgacagcagtgatagcagcaacagcagtgatagcagtgacagcagtgacagcagtgatagcagtaatagtagtgacagcagcaacagcagtgacagcagcgatagcagtgacagcagcgatagcagtgacagcagtgacagcagcaatagcagtgacagcagtgacagcagcgacagcagtgatagcagtgacagcagtggcagcagcgacagcagtgatagcagtgacagcagtgatagcagcgatagcagtgacagcagcgacagcagtgacagcagtgacagcagtgaaagcagcgacagcagcgatagcagcgacagcagtgacagcagcgacagcagtgacagcagcgatagcagcgacagcagcgacagcagcgatagcagtgacagcagcaatagcagtgatagcagcgacagcagtgatagcagtgacagcagcgacagcagcgatagcagcgacagcagtgatagtagtgatagcagtgacagcagtgacagcagcgacagcagtgacagcagcgacagcagtgacagcagcgacagcagtgacagcaatgaaagcagcgacagcagtgacagcagcgatagcagtgacagcagcaacagcagtgacagcagcgacagcagtgatagcagtgacagcacatctgacagcaatgatgagagtgacagccagagcaagtctggtaacggtaacaacaatggaagtgacagtgacagtgacagtgaaggcagtgacagtaaccactcaaccagtgatgattagaacaaaagaaaaacccataagattccttttgtgaaaagtttggtaatgggataggaaaaaaagatttccaagaaagtaaagaaaggggagaaataaacataagacgtatgtaaacaaaaacaactgggggaatcaaatcaaacagttggattcagaaccaagacctaactcctgcagagacagactctgaatgcatgacctttggtacatgcctgttaatattcatgttctgaaaatattttgttaaaagtgtaaatctaaacataaaagaacaattaaaatattctttaatacttcacacagaaacctcaagtaatcactacatgataacttcaatttaag

SEQ ID NO: 32179 - DNA, 243 bp, Homo sapiens
tagctatctacatggaaaaaatattaaccttgattcatacctcaaaccacacaaaaatttaattaaaggtggatcacaggcctacatgtaaaagttaaaactataaagcttctacaaaaaaaaaatgaatatttgattgactttggagtaggcaagaacttcagataagatacagaaaacactattttaaaaaggataaatgggctttatcaaaattaaaaacttctcatcaaaagacacaac

SEQ ID NO: 32180 - DNA, 924 bp, Homo sapiens
atgctacgtgtagtggaaggcatcttcatttttgttgtagttagtgagtcagtgtttggggttttggggaatggatttattggacttgtaaactgcattgactgtgccaagaataagttatctacgattggctttattctcaccggcttagctatttcaagaatttttctgatatggataataattacagatggatttatacagatattctctccaaatatatatgcctccggtaacctaattgaatatattagttacttttgggtaattggtaatcaatcaagtatgtggtttgccaccagcctcagcatcttctatttcctgaagatagcaaatttttccaactacatatttctctggttgaagagcagaacaaatatggttcttcccttcatgatagtattcttacttatttcatcgttacttaattttgcatacattgcgaagattcttaatgattataaaacgaagaatgacacagtctgggatctcaacatgtataaaagtgaatactttattaaacagattttgctaaatctgggagtcattttcttctttacactatccctaattacatgtatttttttaatcatttccctttggagacacaacaggcagatgcaatcgaatgtgacaggattgagagactccaacacagaagctcatgtgaaggcaatgaaagttttgatatctttcatcatcctctttatcttgtattttataggcatggccatagaaatatcatgttttactgtgcgagaaaacaaactgctgcttatgtttggaatgacaaccacagccatctatccctggggtcactcatttatcttaattctaggaaacagcaagctaaagcaagcctctttgagggtactgcagcaattgaagtgctgtgagaaaaggaaaaatctcagagtcacatag

SEQ ID NO: 32181 - DNA, 101 bp, Homo sapiens
tgtctgttctcaaactcctggtcttaagtgatcctcccacctcagcttcctgaagcgttggaattataggcaggaaccattgcacctggcccttgtctctt

SEQ ID NO: 32182 - DNA, 853 bp, Homo sapiens
tctgaagctacagtgggaagttataaggggttgctgttttgacaggtgtgagccctccctcccagccttcctgccctcccctttccctccgtacacggcagagtgaattattccagctaatagcagttccctgtagagcagagcctgctgtgtgcttgagaacaacaggtaggcagagatgagcagcggttaatatcttagttctcttttatcaagttatgattaagtaaggcaaagacccttttgaagccctaccaatcagtttgagaaagcgtgttagtatgtagcgagactacttaaaatatatatactacaaattatgtacacacacagagtgtccagaagctgaaaattggtttcccctgttaaattttgctagtcgtcttgcagaccaaaagagtgaattcccaagtcatttgcaaactcatttactaggaatcccaatggtccactgtcagaagacaaaatggaaattattgagatggtgctggatttggtaggaagtattgcaccttgactttaattcctgtattccttcattcaaagaaatacatatttgatgactgctgcgtgccagcctgtgtagtggaagctggtgattcaaatgtttctgcccatgtgaaggctgacatcctagcggggaagaaggatgatacacaagtgaactaataggcaagataatctcaggtcaggaggtagtggtgggggcctggtgtgaagatctgggatgagggaccaggaagagcagaggtcgggaggggaagggctgaggcaggagtgaggcatgatcagtgaaccgagatcatgccattacactccaccctgggcgacagagtgagactgtcttaaagat

SEQ ID NO: 32183 - DNA, 567 bp, Homo sapiens
ctacagtgacccttacagaagagcatctgtcatttttcttctttattcgtaataaaaatttcccaagattatctccagcaccttggcatttcactgctgtaaagagcatgtctggagatttcaccatgtgcttcagcaggtaatttatagatgatttttaacccacacaccaatatttcatgacctgtctcagcattcattcttagatgaccacattgttaatacttccccatatagatcatcacccatttattccaatcatctggattcctaacaaaacattttcccattttctttagtaaccaatggtgtagaatcttgtcattattgtttgaaaacctaaatattacatcccttgtttccttactcagtctcaaagaactcaggtaatatagtcgaaatcttagaggccaggagcagtggctcatgcctgtaatctcggcacttttggaggctgaggtaggaggatcgtttgagcccaggaaatcaaggctgcagtgagccgtgatcatgccatgccactgcacttcagccttggcaagagagcaaaaccctgtctcaaaaaaa

SEQ ID NO: 32184 - DNA, 765 bp, Homo sapiens
ctacagtgacccttacagaagagcatctgtcatttttcttctttattcgtaataaaaatttcccaagattatctccagcaccttggcatttcactgctgtaaagagcatgtctggagatttcaccatgtgcttcagcaggtaatttatagatgatttttaacccacacaccaatatttcatgacctgtctcagcattcattcttagatgaccacattgttaatacttccccatatagatcatcacccatttattccaatcatctggattcctaacaaaacattttcccattttctttagtaaccaatggtgtagaatcttgtcattattgtttgaaaacctaaatattacatcccttgtttccttactcagtctcaaagaactcaggtaatatagtcgaaatcttagaggccaggagcagtggctcatgcctgtaatctcggcacttttggaggctgaggtaggaggatcgtttgagcccaggagtttgagaccagtctggacaaaatggtgagaccccatctctatttataataatttttaaaaactcatagaaatgtctccatagataaactactcagtaggtaataagaacagcatctttaagggtatggaggcataaaagtgcacagcacatttgggaaaatgcaacgtggctgacacaatgaggccaagaatgaggctggcaagagaggaaaatcaggattccaactggcaccaattgtgaatcataaaagccaccatttatggcgcatttattatgtgg

SEQ ID NO: 32185 - DNA, 379 bp, Homo sapiens
gacatggaagcaagaatgtccatcaatggataaatggattaagtcaatgtagtatacacatactatggaatattattcagcttcaaaaggaaagaaattgaccgggtgcggtggctcacacctgtaatcccagcactttgggaggccgaggtgggtggatcatgaggtcaggagttcaagaccagcctgagcaagagggtgaaaccccgactctactagaaatacaaaaattagccagtcatggtggtcggtgcctgtaatcccagctacttgggaggctgaggcagagaattgcttgaactcaggaggcggaggtttcagtgagctgagatcgtgccactgcacttcagcctgggcaacaagagtgaaactccatttc

SEQ ID NO: 32186 - DNA, 377 bp, Homo sapiens
tacaaaagagtatacgcatttgaaagactcaacttcaatactattaaataaatgcataatataaaaacagtgtgctggcttttaaaaaattctttaggctgcgcgcagtggctcacacctgtaatcccagcactttgggaggccgaggctggtggatcacgaggtcaggagatcaagactatcctggctaatatggtgaaactccatctcaactaaaaatacaaaaaattagccaggcgcggtggcatgctcttgaagtcccagctacttgggaggctaaggcaggagaatcgcttgaacctgggaggcaaaggttgcggtgagctgagatcatgccactgcactccagcctgagcgacagagcaagactctgtctc

SEQ ID NO: 32187 - DNA, 1947 bp, Homo sapiens
tcagattatgattaaattagatattaaacacttcaaccacataagaatattgaggactgttgaatgagtcctgtgctctggtggtcctggaacttaattttatttatgaattttcagtcattagagaagagtatggtgtggatatgggaggttggattagccgactaaactttgaagtttgcaactttagcagatgttgggatagaagttaacacagtagttcaaattgatttcgcacttcatggtttatagaaatgctttcacattcatatctgaatatttgaaacaacctagtgggtaggtaggtaagcaattttatctgtgtttcccatggaagaaactgaggctgggagatgttcattgtttgttatccaaggtcatatagctagtaagtagaagagtccagatgcaaacccaggccacctgaacaatgttcacatcattttaccatggagaagagattagtgcttttatttgtctaacactctggtcagtgaaattaaagtatctccgtgtgaaacagcatgcaaaaggctttgtttctaatatttttaacaaatccctttagatcgttgggaattaaacaaatacctagggcagtgtggacttacctgaagtcttttgacattttatgaagttctgttaaacctagaaataaagtcaaataaattttttattgctttagagacatagttattggaagttatttatagtttaaatatgtagccataataattattcgtgactatatttcaagatagtttattcagcaagcacttactgagaacctaccatgtactgggcactgtgttcttaaaaggactaattgatgagctcagtctagtgggggagatgagtaaaccagcaattataatacagagtactacttgagtagaggtacgcatagggaaaaccctgtaatagagggagcactgtctgtgttacctaatgcagacttgaggtaattcgaaaaggcatgttaagccatgtgatgcttgagtacaatcttgaaagcatgttaatacttaacttggtaagaacattttaagcgaataacagcctatgcaaatacacagaggcatttgagaatgcggcacttagagggagctacaaatagattgacatggcaagagtatgcactgactgttaagggatggaaggagttgagaccagagagagagagacatgattaggattgtgaagagccttagatgacatgcttttaaaaagttagtactttttcctaaagataattgggagtcattggtgaattttaatagggaaatgcttgctatccatttatgtttgcaaagattacataatagtgtggaggatggaattggtggtgcaggatatgagattggaagcaagaataccagttagttacgatagtaaccatgtcataaatgctccacgtccaaactggtactgacattagagagaaaagaaagaaatttgagaaataattagaaggttgagatttaactagtcttggtgagagagagagatagtcttcagatgtggtttggacaaatgggtggatggcgatgctggtcaaagccaatacatggttgaaaaagccggtttctgtggctagagggtgttgatgagctcagtttgagatattttgagttgaaggtacctgtgggaatttacggttagaaataactgttaggaggctgggcatggtgtctcacatctgtaatcccagcagtttggaggctgaggtgaacagattgcttgagatcaggaattttgagaccagcctggtcaaagtggtgaaaccccatgtctactaaaaattcaaaaattagctgacatggtggcgggcgcctgtaatcccagctgcttgggatgctggcttgaacctgggaggtggagtttgcactgagccaagatcacgtcactcactccagcctgggcgacagagcaagtctcaataaagaa

SEQ ID NO: 32188 - DNA, 473 bp, Homo sapiens
attttgtaataacagaccactgcatattgtacaattaagttttttcaacaattttaaggcaggattcacagtaaacacttttttcttttaaaaaattatttttaaggaatagagacagtctcaccatgttgcttggctggccttgaacttctaggctcaggcaatcctcctacctcagcctcccaaagtgcttgaattataggcatgagccaccacacccagcccacagtaacatttctaatgtggcagatgtagttacattgacaaaaatttttctggtaaaggccaggtgtggtggctcactcctgtaatcccagcactttgggaggctgaggcaggtggatcacttgaggccatgggttcgagatcagcctggtcaacatggcaaaaccccgtctctactaaaaatacaaaaattagctggtgtggtggtgtgtgcctgtaatcccagctacctgagaggctgaggcatg

SEQ ID NO: 32189 - DNA, 415 bp, Homo sapiens
aacctccgtctcctgggttcaagcgattttcttgcctcagcctcctgaatagctggggctacaggcatgtgccaccaggcctgtctaatttttgtatttctagtagagactgggttttaccatgttggccaagctggtctcaaactcctgacctcaagtgatccatccgcctcagcctcccaaaatgctcggcctcccaaatctgttttagtggtacaggtactcatgcacatgagtaccgctcctggccttggcactctttatacgttgtaaacattgattgtttttgtctttaatatattttagaaatattttccctagtctttttgcttgtccttttaaagataggcccctgttatcatttgctgtaaatgtcatcatctgcatagaaaatccaagattatcagttgaaaaa

SEQ ID NO: 32190 - DNA, 279 bp, Homo sapiens
catctagccaaccaacatttcctggacgtatgttgccttcctgcacttctgggcccagctcctgaagagcttgtgaccgtggtggccaggaggtgcaggacctcctgcttctgagactgacctcttcccgggctttcttctctgtccaggaaggtgcctatgcccctgctgtgtgtcaactctgctgtctctgcagccatctcaggagttcagagagctcattttccctcttcttatatcaaagtttcctgtgtgttaacaatgaaagataccaaaact

SEQ ID NO: 32191 - DNA, 940 bp, Homo sapiens
gaggcgtgggtgttcggctacgtcactggggccctacggtgcctggagctgggcagtcttctcgtcagagtggggactggtaagagcgacctccccgccaggtcctgtgtgttgccagccgaagaagggtagctgaaaaattcagacccagcacagtgtttatgttggtcaaaaatagaaaactatgtctggcgccgccgaggcgggaggacccttcaggccaagagcagcctagcaacatggcgcaaccccatctctgtagtcctacctcagctccccccagctgaggggggctcagccccccagccctcaagtatgaacccaacggttcaaggctccagtgagctatgatcccatcacagcattccagcctgcgagattgaggacacaaagaccaacgagccaccacagctaccagtcccagaacccgctaatgctggggaacggaaaatgagggagttcaactctggcaagttctcagcgaaatccacgaccttttcctttatcttctggactctcaatgtgactgatgaaagttaccacatgctctgcagggggaaatggtttagcatgtattactacatcttaatcacatctttgtaaaaggccaggagcattttgaaagtcacgttcacagacattgtttaaacatagtctgtatataccaaagtataggacgttgtatcatctcatattaattagttagttggctcaaaattagtgctaatgacttagtaattcagtgatttctgttagctttaaaacctttatttcagaactatttcacctcttggttttcatttttgctgtgtgtcactgcctgccagctgctaatttattaactcccagtgaatcacgtgtcctgtgaagggactgaatattagtggcaaattatgttgatgatttatattttgaataaatagtttgaatacatagaaca

SEQ ID NO: 32192 - DNA, 1061 bp, Homo sapiens
ctccgctgccagccccgaacacggatatatctgtgttcggggttgtgggccttcaggccagggcactgcccatgacttcggagaagccacctggtgttccaggtgctgctggctgaggctcctgcagctcaggctgggcctctttccaggccagagacttctccaatttggttttaaaaagcaatccgtgacctgggcagtcttctcgtcagagtggggactggtaagagcgacctccccgccaggtcctgtgtgttgccagccgaagaagggtagctgaaaaattcagacccagcacagtgtttatgttggtcaaaaatagaaaactatgtctggcgccgccgaggcgggaggacccttcaggccaagagcagcctagcaacatggcgcaaccccatctctgtagtcctacctcagctccccccagccctcaagtatgaacccaacggttcaaggctccagtgagctatgatcccatcacagcattccagcctgcgagattgaggacacaaagaccaacgagccaccacagctaccagtcccagaacccgctaatgctggggaacggaaaatgagggagttcaactctggcaagttctcagcgaaatccacgaccttttcctttatcttctggactctcaatgtgactgatgaaagttaccacatgctctgcagggggaaatggtttagcatgtattactacatcttaatcacatctttgtaaaaggccaggagcattttgaaagtcacgttcacagacattgtttaaacatagtctgtatataccaaagtataggacgttgtatcatctcatattaattagttagttggctcaaaattagtgctaatgacttagtaattcagtgatttctgttagctttaaaacctttatttcagaactatttcacctcttggttttcatttttgctgtgtgtcactgcctgccagctgctaatttattaactcccagtgaatcacgtgtcctgtgaagggactgaatattagtggcaaattatgttgatgatttatattttgaataaatagtttgaatacatagaaca

SEQ ID NO: 32193 - DNA, 1086 bp, Homo sapiens
ctccgctgccagccccgaacacggatatatctgtgttcggggttgtgggccttcaggccagggcactgcccatgacttcggagaagccacctggtgttccaggtgctgctggctgaggctcctgcagctcaggctgggcctctttccaggccagagacttctccaatttggttttaaaaagcaatccgtgacctgggcagtcttctcgtcagagtggggactggtaagagcgacctccccgccaggtcctgtgtgttgccagccgaagaagggtagctgaaaaattcagacccagcacagtgtttatgttggtcaaaaatagaaaactatgtctggcgccgccgaggcgggaggacccttcaggccaagagcagcctagcaacatggcgcaaccccatctctgtagtcctacctcagctccccccagccctcaagtatgaacccaacggttcaaggctccagtgagctatgatcccatcacagcattccagcctgcgagattgagatgatgattattccccaccttctaggacacaaagaccaacgagccaccacagctaccagtcccagaacccgctaatgctggggaacggaaaatgagggagttcaactctggcaagttctcagcgaaatccacgaccttttcctttatcttctggactctcaatgtgactgatgaaagttaccacatgctctgcagggggaaatggtttagcatgtattactacatcttaatcacatctttgtaaaaggccaggagcattttgaaagtcacgttcacagacattgtttaaacatagtctgtatataccaaagtataggacgttgtatcatctcatattaattagttagttggctcaaaattagtgctaatgacttagtaattcagtgatttctgttagctttaaaacctttatttcagaactatttcacctcttggttttcatttttgctgtgtgtcactgcctgccagctgctaatttattaactcccagtgaatcacgtgtcctgtgaagggactgaatattagtggcaaattatgttgatgatttatattttgaataaatagtttgaatacatagaaca

SEQ ID NO: 32194 - DNA, 264 bp, Homo sapiens
caggtgcccatctcctataaagtcccctttgaaaacagaacattagccttagattttagtgttctgctagtatcattcacaaataccatggctagccttgcacggtgcttggcctttgtaggtacggtccacacattcctaagtgaaaattatagtcaacttaggatcatgagatgttaaaatacagtgaaccattgtgttccaaatattatataatttgaagaaactactatgcccttgaaactaggaattctttgattctta

SEQ ID NO: 32195 - DNA, 580 bp, Homo sapiens
agaggccccggggagaaacccaccctgccgacaccttgatttctgacttccagcctccagaactgcgaggaaagaagccgctcttgtttctggcaccctgtctgtggctctttgttacaacagcactagcaaacgagtacagtgttcatatttaaaatcttcacaaatgccgatgcctgtcgaaccaaaacaaaatagtctgtttgccaccacagcccggacctgtgaagtttcaaatgatagaagtcacttagtaaaagctgcctgcagactttcccccctggctggaccaggaatcttggggtggaggtttttggatgttgaccaagccagcttggaaaaggggaataacatgagaactctgcttaaacttggaaagattatcttcccctggatgctgtcttgcattgtttttaaataataataatgataccggctggtttgaatgcttactgtgctgggtgtggatctacgtgcctcacatgtatcagtgactctacttctcacaaactctgtggatgccctgtttttacagatgcggaaagtgaggcatagagagatataaaaatagttaaagaaa

SEQ ID NO: 32196 - DNA, 391 bp, Homo sapiens
acttgggttgccacccagttgagcaggttctccaaatgcctgaagatctgcctcagtatgaagcacaaaggcctcccctgcaccaggatctttgcacaggaaagacagcatggctgaaactgctagttcatttgagcaagtgcttcaaatgcctggtgatttggataatgtccaaaatgtctaggtgtggagtagagagggccctactgcaccatgatctacacacaagaagatccacctgctgatccgggtgaaggagtacttcaaatgtctggagatttacctgggggtggagcataccaggttctaatatggtttgggtctgtgttcccacccaaatctcaagtcatacggtaatacccaatattggagttggagctcagtgggaggt

SEQ ID NO: 32197 - DNA, 359 bp, Homo sapiens
gccgacctactactactaaattaacggccggtcgaccattgaacggaattgaatggaatcgtcaacgaatgaattgaatgattccatttgattccatttgatgttgattccattcgattccattttatgatgattccatgcaattccattagatgatgactcctttcatttccattcgatgatgattccattcgtttccatccgatgatgattccattcgattccgttcaatgatgattgccttccagtccatggattattccattccattccattagatgattccattcgggtccgttcgaagattctcttcgattccattcgataattccgtttttctccgtttggtgttgatacca

SEQ ID NO: 32198 - DNA, 1135 bp, Homo sapiens
gtatctcaatttttaaaaattctcaaattgtttttttttttgttattgtaaaatactcaaatttccctggcttatgtttctttagttttattttcattactgtgttacccaggtttgttattcataatatgatgaatcgtaaaatacagtgatatgactggtataaatgtttctctgtaatttttaatggccttgttttagttattatatgtagttgtttctaaagtgtttgttacagcttatttttgaaacagattcttacattcatgaactagtcttgaagaagacagttctgaaaattttattatcctaatcttttcagtgtactaaaacattactcttatgtattgcagattataaagtagcttatatacaaggagtagtaggtactagggaaatgtttcattttgcataatgaaacattttgcataatgagtggctggattcaatggttttttttttgttccttttgtacagtttggtttcaatgacaaattataaaaatgatattgttcttacatgtgttttgattattttcagtttgtcttgatgtttgtggataatagttaaacttattttcaagtttaaaatattttacaaacttgctatgcaaagtggttttaaaaatctcatttctaagcagttttatttaattatgtatggttcatcaaaatatatgttaacaaaatataagataactgaggaaaattaattgccatttgtatattccttagtaccagattatcgttgattatgtgtaatggagagagaataaatagctgaaacctaatattcttccagttttttttatgctgccggtttggatcttttttaatcagtccccttttcaaaagtattaccatgtcatgatttgaattgcatttttaaagttttcttatatacatatatttaagatcatagtaaactcccaaatacagtagagggggtaaaatccatatgctaatctgcattagaatatataaagttagatgacctttttaagaatacaaatataggctgggtgtggtggctgacactataatcatagcactttgggaggccaaggcgggcagattgcttgagtccaggagtttgagaccagtctgggcaaagatggcaaaaccctgtctctaca

SEQ ID NO: 32199 - DNA, 836 bp, Homo sapiens
  misc_feature (1)..(1): n is a, c, g, or t
  misc_feature (61)..(61): n is a, c, g, or t
  misc_feature (64)..(64): n is a, c, g, or t
  misc_feature (69)..(69): n is a, c, g, or t
  misc_feature (78)..(78): n is a, c, g, or t
  misc_feature (80)..(80): n is a, c, g, or t
  misc_feature (86)..(86): n is a, c, g, or t
  misc_feature (94)..(94): n is a, c, g, or t
  misc_feature (109)..(109): n is a, c, g, or t
  misc_feature (111)..(111): n is a, c, g, or t
  misc_feature (117)..(118): n is a, c, g, or t
  misc_feature (122)..(122): n is a, c, g, or t
  misc_feature (127)..(127): n is a, c, g, or t
  misc_feature (129)..(129): n is a, c, g, or t
  misc_feature (135)..(135): n is a, c, g, or t
  misc_feature (138)..(138): n is a, c, g, or t
  misc_feature (140)..(140): n is a, c, g, or t
  misc_feature (144)..(144): n is a, c, g, or t
  misc_feature (147)..(147): n is a, c, g, or t
  misc_feature (159)..(160): n is a, c, g, or t
  misc_feature (163)..(165): n is a, c, g, or t
  misc_feature (167)..(167): n is a, c, g, or t
  misc_feature (174)..(174): n is a, c, g, or t
  misc_feature (182)..(183): n is a, c, g, or t
  misc_feature (185)..(185): n is a, c, g, or t
  misc_feature (193)..(193): n is a, c, g, or t
  misc_feature (203)..(203): n is a, c, g, or t
  misc_feature (208)..(208): n is a, c, g, or t
  misc_feature (216)..(216): n is a, c, g, or t
  misc_feature (219)..(219): n is a, c, g, or t
nggcgtcggggccgggaaggattatcgaccacgaagcgtgttaagtaatggaaaataaaanatnagtcnaaaagcctncnacgtcnttcgactntcaatattagaaatngnctcctnnccgntttangngcaggnggngncganaanaaaggaataatnnagnnntntagaaanaagttatnnantgccagcncccttctccnccagntaataaanacncatgtgttttgattattttcagtttgtcttgatgtttgtggataatagttaaacttattttcaagtttaaaatattttacaaacttgctatgcaaagtggttttaaaaatctcatttctaagcagttttatttaattatgtatggttcatcaaaatatatgttaacaaaatataagataactgaggaaaattaattgccatttgtatattccttagtaccagattatcgttgattatgtgtaatggagagagaataaatagctgaaacctaatattcttccagttttttttatgctgccggtttggatcttttttaatcagtccccttttcaaaagtattaccatgtcatgatttgaattgcatttttaaagttttcttatatacatatatttaagatcatagtaaactcccaaatacagtagagggggtaaaatccatatgctaatctgcattagaatatataaagttagatgacctttttaagaatacaaatataggctgggtgtggtggctgacactataatcatagcactttgggaggccaaggcgggcagattgcttgagtccaggagtttgagaccagtctgggcaaagatggcaaaaccctgtctctaca

SEQ ID NO: 32200 - DNA, 1831 bp, Homo sapiens
  misc_feature (4)..(4): n is a, c, g, or t
  misc_feature (7)..(7): n is a, c, g, or t
ggcncgnggccggaagcgcggatcacacgggcccctacaaggggcccctacaagcggccacaaggatggcaggcttcgcggagctcgggctgtcatcgtggctcgtggaacaatgtcggcagctgggtttgaagcagcccacgcccgtgcagctcggctgcatccccgccatcctggagggtcgagactgcttgggctgtgctaagacaggcagtgggaagacagcagcgtttgtccttcccatcttgcagaagctgtctgaggatccctatggcatcttctgcctcgtcctgacacccaccagggagctggcctaccagatcgcagagcagttccgggtcctggggaagcctctagggctgaaagactgcatcatcgtcggtggcatggacatggtggcccaggcgctggagctctctcggaaaccacacgtggtcatcgccacgccggggcgcctggcagatcacctgcgcagctccaacacttttagtataaagaagatccgcttcctggtgatggatgaggcagaccggctgctggaacagggctgcactgacttcaccgtggacctggaggccatcctggcggctgtgccggcccgcaggcagacactgctgttcagcgccacgctgaccgacacactccgggagctgcagggtctggccaccaaccagcccttcttctgggaagcacaggccccggtgagcaccgtggagcagctggaccagcgctacctgctggtgcctgagaaggtcaaggacgcctacctggtccacctgatccagcgcttccaggatgagcacgaggactggtccattatcatcttcaccaacacgtgcaagacctgccagattctgtgcatgatgctgcgcaaattcagcttccccaccgtggctctgcactccatgatgaagcagaaagaacgctttgccgccctagccaagttcaagtccagcatctaccggatcctgatcgcaacagacgtggcctcccggggcctggacatccctacggtacaggtggtcatcaaccacaacacccccgggctccccaagatctacatccaccgagtcggccggacggcccgtgcagggcggcagggtcaggccatcacgctggtgacacagtacgacatccacctggtgcacgccatcgaggagcagatcaagaagaagctggaggagttctccgtggaagaggccgaggtgctacagatcctcacacaggtcaacgtggtgcgaagagagtgtgagatcaaactggaggcggcccactttgacgaaaagaaggagatcaacaaacggaagcagctgatcctggaggggaaggaccctgacctggaggccaagcgcaaggctgagctggccaagatcaagcagaagaaccggcgcttcaaggagaaggtggaggagacgctgaagcgacagaaggctggcagggctggccacaaggggcgtccacccaggacaccgtctgggtcccactcaggcccagtcccctcccagggcctggtctgagccccacacggccatctgcccagtccttgactcgtccatggagctgagggtcggaggaaccttccttgggggcagcagcccttcccgggggcctacccagtgccccacagcagaacccgtgggcgctcgtgttgtgcgggccctgctcctctgccccgaaaccactggctggtcccttccctgagccctggccaagattcaggctgcaggggaagaaagaacatgaccgggaggttgtgaccccaacccaaggtcaccccccaggggtgccgcatacaggaggtgcttaataaacgggtcttttgacttcctca

SEQ ID NO: 32201 - DNA, 822 bp, Homo sapiens
  misc_feature (4)..(4): n is a, c, g, or t
  misc_feature (7)..(7): n is a, c, g, or t
ggcncgnggccggaagcgcggatcacacgggcccctacaaggggcccctacaagcggccacaaggatggcaggcttcgcggagctcgggctgtcatcgtggctcgtggaacaatgtcggcagctgggtttgaagcagcccacgcccgtgcagctcggctgcatccccgccatcctggagggtcgagactgcttgggctgtgctaagacaggcagtgggaagacagcagcgtttgtccttcccatcttgcagaagctgtctgaggatccctatggcatcttctgcctcgtcctgacacccaccaggtgatggatgaggcagaccggctgctggaacagggctgcactgacttcaccgtggacctggaggccatcctggcggctgtgccggcccgcaggcagacactgctgttcagcgccacgctgaccgacacactccgggagctgcagggtctggccaccaaccagcccttcttctgggaagcacaggccccggtgagcaccgtggagcagctggaccagcgctacctgctggtgcctgagaaggtcaaggacgcctacctggtccacctgatccagcgcttccaggatgagcacgaggactggtccattatcatcttcaccaacacgtgcaagacctgccagattctgtgcatgatgctgcgcaaattcagcttccccaccgtggctctgcactccatgatgaagcagctcgggaggctgaggcaggagaattgcttgaacccgggaagcggaggttgcaatgagtggagatcgcacaattgcactccagcctgagcaacagtgtaagactctgtctcaaa

SEQ ID NO: 32202 - DNA, 2014 bp, Homo sapiens
  misc_feature (4)..(4): n is a, c, g, or t
  misc_feature (7)..(7): n is a, c, g, or t
ggcncgnggccggaagcgcggatcacacgggcccctacaaggggcccctacaagcggccacaaggatggcaggcttcgcggagctcgggctgtcatcgtggctcgtggaacaatgtcggcagctgggtttgaagcagcccacgcccgtgcagctcggctgcatccccgccatcctggagggtcgagactgcttgggctgtgctaagacaggcagtgggaagacagcagcgtttgtccttcccatcttgcagaagctgtctgaggatccctatggcatcttctgcctcgtcctgacacccaccagggagctggcctaccagatcgcagagcagttccgggtcctggggaagcctctagggctgaaagactgcatcatcgtcggtggcatggacatggtggcccaggcgctggagctctctcggaaaccacacgtggtcatcgccacgccggggcgcctggcagatcacctgcgcagctccaacacttttagtataaagaagatccgcttcctggtgatggatgaggcagaccggctgctggaacagggctgcactgacttcaccgtggacctggaggccatcctggcggctgtgccggcccgcaggcagacactgctgttcagcgccacgctgaccgacacactccgggagctgcagggtctggccaccaaccagcccttcttctgggaagcacaggccccggtgagcaccgtggagcagctggaccagcgctacctgctggtgcctgagaaggtcaaggacgcctacctggtccacctgatccagcgcttccaggatgagcacgaggactggtccattatcatcttcaccaacacgtgcaagacctgccagattctgtgcatgatgctgcgcaaattcagcttccccaccgtggctctgcactccatgatgaagcagaaagaacgctttgccgccctagccaagttcaagtccagcatctaccggatcctgatcgcaacagacgtggcctcccgggtgagcagcccccagtctcctgccaagggcactccctcttttactacaaggccccacagatgagaaggctggcctcaggcatgtcaggcagccctagcatccctgctgagtgaccctgggtgagtccttgcctcggtttccccacatggacagtggagctgaccagccacctctgcctccaggggcctggacatccctacggtacaggtggtcatcaaccacaacacccccgggctccccaagatctacatccaccgagtcggccggacggcccgtgcagggcggcagggtcaggccatcacgctggtgacacagtacgacatccacctggtgcacgccatcgaggagcagatcaagaagaagctggaggagttctccgtggaagaggccgaggtgctacagatcctcacacaggtcaacgtggtgcgaagagagtgtgagatcaaactggaggcggcccactttgacgaaaagaaggagatcaacaaacggaagcagctgatcctggaggggaaggaccctgacctggaggccaagcgcaaggctgagctggccaagatcaagcagaagaaccggcgcttcaaggagaaggtggaggagacgctgaagcgacagaaggctggcagggctggccacaaggggcgtccacccaggacaccgtctgggtcccactcaggcccagtcccctcccagggcctggtctgagccccacacggccatctgcccagtccttgactcgtccatggagctgagggtcggaggaaccttccttgggggcagcagcccttcccgggggcctacccagtgccccacagcagaacccgtgggcgctcgtgttgtgcgggccctgctcctctgccccgaaaccactggctggtcccttccctgagccctggccaagattcaggctgcaggggaagaaagaacatgaccgggaggttgtgaccccaacccaaggtcaccccccaggggtgccgcatacaggaggtgcttaataaacgggtcttttgacttcctca

SEQ ID NO: 32203 - DNA, 1719 bp, Homo sapiens
  misc_feature (4)..(4): n is a, c, g, or t
  misc_feature (7)..(7): n is a, c, g, or t
ggcncgnggccggaagcgcggatcacacgggcccctacaaggggcccctacaagcggccacaaggatggcaggcttcgcggagctcgggctgtcatcgtggctcgtggaacaatgtcggcagctgggtttgaagcagcccacgcccgtgcagctcggctgcatccccgccatcctggagggtcgagactgcttgggctgtgctaagacaggcagtgggaagacagcagcgtttgtccttcccatcttgcagaagctgtctgaggatccctatggcatcttctgcctcgtcctgacacccaccagggagctggcctaccagatcgcagagcagttccgggtcctggggaagcctctagggctgaaagactgcatcatcgtcggtggcatggacatggtggcccaggcgctggagctctctcggaaaccacacgtggtcatcgccacgccggggcgcctggcagatcacctgcgcagctccaacacttttagtataaagaagatccgcttcctggtgatggatgaggcagaccggctgctggaacagggctgcactgacttcaccgtggacctggaggccatcctggcggctgtgccggcccgcaggcagacactgctgttcagcgccacgctgaccgacacactccgggagctgcagggtctggccaccaaccagcccttcttctgggaagcacaggccccggtgagcaccgtggagcagctggaccagcgctacctgctggtgcctgagaaggtcaaggacgcctacctggtccacctgatccagcgcttccaggatgagcacgaggactggtccattatcatcttcaccaacacgtgcaagacctgccagattctgtgcatgatgctgcgcaaattcagcttccccaccgtggctctgcactccatgatgaagcagaaagaacgctttgccgccctagccaagttcaagtccagcatctaccggatcctgatcgcaacagacgtggcctcccggggcctggacatccctacggtacaggtggtcatcaaccacaacacccccgggctccccaagatctacatccaccgagtcggccggacggcccgtgcagggcggcagggtcaggccatcacgctggtgacacagtacgacatccacctggtgcacgccatcgaggagcagatcaagaagaagctggaggagttctccgtggaagaggccgaggtgctacagatcctcacacaggtcaacgtggtgcgaagagagtgtgagatcaaactggaggcggcccactttgacgaaaagaaggagatcaacaaacggaagcagctgatcctggaggggaaggaccctgacctggaggccaagcgcaaggctgagctggccaagatcaagcagaagaaccggcgcttcaaggagaaggtggaggagacgctgaagcgacagaaggctggcagggctggccacaaggggcgtccacccaggacaccgtctgggtcccactcaggccgggggcctacccagtgccccacagcagaacccgtgggcgctcgtgttgtgcgggccctgctcctctgccccgaaaccactggctggtcccttccctgagccctggccaagattcaggctgcaggggaagaaagaacatgaccgggaggttgtgaccccaacccaaggtcaccccccaggggtgccgcatacaggaggtgcttaataaacgggtcttttgacttcctca

SEQ ID NO: 32204 - DNA, 1437 bp, Homo sapiens
  misc_feature (4)..(4): n is a, c, g, or t
  misc_feature (7)..(7): n is a, c, g, or t
ggcncgnggccggaagcgcggatcacacgggcccctacaaggggcccctacaagcggccacaaggatggcaggcttcgcggagctcgggctgtcatcgtggctcgtggaacaatgtcggcagctgggtttgaagcagcccacgcccgtgcagctcggctgcatccccgccatcctggagggtcgagactgcttgggctgtgctaagacaggcagtgggaagacagcagcgtttgtccttcccatcttgcagaagctgtctgaggatccctatggcatcttctgcctcgtcctgacacccaccagggagctggcctaccagatcgcagagcagttccgggtcctggggaagcctctagggctgaaagactgcatcatcgtcggtggcatggacatggtggcccaggcgctggagctctctcggaaaccacacgtggtcatcgccacgccggggcgcctggcagatcacctgcgcagctccaacacttttagtataaagaagatccgcttcctggtgatggatgaggcagaccggctgctggaacagggctgcactgacttcaccgtggacctggaggccatcctggcggctgtgccggcccgcaggcagacactgctgttcagcgccacgctgaccgacacactccgggagctgcagggtctggccaccaaccagcccttcttctgggaagcacaggccccggtgagcaccgtggagcagctggaccagcgctacctgctggtgcctgagaaggtcaaggacgcctacctggtccacctgatccagcgcttccaggatgagcacgaggactggtccattatcatcttcaccaacacgtgcaagacctgccagattctgtgcatgatgctgcgcaaattcagcttccccaccgtggctctgcactccatgatgaagcagaaagaacgctttgccgccctagccaagttcaagtccagcatctaccggatcctgatcgcaacagacgtggcctcccggggcctggacatccctacggtacaggtggtcatcaaccacaacacccccgggctccccaagatctacatccacccaggacaccgtctgggtcccactcaggcccagtcccctcccagggcctggtctgagccccacacggccatctgcccagtccttgactcgtccatggagctgagggtcggaggaaccttccttgggggcagcagcccttcccgggggcctacccagtgccccacagcagaacccgtgggcgctcgtgttgtgcgggccctgctcctctgccccgaaaccactggctggtcccttccctgagccctggccaagattcaggctgcaggggaagaaagaacatgaccgggaggttgtgaccccaacccaaggtcaccccccaggggtgccgcatacaggaggtgcttaataaacgggtcttttgacttcctca

SEQ ID NO: 32205 - DNA, 1435 bp, Homo sapiens
  misc_feature (4)..(4): n is a, c, g, or t
  misc_feature (7)..(7): n is a, c, g, or t
ggcncgnggccggaagcgcggatcacacgggcccctacaaggggcccctacaagcggccacaaggatggcaggcttcgcggagctcgggctgtcatcgtggctcgtggaacaatgtcggcagctgggtttgaagcagcccacgcccgtgcagctcggctgcatccccgccatcctggagggtcgagactgcttgggctgtgctaagacaggcagtgggaagacagcagcgtttgtccttcccatcttgcagaagctgtctgaggatccctatggcatcttctgcctcgtcctgacacccaccagggagctggcctaccagatcgcagagcagttccgggtcctggggaagcctctagggctgaaagactgcatcatcgtcggtggcatggacatggtggcccaggcgctggagctctctcggaaaccacacgtggtcatcgccacgccggggcgcctggcagatcacctgcgcagctccaacacttttagtataaagaagatccgcttcctggtgatggatgaggcagaccggctgctggaacagggctgcactgacttcaccgtggacctggaggccatcctggcggctgtgccggcccgcaggcagacactgctgttcagcgccacgctgaccgacacactccgggagctgcagggtctggccaccaaccagcccttcttctgggaagcacaggccccggtgagcaccgtggagcagctggaccagcgctacctgctggtgcctgagaaggtcaaggacgcctacctggtccacctgatccagcgcttccaggatgagcacgaggactggtccattatcatcttcaccaacacgtgcaagacctgccagattctgtgcatgatgctgcgcaaattcagcttccccaccgtggctctgcactccatgatgaagcagaaagaacgctttgccgccctagccaagttcaagtccagcatctaccggatcctgatcgcaacagacgtggcctcccggggcctggacatccctacggtacaggtggtcatcaaccacaacacccccgggctccccaagatctacatccaccgagtcggccggacggcccgtgcaggcggcagggtcacggcatcacgctggtgaaaacagtaccgacgattccaccttggttgctacgccaatcgagggaagcacaatccacgcaaggacgctggcgccacttcctccgtgggacagcaggccggaggtggctaagatcctaaccaggtcacgtggtgccgaacagagtgtgggaatcacattgggaggcggccgtttggagaacagagggttccccaccgagccctgctctgcaggggaggccgcactgaggcacccagctgtcgcacaacacgaacagccccccgcagggcgccccgcaccacgggcgcccggcacccaacgcggccagaccccgg

SEQ ID NO: 32206 - DNA, 1836 bp, Homo sapiens
  misc_feature (4)..(4): n is a, c, g, or t
  misc_feature (7)..(7): n is a, c, g, or t
ggcncgnggccggaagcgcggatcacacgggcccctacaaggggcccctacaagcggccacaaggatggcaggcttcgcggagctcgggctgtcatcgtggctcgtggaacaatgtcggcagctgggtttgaagcagcccacgcccgtgcagctcggctgcatccccgccatcctggaggaagctgtctgaggatccctatggcatcttctgcctcgtcctgacacccaccaggggtcctgcagaattaaacaagatggccccggtgcagtggctcacacctgtaatcccagcactttgggagctccagggagctggcctaccagatcgcagagcagttccgggtcctggggaagcctctagggctgaaagactgcatcatcgtcggtggcatggacatggtggcccaggcgctggagctctctcggaaaccacacgtggtcatcgccacgccggggcgcctggcagatcacctgcgcagctccaacacttttagtataaagaagatccgcttcctggtgatggatgaggcagaccggctgctggaacagggctgcactgacttcaccgtggacctggaggccatcctggcggctgtgccggcccgcaggcagacactgctgttcagcgccacgctgaccgacacactccgggagctgcagggtctggccaccaaccagcccttcttctgggaagcacaggccccggtgagcaccgtggagcagctggaccagcgctacctgctggtgcctgagaaggtcaaggacgcctacctggtccacctgatccagcgcttccaggatgagcacgaggactggtccattatcatcttcaccaacacgtgcaagacctgccagattctgtgcatgatgctgcgcaaattcagcttccccaccgtggctctgcactccatgatgaagcagaaagaacgctttgccgccctagccaagttcaagtccagcatctaccggatcctgatcgcaacagacgtggcctcccggggcctggacatccctacggtacaggtggtcatcaaccacaacacccccgggctccccaagatctacatccaccgagtcggccggacggcccgtgcagggcggcagggtcaggccatcacgctggtgacacagtacgacatccacctggtgcacgccatcgaggagcagatcaagaagaagctggaggagttctccgtggaagaggccgaggtgctacagatcctcacacaggtcaacgtggtgcgaagagagtgtgagatcaaactggaggcggcccactttgacgaaaagaaggagatcaacaaacggaagcagctgatcctggaggggaaggaccctgacctggaggccaagcgcaaggctgagctggccaagatcaagcagaagaaccggcgcttcaaggagaaggtggaggagacgctgaagcgacagaaggctggcagggctggccacaaggggcgtccacccaggacaccgtctgggtcccactcaggcccagtcccctcccagggcctggtctgagccccacacggccatctgcccagtccttgactcgtccatggagctgagggtcggaggaaccttccttgggggcagcagcccttcccgggggcctacccagtgccccacagcagaacccgtgggcgctcgtgttgtgcgggccctgctcctctgccccgaaaccactggctggtcccttccctgagccctggccaagattcaggctgcaggggaagaaagaacatgaccgggaggttgtgaccccaacccaaggtcaccccccaggggtgccgcatacaggaggtgcttaataaacgggtcttttgacttcctca

SEQ ID NO: 32207 - DNA, 1737 bp, Homo sapiens
  misc_feature (4)..(4): n is a, c, g, or t
  misc_feature (7)..(7): n is a, c, g, or t
ggcncgnggccggaagcgcggatcacacgggcccctacaaggggcccctacaagcggccacaaggatggcaggcttcgcggagctcgggctgtcatcgtggctcgtggaacaatgtcggcagctgggtttgaagcagcccacgcccgtgcagctcggctgcatccccgccatcctggagggtcgagactgcttgggctgtgctaagacaggcagtgggaagacagcagcgtttgtccttcccatcttgcagaagctgtctgaggatccctatggcatcttctgcctcgtcctgacacccaccagggagctggcctaccagatcgcagagcagttccgggtcctggggaagcctctagggctgaaagactgcatcatcgtcggtggcatggacatggtggcccaggcgctggagctctctcggaaaccacacgtggtcatcgccacgccggggcgcctggcagatcacctgcgcagctccaacacttttagtataaagaagatccgcttcctggtgatggatgaggcagaccggctgctggaacagggctgcactgacttcaccgtggacctggaggccatcctggcggctgtgccggcccgcaggcagacactgctgttcagcgccacgctgaccgacacactccgggagctgcagggtctggccaccaaccagcccttcttctgggaagcacaggccccgatgagcacgaggactggtccattatcatcttcaccaacacgtgcaagacctgccagattctgtgcatgatgctgcgcaaattcagcttccccaccgtggctctgcactccatgatgaagcagaaagaacgctttgccgccctagccaagttcaagtccagcatctaccggatcctgatcgcaacagacgtggcctcccggggcctggacatccctacggtacaggtggtcatcaaccacaacacccccgggctccccaagatctacatccaccgagtcggccggacggcccgtgcagggcggcagggtcaggccatcacgctggtgacacagtacgacatccacctggtgcacgccatcgaggagcagatcaagaagaagctggaggagttctccgtggaagaggccgaggtgctacagatcctcacacaggtcaacgtggtgcgaagagagtgtgagatcaaactggaggcggcccactttgacgaaaagaaggagatcaacaaacggaagcagctgatcctggaggggaaggaccctgacctggaggccaagcgcaaggctgagctggccaagatcaagcagaagaaccggcgcttcaaggagaaggtggaggagacgctgaagcgacagaaggctggcagggctggccacaaggggcgtccacccaggacaccgtctgggtcccactcaggcccagtcccctcccagggcctggtctgagccccacacggccatctgcccagtccttgactcgtccatggagctgagggtcggaggaaccttccttgggggcagcagcccttcccgggggcctacccagtgccccacagcagaacccgtgggcgctcgtgttgtgcgggccctgctcctctgccccgaaaccactggctggtcccttccctgagccctggccaagattcaggctgcaggggaagaaagaacatgaccgggaggttgtgaccccaacccaaggtcaccccccaggggtgccgcatacaggaggtgcttaataaacgggtcttttgacttcctca

SEQ ID NO: 32208 - DNA, 1623 bp, Homo sapiens
  misc_feature (4)..(4): n is a, c, g, or t
  misc_feature (7)..(7): n is a, c, g, or t
ggcncgnggccggaagcgcggatcacacgggcccctacaaggggcccctacaagcggccacaaggatggcaggcttcgcggagctcgggctgtcatcgtggctcgtggaacaatgtcggcagctgggtttgaagcagcccacgcccgtgcagctcggctgcatccccgccatcctggagggtcgagactgcttgggctgtgctaagacaggcagtgggaagacagcagcgtttgtccttcccatcttgcagaagctgtctgaggatccctatggcatcttctgcctcgtcctgacacccaccaggtgatggatgaggcagaccggctgctggaacagggctgcactgacttcaccgtggacctggaggccatcctggcggctgtgccggcccgcaggcagacactgctgttcagcgccacgctgaccgacacactccgggagctgcagggtctggccaccaaccagcccttcttctgggaagcacaggccccggtgagcaccgtggagcagctggaccagcgctacctgctggtgcctgagaaggtcaaggacgcctacctggtccacctgatccagcgcttccaggatgagcacgaggactggtccattatcatcttcaccaacacgtgcaagacctgccagattctgtgcatgatgctgcgcaaattcagcttccccaccgtggctctgcactccatgatgaagcagaaagaacgctttgccgccctagccaagttcaagtccagcatctaccggatcctgatcgcaacagacgtggcctcccggggcctggacatccctacggtacaggtggtcatcaaccacaacacccccgggctccccaagatctacatccaccgagtcggccggacggcccgtgcagggcggcagggtcaggccatcacgctggtgacacagtacgacatccacctggtgcacgccatcgaggagcagatcaagaagaagctggaggagttctccgtggaagaggccgaggtgctacagatcctcacacaggtcaacgtggtgcgaagagagtgtgagatcaaactggaggcggcccactttgacgaaaagaaggagatcaacaaacggaagcagctgatcctggaggggaaggaccctgacctggaggccaagcgcaaggctgagctggccaagatcaagcagaagaaccggcgcttcaaggagaaggtggaggagacgctgaagcgacagaaggctggcagggctggccacaaggggcgtccacccaggacaccgtctgggtcccactcaggcccagtcccctcccagggcctggtctgagccccacacggccatctgcccagtccttgactcgtccatggagctgagggtcggaggaaccttccttgggggcagcagcccttcccgggggcctacccagtgccccacagcagaacccgtgggcgctcgtgttgtgcgggccctgctcctctgccccgaaaccactggctggtcccttccctgagccctggccaagattcaggctgcaggggaagaaagaacatgaccgggaggttgtgaccccaacccaaggtcaccccccaggggtgccgcatacaggaggtgcttaataaacgggtcttttgacttcctca

SEQ ID NO: 32209 - DNA, 1586 bp, Homo sapiens
  misc_feature (4)..(4): n is a, c, g, or t
  misc_feature (7)..(7): n is a, c, g, or t
ggcncgnggccggaagcgcggatcacacgggcccctacaaggggcccctacaagcggccacaaggatggcaggcttcgcggagctcgggctgtcatcgtggctcgtggaacaatgtcggcagctgggtttgaagcagcccacgcccgtgcagctcggctgcatccccgccatcctggagggtcgagactgcttgggctgtgctaagacaggcagtgggaagacagcagcgtttgtccttcccatcttgcagaagctgtctgaggatccctatggcatcttctgcctcgtcctgacacccaccagacatggtggcccaggcgctggagctctctcggaaaccacacgtggtcatcgccacgccggggcgcctggcagatcacctgcgcagctccaacacttttagtataaagaagatccgcttcctggtgatggatgaggcagaccggctgctggaacagggctgcactgacttcaccgtggacctggaggccatcctggcggctgtgccggcccgcaggcagacactgctgttcagcgccacgctgaccgacacactccgggagctgcagggtctggccaccaaccagcccttcttgacctgccagattctgtgcatgatgctgcgcaaattcagcttccccaccgtggctctgcactccatgatgaagcagaaagaacgctttgccgccctagccaagttcaagtccagcatctaccggatcctgatcgcaacagacgtggcctcccggggcctggacatccctacggtacaggtggtcatcaaccacaacacccccgggctccccaagatctacatccaccgagtcggccggacggcccgtgcagggcggcagggtcaggccatcacgctggtgacacagtacgacatccacctggtgcacgccatcgaggagcagatcaagaagaagctggaggagttctccgtggaagaggccgaggtgctacagatcctcacacaggtcaacgtggtgcgaagagagtgtgagatcaaactggaggcggcccactttgacgaaaagaaggagatcaacaaacggaagcagctgatcctggaggggaaggaccctgacctggaggccaagcgcaaggctgagctggccaagatcaagcagaagaaccggcgcttcaaggagaaggtggaggagacgctgaagcgacagaaggctggcagggctggccacaaggggcgtccacccaggacaccgtctgggtcccactcaggcccagtcccctcccagggcctggtctgagccccacacggccatctgcccagtccttgactcgtccatggagctgagggtcggaggaaccttccttgggggcagcagcccttcccgggggcctacccagtgccccacagcagaacccgtgggcgctcgtgttgtgcgggccctgctcctctgccccgaaaccactggctggtcccttccctgagccctggccaagattcaggctgcaggggaagaaagaacatgaccgggaggttgtgaccccaacccaaggtcaccccccaggggtgccgcatacaggaggtgcttaataaacgggtcttttgacttcctca

SEQ ID NO: 32210 - DNA, 442 bp, Homo sapiens
gtacgggagctgggaggcgggggaagccccagcatgggaccctagcagctttggaccacctgcccagccctgcctctcatgctctgtcccccagacatggtggcccaggcgctggagctctctcggaaaccacacgtggtcatcgccacgccggggcgcctggcagatcacctgcgcagctccaacacttttagtataaagaagatccgcttcctggtgagttcgccccgcccctgcagacctcaggagctgggctcggagcctccaggcccaatgtcagagcctggggcaccatctcatccatttaggaaacgtatgtccgttagactgtccagtaaaacgctaggaacagtgacaaggaccgttcaaggaccaacaagagggggcccagtcctagcaatgttattcgggggtagggccttgctgagacttgggtgagggg

SEQ ID NO: 32211 - DNA, 351 bp, Homo sapiens
cctcagtctcccaaagtgctgggattacaggcatgagccaccgtgcctggcctgctgcctctcctttctaagctgcatgaggccactgtgctaggtgtctcaggggcgggtgggggcaggaacaccttcccagaacctgagagctggaggggttgacaggcacatccttcccgccgacctgccagattctgtgcatgatgctgcgcaaattcagcttccccaccgtggctctgcactccatgatgaagcagaggtgaggccaccctggggcccgccagcctcaccctgggataccttccccgcctcagacattggccccgatccttccttctgccgggcgccttcttcctg

SEQ ID NO: 32212 - DNA, 1936 bp, Homo sapiens
  misc_feature (4)..(4): n is a, c, g, or t
  misc_feature (7)..(7): n is a, c, g, or t
ggcncgnggccggaagcgcggatcacacgggcccctacaaggggcccctacaagcggccacaaggatggcaggcttcgcggagctcgggctgtcatcgtggctcgtggaacaatgtcggcagctgggtttgaagcagcccacgcccgtgcagctcggctgcatccccgccatcctggagggtcgagactgcttgggctgtgctaagacaggcagtgggaagacagcagcgtttgtccttcccatcttgcagaagctgtctgaggatccctatggcatcttctgcctcgtcctgacacccaccaggggtcctgcagaattaaacaagatggccccggtgcagtggctcacacctgtaatcccagcactttgggagctccagggagctggcctaccagatcgcagagcagttccgggtcctggggaagcctctagggctgaaagactgcatcatcgtcggtggcatggacatggtggcccaggcgctggagctctctcggaaaccacacgtggtcatcgccacgccggggcgcctggcagatcacctgcgcagctccaacacttttagtataaagaagatccgcttcctggtgatggatgaggcagaccggctgctggaacagggctgcactgacttcaccgtggacctggaggccatcctggcggctgtgccggcccgcaggcagacactgctgttcagcgccacgctgaccgacacactccgggagctgcagggtctggccaccaaccagcccttcttctgggaagcacaggccccggtgagcaccgtggagcagctggaccagcgctacctgctggtgcctgagaaggtcaaggacgcctacctggtccacctgatccagcgcttccaggatgagcacgaggactggtccattatcatcttcaccaacacgtgcaagacctgccagattctgtgcatgatgctgcgcaaattcagcttccccaccgtggctctgcactccatgatgaagcagaaagaacgctttgccgccctagccaagttcaagtccagcatctaccggatcctgatcgcaacagacgtggcctcccgtggagctgaccagccacctctgcctccaggggcctggacatccctacggtacaggtggtcatcaaccacaacacccccgggctccccaagatctacatccaccgagtcggccggacggcccgtgcagggcggcagggtcaggccatcacgctggtgacacagtacgacatccacctggtgcacgccatcgaggagcagatcaagaagaagctggaggagttctccgtggaagaggccgaggtgctacagatcctcacacaggtcaacgtggtgcgaagagagtgtgagatcaaactggaggcggcccactttgacgaaaagaaggagatcaacaaacggaagcagctgatcctggaggggaaggaccctgacctggaggccaagcgcaaggctgagctggccaagatcaagcagaagaaccggcgcttcaaggagaaggtggaggagacgctgaagcgacagaaggctggcagggctggccacaaggggcgtccacccaggacaccgtctgggtcccactcaggcccagtcccctcccagggcctggtctgagccccacacggccatctgcccagtccttgactcgtccatggagctgagggtcggaggaaccttccttgggggcagcagcccttcccgggggcctacccagtgccccacagcagaacccgtgggcgctcgtgttgtgcgggccctgctcctctgccccgaaaccactggctggtcccttccctgagccctggccaagattcaggctgcaggggaagaaagaacatgaccgggaggttgtgaccccaacccaaggtcaccccccaggggtgccgcatacaggaggtgcttaataaacgggtcttttgacttcctca

SEQ ID NO: 32213 - DNA, 2094 bp, Homo sapiens
  misc_feature (4)..(4): n is a, c, g, or t
  misc_feature (7)..(7): n is a, c, g, or t
ggcncgnggccggaagcgcggatcacacgggcccctacaaggggcccctacaagcggccacaaggatggcaggcttcgcggagctcgggctgtcatcgtggctcgtggaacaatgtcggcagctgggtttgaagcagcccacgcccgtgcagctcggctgcatccccgccatcctggagggtcgagactgcttgggctgtgctaagacaggcagtgggaagacagcagcgtttgtccttcccatcttgcagaagctgtctgaggatccctatggcatcttctgcctcgtcctgacacccaccagggagctggcctaccagatcgcagagcagttccgggtcctggggaagcctctagggctgaaagactgcatcatcgtcggtggcatggacatggtggcccaggcgctggagctctctcggaaaccacacgtggtcatcgccacgccggggcgcctggcagatcacctgcgcagctccaacacttttagtataaagaagatccgcttcctggtgatggatgaggcagaccggctgctggaacagggctgcactgacttcaccgtggacctggaggccatcctggcggctgtgccggcccgcaggcagacactgctgttcagcgccacgctgaccgacacactccgggagctgcagggtctggccaccaaccagcccttcttctgggaagcacaggccccggtgagcaccgtggagcagctggaccagcgctacctgctggtgcctgagaaggtcaaggacgcctacctggtccacctgatccagcgcttccaggatgagcacgaggactggtccattatcatcttcaccaacacgtgcaagacctgccagattctgtgcatgatgctgcgcaaattcagcttccccaccgtggctctgcactccatgatgaagcagaaagaacgctttgccgccctagccaagttcaagtccagcatctaccggatcctgatcgcaacagacgtggcctcccggggcctggacatccctacggtacaggtggtcatcaaccacaacacccccgggctccccaagatctacatccaccgagtcggccggacggcccgtgcagggcggcagggtcaggccatcacgctggtgacacagtacgacatccacctggtgcacgccatcgaggagcagatcaagaagaagctggaggagttctccgtggaagaggccgaggtgctacagatcctcacacaggtcaacgtggtgcgaagagagtgtgagatcaaactggaggcggcccactttgacgaaaagaaggagatcaacaaacggaagcagctgatcctggaggggaaggaccctgacctggaggccaagcgcaaggctgagctggccaagatcaagcagaagaaccggcgcttcaaggagaaggtggaggagacgctgaagcgacagaaggctggcagggctggccacaaggggcgtccacccaggacaccgtctgggtcccactcaggcccagtcccctcccagggcctggtctgagccccacacggccatctgcccagtccttgactcgtccatggagctgagggtcggaggaaccttccttgggggcagcagcccttcccgggggcctacccagtgccccacagcagaacccgtgggcgctcgtgttgtgcgggccctgctcctctgccccgaaaccactggctggtcccttccctgagccctggccaagattcaggctgcaggggaagaaagaacatgaccgggaggttgtgaccccaacccaaggtcaccccccaggggtgccgcatacaggaggtgcttaataaacgggtcttttgacttcctcaaaaaaaaaaaaaaaaaaaaaaaaaaaaaaaaaaaaaaaaaaaaaaaaaaaaaaaaaaaaaaaaaaaaaaaaaaaaaagaaaaaacaaacaaaaaaacaacaaaagagaggggggcgcgcgcgcggcgaaatagacgctctctccccccacgcgggcgcggcgacacaaaaaaggagacacggcgcgacccccagcacgagtcattcaggacaggaccagaggagggggcccccaaaagaggagagagggagcatattataccg

SEQ ID NO: 32214 - DNA, 1742 bp, Homo sapiens
  misc_feature (4)..(4): n is a, c, g, or t
  misc_feature (7)..(7): n is a, c, g, or t
ggcncgnggccggaagcgcggatcacacgggcccctacaaggggcccctacaagcggccacaaggatggcaggcttcgcggagctcgggctgtcatcgtggctcgtggaacaatgtcggcagctgggtttgaagcagcccacgcccgtgcagctcggctgcatccccgccatcctggagggtcgagactgcttgggctgtgctaagacaggcagtgggaagacagcagcgtttgtccttcccatcttgcagaagctgtctgaggatccctatggcatcttctgcctcgtcctgacacccaccagggagctggcctaccagatcgcagagcagttccgggtcctggggaagcctctagggctgaaagactgcatcatcgtcggtggcatggacatggtggcccaggcgctggagctctctcggaaaccacacgtggtcatcgccacgccggggcgcctggcagatcacctgcgcagctccaacacttttagtataaagaagatccgcttcctggtgatggatgaggcagaccggctgctggaacagggctgcactgacttcaccgtggacctggaggccatcctggcggctgtgccggcccgcaggcagacactgctgttcagcgccacgctgaccgacacactccgggagctgcagggtctggccaccaaccagcccttcttctgggaagcacaggccccggtgagcaccgtggagcagctggaccagcgctacctgctggtgcctgagaaggtcaaggacgcctacctggtccacctgatccagcgcttccaggatgagcacgaggactggtccattatcatcttcaccaacacgtgcaagacctgccagattctgtgcatgatgctgcgcaaattcagcttccccaccgtggctctgcactccatgatgaagcagaaagaacgctttgccgccctagccaagttcaagtccagcatctaccggatcctgatcgcaacagacgtggcctcccggggcctggacatccctacggtacaggtggtcatcaaccacaacacccccgggctccccaagatctacatccaccgagtcggccggacggcccgtgcagggcggcagggtcaggccatcacgctggtgacacagtacgacatccacctggtgcacgccatcgaggagcagatcaagaagaagctggaggagttctccgtggaagaggccgaggtgctacagatcctcacacaggtcaacgtggtgcgaagagagtgtgagatcaaactggaggcggcccactttgacgaaaagaaggagatcaacaaacggaagcagctgatcctggaggggaaggaccctgacctggaggccaagcgcaaggctgagctggccaagatcaagcagaagaaccggcgcttcaaggagaaggtggaggagacgctgaagcgacagaaggctggcagggctggccacaaggggcgtccacccaggacaccgtctgggtcccactcaggcccagtcccctcccagggcctggtctgagccccacacggccatctgcccagtccttgactcgtccatggagctgagggtcggaggaaccttccttgggggcagcagcccttccccttccctgagccctggccaagattcaggctgcaggggaagaaagaacatgaccgggaggttgtgaccccaacccaaggtcaccccccaggggtgccgcatacaggaggtgcttaataaacgggtcttttgacttcctca

SEQ ID NO: 32215 - DNA, 1755 bp, Homo sapiens
  misc_feature (4)..(4): n is a, c, g, or t
  misc_feature (7)..(7): n is a, c, g, or t
ggcncgnggccggaagcgcggatcacacgggcccctacaaggggcccctacaagcggccacaaggatggcaggcttcgcggagctcgggctgtcatcgtggctcgtggaacaatgtcggcagctgggtttgaagcagcccacgcccgtgcagctcggctgcatccccgccatcctggagggtcgagactgcttgggctgtgctaagacaggcagtgggaagacagcagcgtttgtccttcccatcttgcagaagctgtctgaggatccctatggcatcttctgcctcgtcctgacacccaccagggagctggcctaccagatcgcagagcagttccgggtcctggggaagcctctagggctgaaagactgcatcatcgtcggtggcatggacatggtggcccaggcgctggagctctctcggaaaccacacgtggtcatcgccacgccggggcgcctggcagatcacctgcgcagctccaacacttttagtataaagaagatccgcttcctggtgatggatgaggcagaccggctgctggaacagggctgcactgacttcaccgtggacctggaggccatcctggcggctgtgccggcccgcaggcagacactgctgttcagcgccacgctgaccgacacactccgggagctgcagggtctggccaccaaccagcccttcttctgggaagcacaggccccggtgagcaccgtggagcagctggaccagcgctacctgctggtgcctgagaaggtcaaggacgcctacctggtccacctgatccagcgcttccaggatgagcacgaggactggtccattatcatcttcaccaacacgtgcaaaaagaacgctttgccgccctagccaagttcaagtccagcatctaccggatcctgatcgcaacagacgtggcctcccggggcctggacatccctacggtacaggtggtcatcaaccacaacacccccgggctccccaagatctacatccaccgagtcggccggacggcccgtgcagggcggcagggtcaggccatcacgctggtgacacagtacgacatccacctggtgcacgccatcgaggagcagatcaagaagaagctggaggagttctccgtggaagaggccgaggtgctacagatcctcacacaggtcaacgtggtgcgaagagagtgtgagatcaaactggaggcggcccactttgacgaaaagaaggagatcaacaaacggaagcagctgatcctggaggggaaggaccctgacctggaggccaagcgcaaggctgagctggccaagatcaagcagaagaaccggcgcttcaaggagaaggtggaggagacgctgaagcgacagaaggctggcagggctggccacaaggggcgtccacccaggacaccgtctgggtcccactcaggcccagtcccctcccagggcctggtctgagccccacacggccatctgcccagtccttgactcgtccatggagctgagggtcggaggaaccttccttgggggcagcagcccttcccgggggcctacccagtgccccacagcagaacccgtgggcgctcgtgttgtgcgggccctgctcctctgccccgaaaccactggctggtcccttccctgagccctggccaagattcaggctgcaggggaagaaagaacatgaccgggaggttgtgaccccaacccaaggtcaccccccaggggtgccgcatacaggaggtgcttaataaacgggtcttttgacttcctca

SEQ ID NO: 32216 - DNA, 1907 bp, Homo sapiens
  misc_feature (4)..(4): n is a, c, g, or t
  misc_feature (7)..(7): n is a, c, g, or t
ggcncgnggccggaagcgcggatcacacgggcccctacaaggggcccctacaagcggccacaaggatggcaggcttcgcggagctcgggctgtcatcgtggctcgtggaacaatgtcggcagctgggtttgaagcagcccacgcccgtgcagctcggctgcatccccgccatcctggagggtcgagactgcttgggctgtgctaagacaggcagtgggaagacagcagcgtttgtccttcccatcttgcagaagctgtctgaggatccctatggcatcttctgcctcgtcctgacacccaccaggggtcctgcagaattaaacaagatggccccggtgcagtggctcacacctgtaatcccagcactttgggagctccagggagctggcctaccagatcgcagagcagttccgggtcctggggaagcctctagggctgaaagactgcatcatcgtcggtggcatggacatggtggcccaggcgctggagctctctcggaaaccacacgtggtcatcgccacgccggggcgcctggcagatcacctgcgcagctccaacacttttagtataaagaagatccgcttcctggtgatggatgaggcagaccggctgctggaacagggctgcactgacttcaccgtggacctggaggccatcctggcggctgtgccggcccgcaggcagacactgctgttcagcgccacgctgaccgacacactccgggagctgcagggtctggccaccaaccagcccttcttctgggaagcacaggccccggtgagcaccgtggagcagctggaccagcgctacctgctggtgcctgagaaggtcaaggacgcctacctggtccacctgatccagcgcttccaggatgagcacgaggactggtccattatcatcttcaccaacacgtgcaagacctgccagattctgtgcatgatgctgcgcaaattcagcttccccaccgtggctctgcactccatgatgaagcagaaagaacgctttgccgccctagccaagttcaagtccagcatctaccggatcctgatcgcaacagacgtggcctcccggggcctggacatccctacggtacaggtggtcatcaaccacaacacccccgggctccccaagatctacatccaccgagtcggccggacggcccgtgcagggcggcagggtcaggccatcacgctggtgacacagtacgacatccacctggtgcacgccatcgaggagcagatcaagaagaagctggaggagttctccgtggaagaggccgaggtgctacagatcctcacacaggtcaacgtggtgcgaagagagtgtgagatcaaactggaggcggcccactttgacgaaaagaaggagatcaacaaacggaagcagctgatcctggaggggaaggaccctgacctggaggccaagcgcaaggctgagctggccaagatcaagcagaagaaccggcgcttcaaggagaaggtggaggagacgctgaagcgacagaaggctggcagggctggccacaaggggcgtccacccaggacaccgtctgggtcccactcaggcccagtcccctcccagggcctggtctgagccccacacggccatctgcccagtccttgactcgtccatggagctgagggtcggaggaaccttccttgggggcagcagcccttcccgggggcctacccagtgccccacagcagaacccgtgggcgctcgtgttgtgcgggccctgctcctctgccccgaaaccactggctggtcccttccctgagccctggccaagattcaggctgcaggggaagaaagaacatgaccgggaggttgtgaccccaacccaaggtcaccccccaggggtgccgcatacaggaggtgcttaataaacgggtcttttgacttcctca

SEQ ID NO: 32217 - DNA, 1745 bp, Homo sapiens
  misc_feature (4)..(4): n is a, c, g, or t
  misc_feature (7)..(7): n is a, c, g, or t
ggcncgnggccggaagcgcggatcacacgggcccctacaaggggcccctacaagcggccacaaggatggcaggcttcgcggagctcgggctgtcatcgtggctcgtggaacaatgtcggcagctgggtttgaagcagcccacgcccgtgcagctcggctgcatccccgccatcctggagggtcgagactgcttgggctgtgctaagacaggcagtgggaagacagcagcgtttgtccttcccatcttgcagaagctgtctgaggatccctatggcatcttctgcctcgtcctgacacccaccagacatggtggcccaggcgctggagctctctcggaaaccacacgtggtcatcgccacgccggggcgcctggcagatcacctgcgcagctccaacacttttagtataaagaagatccgcttcctggtgatggatgaggcagaccggctgctggaacagggctgcactgacttcaccgtggacctggaggccatcctggcggctgtgccggcccgcaggcagacactgctgttcagcgccacgctgaccgacacactccgggagctgcagggtctggccaccaaccagcccttcttctgggaagcacaggccccggtgagcaccgtggagcagctggaccagcgctacctgctggtgcctgagaaggtcaaggacgcctacctggtccacctgatccagcgcttccaggatgagcacgaggactggtccattatcatcttcaccaacacgtgcaagacctgccagattctgtgcatgatgctgcgcaaattcagcttccccaccgtggctctgcactccatgatgaagcagaaagaacgctttgccgccctagccaagttcaagtccagcatctaccggatcctgatcgcaacagacgtggcctcccggggcctggacatccctacggtacaggtggtcatcaaccacaacacccccgggctccccaagatctacatccaccgagtcggccggacggcccgtgcagggcggcagggtcaggccatcacgctggtgacacagtacgacatccacctggtgcacgccatcgaggagcagatcaagaagaagctggaggagttctccgtggaagaggccgaggtgctacagatcctcacacaggtcaacgtggtgcgaagagagtgtgagatcaaactggaggcggcccactttgacgaaaagaaggagatcaacaaacggaagcagctgatcctggaggggaaggaccctgacctggaggccaagcgcaaggctgagctggccaagatcaagcagaagaaccggcgcttcaaggagaaggtggaggagacgctgaagcgacagaaggctggcagggctggccacaaggggcgtccacccaggacaccgtctgggtcccactcaggcccagtcccctcccagggcctggtctgagccccacacggccatctgcccagtccttgactcgtccatggagctgagggtcggaggaaccttccttgggggcagcagcccttcccgggggcctacccagtgccccacagcagaacccgtgggcgctcgtgttgtgcgggccctgctcctctgccccgaaaccactggctggtcccttccctgagccctggccaagattcaggctgcaggggaagaaagaacatgaccgggaggttgtgaccccaacccaaggtcaccccccaggggtgccgcatacaggaggtgcttaataaacgggtcttttgacttcctca

SEQ ID NO: 32218 - DNA, 1595 bp, Homo sapiens
  misc_feature (4)..(4): n is a, c, g, or t
  misc_feature (7)..(7): n is a, c, g, or t
ggcncgnggccggaagcgcggatcacacgggcccctacaaggggcccctacaagcggccacaaggatggcaggcttcgcggagctcgggctgtcatcgtggctcgtggaacaatgtcggcagctgggtttgaagcagcccacgcccgtgcagctcggctgcatccccgccatcctggagggtcgagactgcttgggctgtgctaagacaggcagtgggaagacagcagcgtttgtccttcccatcttgcagaagctgtctgaggatccctatggcatcttctgcctcgtcctgacacccaccagggagctggcctaccagatcgcagagcagttccgggtcctggggaagcctctagggctgaaagactgcatcatcgtcggtggcatggacatggtggcccaggcgctggagcttgcagggtctggccaccaaccagcccttcttctgggaagcacaggccccggtgagcaccgtggagcagctggaccagcgctacctgctggtgcctgagaaggtcaaggacgcctacctggtccacctgatccagcgcttccaggatgagcacgaggactggtccattatcatcttcaccaacacgtgcaagacctgccagattctgtgcatgatgctgcgcaaattcagcttccccaccgtggctctgcactccatgatgaagcagaaagaacgctttgccgccctagccaagttcaagtccagcatctaccggatcctgatcgcaacagacgtggcctcccggggcctggacatccctacggtacaggtggtcatcaaccacaacacccccgggctccccaagatctacatccaccgagtcggccggacggcccgtgcagggcggcagggtcaggccatcacgctggtgacacagtacgacatccacctggtgcacgccatcgaggagcagatcaagaagaagctggaggagttctccgtggaagaggccgaggtgctacagatcctcacacaggtcaacgtggtgcgaagagagtgtgagatcaaactggaggcggcccactttgacgaaaagaaggagatcaacaaacggaagcagctgatcctggaggggaaggaccctgacctggaggccaagcgcaaggctgagctggccaagatcaagcagaagaaccggcgcttcaaggagaaggtggaggagacgctgaagcgacagaaggctggcagggctggccacaaggggcgtccacccaggacaccgtctgggtcccactcaggcccagtcccctcccagggcctggtctgagccccacacggccatctgcccagtccttgactcgtccatggagctgagggtcggaggaaccttccttgggggcagcagcccttcccgggggcctacccagtgccccacagcagaacccgtgggcgctcgtgttgtgcgggccctgctcctctgccccgaaaccactggctggtcccttccctgagccctggccaagattcaggctgcaggggaagaaagaacatgaccgggaggttgtgaccccaacccaaggtcaccccccaggggtgccgcatacaggaggtgcttaataaacgggtcttttgacttcctca

SEQ ID NO: 32219 - DNA, 1030 bp, Homo sapiens
  misc_feature (4)..(4): n is a, c, g, or t
  misc_feature (7)..(7): n is a, c, g, or t
ggcncgnggccggaagcgcggatcacacgggcccctacaaggggcccctacaagcggccacaaggatggcaggcttcgcggagctcgggctgtcatcgtggctcgtggaacaatgtcggcagctgggtttgaagcagcccacgcccgtgcagctcggctgcatccccgccatcctggagggtcgagactgcttgggctgtgctaagacaggcagtgggaagacagcagcgtttgtccttcccatcttgcagaagctgtctgaggatccctatggcatcttctgcctcgtcctgacacccaccagggagctggcctaccagatcgcagagcagttccgggtcctggggaagcctctagggctgaaagactgcatcatcgtcggtggcatggacatggtggcccaggcgctggagctctctcggaaaccacacgtggtcatcgccacgccggggcgcctggcagatcacctgcgcagctccaacacttttagtataaagaagatccgcttcctggtgatggatgaggcagaccggctgctggaacagggctgcactgacttcaccgtggacctggaggccatcctggcggctgtgccggcccgcaggcagacactgctgttcagcgccacgctgaccgacacactccgggagctgcagggtctggccaccaaccagcccttcttctgggaagcacaggccccggtgagcaccgtggagcagctggaccagcgctacctgctggtgcctgagaaggtcaaggacgcctacctggtccacctgatccagcgcttccaggatgagcacgaggactggtccattatcatcttcaccaacacgtgcaagacctgccagattctgtgcatgatgctgcgcaaattcagcttccccaccgtggctctgcactccatgatgaagcagctcgggaggctgaggcaggagaattgcttgaacccgggaagcggaggttgcaatgagtggagatcgcacaattgcactccagcctgagcaacagtgtaagactctgtctcaaa

SEQ ID NO: 32220 - DNA, 1526 bp, Homo sapiens
agactccgtctcaaaaaaaaaaaaaaaaaaaaaaagagaaaaggattatcccctacaaaatgtcagaggttcctgctatatgaaagagcaagtaggtatgctcaagaaagacaaacagagaaaaagagaaacaggcaagatcaagaaacagatcatgagtttctgattttgctgctttccagttggttcttaactgtgggaacttagtgaaattggttattagttcttagactcctagaacctgaggattttagatttgacgggatgcccaaatttacctagtctgactagtcagttctaaccttcctttttctgacaagtgactgtcaagcctaacaatcaaatctctttcttttaaagcacaccttctaggcagggacaggagctcattttccacaccatctttgtcaactctcatagaaagttttccttgtatcgagctcaaatctgcctcctggaaattcttcttcttcttccctccctgttggtaccagctctgctgtcagagacttcacagtctgtgctccctctgccctgtgacgtcttcagactatttgagaacaggaatcatgactcctgggacttgccttttctctaggtcaaatacctctataattccatctgctgttcttcatagggtcttctccctatcctgcccttttcctccaatccatcttttaactgctcttgagcagtctaactgagaagtatgattcaaagcaaaataaatcttaaggtggcatgactctgaaaaaattgagaaaattgaactcagagatcccgatcccaacccctttctcctgggagtgaaaccttagtttctaccagagagtgtgggaaaccacttctggtggaagccccttaattaaatacctgaggaaaaaaataaaagaaactcagagacccagaataaattagctcattattctagcttgcttggccacagggacatattttgttttggctgaaataatgacatggaactggcagtgattccagaaaacctttcttctctatcatggcctgaatcctcagccacctcaaaagtcagcgggcaggaggagtctctcgccagttttcttttcatttcaaatgaggctcattgtcctagaaaagtaattaactagcaaccagtccaatgactaaataaaaggaccatccagctgtggctcacacctgtaatcccagcactttggaaagccaaggcaggaggaacacttgaggccaggagtttgagaccagcctgggcaatgtggtcaaattctatccctacaaaaaaaaaaattagccagatgtgatggtgcatgcctgtagtcccagctacttgggaggctgaggcaggaggattgcttgagcccaagaatttgaggttgcagtgagctgtaattatgccactgcattccagtctgggtgacagagtaagaataagaccctgtctctctgtctctctttctctctttttttttttaaaggagtcagctctacaaagatgttgctttctttgatgcaatgcagagagcagagct

SEQ ID NO: 32221 - DNA, 497 bp, Homo sapiens
agactccgtctcaaaaaaaaaaaaaaaaaaaaaaagagaaaaggattatcccctacaaaatgtcagaggttcctgctatatgaaagagcaagtaggtatgctcaagaaagacaaacagagaaaaagagaaacaggcaagatcaagaaacagatcatgagtttctgattttgctgctttccagttggttcttaactgtgggaacttagtgaaattggttattagttcttagactcctagaacctgaggattttagatttgacgggatgcccaaatttacctagtctgactagtcagttctaaccttcctttttctgacaagtgactgtcaagcctaacaatcaaatctctttcttttaaagcacaccttctaggcagggacaggaatcacaagctccgggtggataaggcagctgctgcagcagcggcactacaagccataatcagatgagaaggcggcggttgcaggcaagaagcctgtggtagtaagaaaggaaag

SEQ ID NO: 32222 - DNA, 1026 bp, Homo sapiens
agctcaggggtttgcaagtcagatatggccaaaggatgggcaaagctgaaggtgctgatgatgagtggccgaactgagcaaccacagacaggatagagaggaagcaaggtcaagggatgcaggaaatggagggatggagatctggatgcaggcaaagagcagatgtcatgggatgcaagggtgagaactagaaggacgagaagtggtggtcaccgagtgggatgctgggatgtgagctttcagaggtggaatagctccgaatgatggaaatgggttgctgagtgtagtggagaatgaaagtcactggagttgaggagctgtagagtgtcagatgagtcatccaaatgaaacagatattgctcaagaaagcaagaagggaatcaggcgctaaaggcttccatgattatgagggaagtggctcagggtcaggaaatgacagagaaaaggaaagggagacaaccacaggtatttaccagtgcaatattcagtttgaccatagaacccagggtggatagggtaaaggagactcacaggaggtatggctaccatggtaagttgggccagaatcagaaagatctttgaatgtcaggctaagaagcctagacttaacaggaaggcaatagggagcaactgaaggttgctaagcaactatcagaggtatactttggaaagataatagaggaaacagcactgggcttggagtcagaagacctgggttcaataataaacagcagctaccatttattgtgcacttactctgtgcaggccactgtgctaagcactctagggggattgtcttatccattcccacactggactcagttcagtcaggtcttaagctgtatgatcttaggtaagaaaaccctacccctcccctctctggactcagttgtcccatctgtcagtgggagtgagactgggctagactgtccccaaagggcccttctaactcagtcattctagggcagtgtggccctgaggcttgaagggcctcaccctcttaccggatggaattcaagagactta

SEQ ID NO: 32223 - DNA, 440 bp, Homo sapiens
gaagtttttgtttctaacttttattttaggtttatgggtacatgtgaaggtttgttacctatgtaaacatatcatgcggttttgttgtacatatcatttgatcatctaggtattaagcccagtatcaaaaaattatcttttctgctccctccatcctctcaccctccctgctcaagtagactccattgtctgtcgtttccttgtgttcctaagtcatcatttagctccaacttgttgagaacatgcagtataagttaatgcttactctctttaacatctttcacattagaaatctatggagaagaaatatgaaagactcatatataaacatggggcaaaccatgaagctaaatcttaatgtatcccaaaccccagagggagcataaggttaactttgggtggccagggtgcttagtgataacattatgagctttctacat

SEQ ID NO: 32224 - DNA, 377 bp, Homo sapiens
atttcataatgtctatacttgctttgtcaagggtaaaagtatcctaaaagtaagagtgaaacatttcatcactggttttctttggtgtatgtcgttgttattcttatatactaaaggtaaataagcttaagcaccaatcttgtatctgagtgctaatagcttgtgttctcattttattcaatgagtatctattatgtgtttattatatattcagcaatttcccagatcctgggaagtacaatataaaaagtacgcatggtctctgcccttaagaggttataatacttttgaagaggagtaaaactttgagactactataatttcgggcacaagttgaagtaggaactgactatacagccaaaattcaaagaagaaaa

SEQ ID NO: 32225 - DNA, 594 bp, Homo sapiens
actggatttggggtaaatttacaggctggagacagaagaatggatgtgtatttagctttcaaattgactattgttttatgtgaatgtctgataaagaaaacacaatggctgccagatggggcctgggagtgagatttcccatgtggagaattctagaagacatgcctggagttctggagcctggatcctctggacagacaggtggccagctaaccagggtggaggcaccaaagataactgtggggtggggagaagacaccagcccaagagatttgactgggattggtctacgcaagaatggaaaatggaggcagaatgagttagcagcaagcacacgtacactgctatagaatctgagggacccggccagtgctggccaatagaaatagaatgtgagccacagacataatttaaacttttcttgtagtcacttaaaaacatggtaaatctatgaaatagaagattgctcgtgcaaataaatgaactctgctttggtctcagtgatcaggggtcccacactcaagtgccctcaatacccagagaagtaactgaaataaatggaacagatagggtgtgagcaaagttcacacgttc

SEQ ID NO: 32226 - DNA, 437 bp, Homo sapiens
cggcgtggtggcaggagcccgtaatcccagctactcgggaggctgaagcaggagaatggctggaacccaggaggcggaggttgcagtgggccgagatcgcgccaccgcactccaagtgagccttcatctcagaaaaaaagaagaaaacagattcaaagtcactaactccatactatctcaaatatacacttgtagggcctccactctattctccacagggatgccaaagtgacctccaaatcgccttgctcctctgctaacaatattttggctctctcttctgctgtcagataaggctatacacttcccttttagcttagcaaggctggtccttcaaaatctagaccagacacacctttgcaggctcatctcgagtcattcccactgttccagtaacaccttatcactagccttaccctaacacttgacacctcagt

SEQ ID NO: 32227 - DNA, 416 bp, Homo sapiens
cacaggtacccacaaaagcagatgcagagggacaggtggggtggccacctggcctgcccccatggcctggaagttcccttttcctccacggcctacagctgcacatccccagggcagcatcctcttgcctgggctcacagagatgctgccacttacaaccagaagagcctgcccggagcagtaacctccgagggccccggatgcagaaggactggccagttctctctcgaaaagaggaagaggcctcctagaaaaatgggcatttcagtggagtcttaacactaagccgcagctatctgtgtaaagaacagcaggaaagaataggagtgtgttcagagaaaggcaggaggccaaggtggctaaagatggggcatgtggaagtggggcctccaaaaaaagcctgcaaaaggaggcta

SEQ ID NO: 32228 - DNA, 342 bp, Homo sapiens
tttaaacttcttgcttgtttgaccttatattttattagagaggccaagagtatttaaacattactttgccatgttctttctcagattgtcctgccatccacagagtaaatcaggggctcctccaggcattttaatttgttgaaaacaaagaaaattaaactttttatagatgattcagcttgcatggtggaaaccattttgtattggagacagagagtgagtgctggggagcactttcagttaagaataagtagatcagggctactagtgcttgtttatatggtgtgaatgtttcaattttaaatttcgatcatttggagtttagaatctttaagaggatga

SEQ ID NO: 32229 - DNA, 657 bp, Homo sapiens
aataaaatatacaccgagtatgcctctcttgcctccccttccatctcttttacctcttccctctctgccacccctgatacaaagaccaatctctcctcctcctcagctactcaacatgaagataacgaggatgaagacctttatgagatctacctccacttaatgaatagtaaatatattttctctcccttatgattttcctaatattttcttttctctagcttactttactgtaagaatacagtatataagatatataatagccaggaatggtggctcatgcctgtaactttttttaattgggaagaagaatggcattatcttacatttttacaaatctctttagcatctagcttaatagaagacaactggacactcatatctgcgcctgcattcaatatatgacaatacattgccttggtttgaagcgtgaaaatctaacttcacacagatatggacagatgctcctagacttataatgggtggggtttacatcctgataaaccacttgtaagttgaaaatattgtaggttgaaaatgcatttaatacatctaatctgctaacatcatagattagtgtagcctaccttaaacatgttcagaacacttacatcagcctacagttgtgcaaaatcatctaacacaaagcctatttta

SEQ ID NO: 32230 - DNA, 592 bp, Homo sapiens
ggcgacagaacgccgccagattgttcaaatctgaacattctaaacggggaaatcggggcgcggaagagtggggtgggaaacgaacaccgggttgcggaccagaactcagggtcaggtacgccaaggagaggaagtgaggcgaggccagccccacgccaccagccaggggccgctttcctctaccagagaggggtagccagccgcagcccaaaggccacccagggtgccagatggacagcgaggcctgctgattggttctcgccgggtgccaatgagcccgggcgccttcaggtgctatggcaacgaggcgtacgtgcggaaacacatgatggccagggtggaaggggagtaacggggtttaggttggtacggtactgggttatgctctgtgccgcactgcgagcccttggcgggcacagccgccagggtgggagaagcgtaccagaagcagctccagaatggcagccccagctggctgggcagcctgcgccgcctgggttaacagggcgagggaatgggcgtctcggtgccgcctttgctagagctctgcccaaacccggtttccatccgtgtatctctggggtgacaacca

SEQ ID NO: 32231 - DNA, 574 bp, Homo sapiens
ggcgacagaacgccgccagattgttcaaatctgaacattctaaacggggaaatcggggcgcggaagagtggggtgggaaacgaacaccgggttgcggaccagaactcagggtcaggtacgccaaggagaggaagtgaggcgaggccagccccacgccaccagccaggggccgctttcctctaccagagaggggtagccagccgcagcccaaaggccacccagggtgccagatggacagcgaggcctgctgattggttctcgccgggtgccaatgagcccgggcgccttcaggtgctatggcaacgaggcgtacgtgcggaaacacatgatggccagggtggaaggaacaggatctcatcatgttgtccagactgcttgaactcctggcttcaagcgaccctcctccctcggcctctcaaagttctgggataacaggcatgacccaccgtacatgcatgggcatgatctgattttttttttaattaaagttgtcacagttatcaaagtctcattactgtttaacacacattttaccactcctttcctaaataaaccctctaacccagcaacacga

SEQ ID NO: 32232 - DNA, 358 bp, Homo sapiens
taaagatggggtttcaccatgttagccaggatggtcttgatctcctgacctcatgatctgcccgcctcaacctcccaaagtgctgggtacattttaatatctggtagtgtcagaactccagataacttcccctgccctgctcttcttttacacaagtttccaaaatattcttgtgtgttcatttttcaacaccaaccttacagccagtttatttagttaaaaaaaaaaaatcagttagcatttaaatttagttttagactgacaagagagaaatgacatctttataaaaataattcttcttagtaaaggtcatagtttgtctctctgaagagttttaaagttttcttctcattggccc

SEQ ID NO: 32233 - DNA, 270 bp, Homo sapiens
aaattaatgctggaaggttgtgtctaaattgcaaaaaggaggggtataatgaaatgcacctggccgggcgcagtggctcatggctataatcccagcactttgggaggctgaggtgggcagatcaggaggtcaagagattgagaccatcctgggcaacatggtgaaactaaaaaaaaaaaaaacaaacttaggtgggcatggtggtgcgcacctgtagtctcagctacttgggaggctgaggcaggaaaattgcttgaacccgggaggcgg

SEQ ID NO: 32234 - DNA, 483 bp, Homo sapiens
ccaagggtcagtcagagctagtaagcggtttattcgggggtacgttggcatcgggtgccaggcttggagagctcccgactattgcattttccccacttccaaaggtccagcttcgggttcttgtaccaacactctgcatcttctgttgccttcatgcagcacttgtcacatttgctgcctttacccactgggaatgtcaaaggctttggagttcagactgggattcaaattctggctctgccaggttaggatggaaggatatgattcggggcaaattacccattttctccaagccccagttttttggatctgtgaaatgaggacagtgttgcgtagatttgcaatcagtgttattgtgggttgatgtgtgtcctccccaaacttgtatgttgaagccccaacccctagtacttcagtctctgactttacttggagataggatccttaaaaaggtaatcaagttaaagcgaggccatcagggtg

SEQ ID NO: 32235 - DNA, 551 bp, Homo sapiens
aaccgtggcataccacaagttcaaaaatggcttgtgttgaggcaattatctcatcacaataaataacagtaaatcaatccacactaattgccttttgtgcaagcttagaagactctttagcgttctctgattattgatttgttatcgcttgtgtcaaaaatgcagtatttccagagaatatattgcacactcttagacaggattttaatttaacataaaacaatccaatttccttttttttccagaggtgctttaaacatctaaaatagaatgaagctgaagatggcactaagaggtttttagcagagactttgcatttcaaaccaatttaacaaatggcccctgttaccaccaccacatggccctgccatgcatcccgctcccaaccccacccgccacgttcaaaattaacaagaaaaccatgtgtaatctcagattcctcattttcttgcaaatttggaactgaaaagcaagacaaacaccaccaacagaaactctatgctttacttctttccctctgccccttggttcagtagtttccactgaacctg

SEQ ID NO: 32236 - DNA, 499 bp, Homo sapiens
cgaatttttttccttcacaatttcatgtatagatttgatctttgtaacctccgcatacaattttttttcattccttattaagtcaagaactttcaccttcaagcaatttacagcttctctttggcatatccaaatagctgtcattgctacttttggacttagggactgtcattaagtaaaataagggttacttaaaactcaagcattgccctgccccatagtcagtctgacaatctgataactgagatggctactaagtgacaaatggctggtagtttatacaggtgaatacattagacggaggggagattcactacccggtcaggtgagatttcatcaggctactcagaatggcgcacagtttaaaacattgttgtggtcacgcctgtaatcctggcactttgggagattgaggcaggaggattgcttgaggccaggcattcaagaccagcctgggcaatgtagtgggaccccccatccccccaccatctctagaaaa

SEQ ID NO: 32237 - DNA, 433 bp, Homo sapiens
gctagagtgcaatggtgtgatctcagctcattgcaacctctgccttgtgagttcaagtgattctcctgcctcggcctacccagtagttgggattacaggcgcctgcctccatgcccagctaatttttgggtttgttttttttttcttctgagacagagcaaggctgtttcaaaaaaaaaaaaagaattaaattaaaaaataaaaaagcagtaaatccaaaagaatacctgcaacttttaggctggcaaaggtctgttggtttctaaaaagcaagagttattttcaaaaaatggacaaattagactttgtcagattttaaaacttgcactcatcaaatgataccgttacaagaacatgagccaggaagcctcagactgggagaaaatacttgtaatacaaagaacttgtatgtagaatatacaaaggactctta

SEQ ID NO: 32238 - DNA, 608 bp, Homo sapiens
gtatgtctgaaatatctctcatgtctttaaatatctttctaacttaacattcagtaatcatttactattttactttgatattctgtgtgtaattatgctgtcagcttttctggactcaaaagtgctctcagatgtcacctctggtatacaaaaaaaacagttctgtatattacctgagcagtttcttgtccacctgccatgttgtgagtaacatcacccaatctagaggccagaagaggcccaagtttggataatacagcccctgttcaccctggaagcttgtctggaggggccagggtaggctcagaatgagactgaatactctgagcacccactgtctgatcctagatcacaatccccccatccagagttagctaatctatgaggctcatgggtatggtctgcatagaagaccaccctcacttctgacaccactgcaagcttggtggggattcctcaaaccgccctcaggttcaacagttcactagagccaggcatggtgactcatgcctataatcccagcaccttgggaagctaaggtgggaagctcacttgaggccaggagttcaagaccagcctgggaaatatagtgagacgcaatctctaca

SEQ ID NO: 32239 - DNA, 475 bp, Homo sapiens
aatctactttcttcccctatggattttcccaggagcactttttaagttgagtctggtatttaacttcttcctgctttattttcccatctcaaagtaaatataacaagtttcagtctaccccacagctttgggagggaggaagctttgttaaagtcagaatactttgaacttcgtggtggctcatgcctgtaatcccagcactttaggaggccaaggtgggtggatcactggaggtcaggagtttgagaccagcctggccaacatggcgaaaccccatctctaccaaaacacaaaaagcaaaacaacaacaacaacaacaaaacaaagatttgctgggcatggtggcctgtagtcccagtatttgggaggttgaggtgggagaatcacttgaacccagaaggtggaggttgcagtgagctgagattgtgccacactgcactccagcctgggtgacaaagtgagaccctgtctcaaa

SEQ ID NO: 32240 - DNA, 1844 bp, Homo sapiens
cattgtgacattgagcccaacacacacgcttgacaccagactagacttgtcacagggccaaacccaacagccacatgccatagcttcactgcattttcagctacacctttggaggccaccttctcctatcaactgtggaaagccagaagggctcccttctccattctccttccctttttcaagtctaatagtgaaatctcctgcttaccccagcagtaaatagttgccttcctaccccttacctgggggccgataatttgagatactttgttttttcaatgcgtcagttgaaggatttagtttcttaaaagcaagaaatgttggagtgttgaatttttaaatagaatctcttttcatgtttgaatgattgttattagttctagaagcattctctttgtcatgacccgattatgtatactcttgggtttaggaaggacaaaagtgatgaaatttgcatgagatagaataaatatcttaggaggagtgaaagaacctgaggaagagacacgaccctaagggaatgaatgcataagcagtcttctcagtagcccagagtttccaggaaacaggaatatttatatcccttgcccactcttaaaatacatagatacataaaaaggcagtctctgtagacaacacatgcacacacccacacaaaacataattcctggggcttcctttttctgaatgttaatccattttatcgagcagtgattcccaaactttgagattttcagattttatgctctcgtctgttagattttatgacattctatcatcctaaaaaatgtactatatgtgttatatgtatatataagttaaagcaacttgaaattgacttggtttggcattgtctcaagaaccctagatatcattattgataccatggggaatcatagaaataaagttgaatatcattgatctgagagtaggatccagaaataagtagtttcagttcctgatcagttaagcctcaagtgtttgagtaaccaacacagcaagacttgggaaatgcagtgagcacccgaggaaaggaaagtggtagtctttgcctgcatttcagcatgcattttcctttcctactcagttgctatcttccacttaaataccctcatttgaccctaggaagttttttgtttttttttttagtttgagacttaaaaccagatttatttgttgttgtagagagatttccacagaagttgtgttttagggacctccatcatctttgtgggggtacagatatttatgtgtaaatatcattttatgtgatttccaaattttcgagggaaacatttcaattcccagttcaacaaaaggttaaatactaattgactcaatgaccaccttcaggaaagttaaatagtaaattaggttaaattttgactggtgcttagacatttcctagttatattaacttaagcagacagcagcacattaacctgagttacacctgtgaggaaatgaccttctaaatttgattttgtttttcatctccagggccttaataagagtgtgttaacacacgactattttacaatgatagctctaaataatttattttttatttcaagaaagagaaatacaccttagaaaaacaaaacccaagattttattttatttttaaagccatatttttgtgctagtagcatttagattattccgtatgtgagatccgtatcagcatttcattacctgggtttgttctaaagaagatttatttttgttctgtgaataatttttgacagttcttgtacatgtacagatatagatacgtttgaggtcttttattgatattcctacaaagaatacaaataaactttaactttaaacaaaaaaaaaaa

SEQ ID NO: 32241 - DNA, 1790 bp, Homo sapiens
cattgtgacattgagcccaacacacacgcttgacaccagactagacttgtcacagggccaaacccaacagccacatgccatagcttcactgcattttcagctacacctttggaggccaccttctcctatcaactgtggaaagccagaagggctcccttctccattctccttccctttttcaagtctaatagtgaaatctcctgcttaccccagcagtaaatagttgccttcctaccccttacctgggggccgataatttgagatactttgttttttcaatgcgtcagttgaaggatttagtttcttaaaagcaagaaatgttggagtgttgaatttttaaatagaatctcttttcatgtttgaatgattgttattagttctagaagcattctctttgtcatgacccgattatgtatactcttgggtttaggaaggacaaaagtgatgaaatttgcatgagatagaataaatatcttaggaggagtgaaagaacctgaggaagagacacgaccctaagggaatgaatgcataagcagtcttctcagtagcccagagtttccaggaaacaggaatatttatatcccttgcccactcttaaaatacatagatacataaaaaggcagtctctgtagacaacacatgcacacacccacacaaaacataattcctggggcttcctttttctgaatgttaatccattttatcgagcagtgattcccaaactttgagattttcagattttatgctctcgtctgttagattttatgacattctatcatcctaaattggtttggcattgtctcaagaaccctagatatcattattgataccatggggaatcatagaaataaagttgaatatcattgatctgagagtaggatccagaaataagtagtttcagttcctgatcagttaagcctcaagtgtttgagtaaccaacacagcaagacttgggaaatgcagtgagcacccgaggaaaggaaagtggtagtctttgcctgcatttcagcatgcattttcctttcctactcagttgctatcttccacttaaataccctcatttgaccctaggaagttttttgtttttttttttagtttgagacttaaaaccagatttatttgttgttgtagagagatttccacagaagttgtgttttagggacctccatcatctttgtgggggtacagatatttatgtgtaaatatcattttatgtgatttccaaattttcgagggaaacatttcaattcccagttcaacaaaaggttaaatactaattgactcaatgaccaccttcaggaaagttaaatagtaaattaggttaaattttgactggtgcttagacatttcctagttatattaacttaagcagacagcagcacattaacctgagttacacctgtgaggaaatgaccttctaaatttgattttgtttttcatctccagggccttaataagagtgtgttaacacacgactattttacaatgatagctctaaataatttattttttatttcaagaaagagaaatacaccttagaaaaacaaaacccaagattttattttatttttaaagccatatttttgtgctagtagcatttagattattccgtatgtgagatccgtatcagcatttcattacctgggtttgttctaaagaagatttatttttgttctgtgaataatttttgacagttcttgtacatgtacagatatagatacgtttgaggtcttttattgatattcctacaaagaatacaaataaactttaactttaaacaaaaaaaaaaa

SEQ ID NO: 32242 - DNA, 1790 bp, Homo sapiens
cattgtgacattgagcccaacacacacgcttgacaccagactagacttgtcacagggccaaacccaacagccacatgccatagcttcactgcattttcagctacacctttggaggccaccttctcctatcaactgtggaaagccagaagggctcccttctccattctccttccctttttcaagtctaatagtgaaatctcctgcttaccccagcagtaaatagttgccttcctaccccttacctgggggccgataatttgagatactttgttttttcaatgcgtcagttgaaggatttagtttcttaaaagcaagaaatgttggagtgttgaatttttaaatagaatctcttttcatgtttgaatgattgttattagttctagaagcattctctttgtcatgacccgattatgtatactcttgggtttaggaaggacaaaagtgatgaaatttgcatgagatagaataaatatcttaggaggagtgaaagaacctgaggaagagacacgaccctaagggaatgaatgcataagcagtcttctcagtagcccagagtttccaggaaacaggaatatttatatcccttgcccactcttaaaatacatagatacataaaaaggcagtctctgtagacaacacatgcacacacccacacaaaacataattcctggggcttcctttttctgaatgttaatccattttatcgagcagtgattcccaaactttgagattttcagattttatgctctcgtctgttagattttatgacattctatcatcctaaaaaatgtactatatgtgttatatgtatatataagttaaagcaacttgaaattgacttggtttggcattgtctcaagaaccctagatatcattattgataccatggggaatcatagaaataaagttgaatatcattgatctgagagtaggatccaacacagcaagacttgggaaatgcagtgagcacccgaggaaaggaaagtggtagtctttgcctgcatttcagcatgcattttcctttcctactcagttgctatcttccacttaaataccctcatttgaccctaggaagttttttgtttttttttttagtttgagacttaaaaccagatttatttgttgttgtagagagatttccacagaagttgtgttttagggacctccatcatctttgtgggggtacagatatttatgtgtaaatatcattttatgtgatttccaaattttcgagggaaacatttcaattcccagttcaacaaaaggttaaatactaattgactcaatgaccaccttcaggaaagttaaatagtaaattaggttaaattttgactggtgcttagacatttcctagttatattaacttaagcagacagcagcacattaacctgagttacacctgtgaggaaatgaccttctaaatttgattttgtttttcatctccagggccttaataagagtgtgttaacacacgactattttacaatgatagctctaaataatttattttttatttcaagaaagagaaatacaccttagaaaaacaaaacccaagattttattttatttttaaagccatatttttgtgctagtagcatttagattattccgtatgtgagatccgtatcagcatttcattacctgggtttgttctaaagaagatttatttttgttctgtgaataatttttgacagttcttgtacatgtacagatatagatacgtttgaggtcttttattgatattcctacaaagaatacaaataaactttaactttaaacaaaaaaaaaaa

SEQ ID NO: 32243 - DNA, 1790 bp, Homo sapiens
cattgtgacattgagcccaacacacacgcttgacaccagactagacttgtcacagggccaaacccaacagccacatgccatagcttcactgcattttcagctacacctttggaggccaccttctcctatcaactgtggaaagccagaagggctcccttctccattctccttccctttttcaagtctaatagtgaaatctcctgcttaccccagcagtaaatagttgccttcctaccccttacctgggggccgataatttgagatactttgttttttcaatgcgtcagttgaaggatttagtttcttaaaagcaagaaatgttggagtgttgaatttttaaatagaatctcttttcatgtttgaatgattgttattagttctagaagcattctctttgtcatgacccgattatgtatactcttgggtttaggaaggacaaaagtgatgaaatttgcatgagatagaataaatatcttaggaggagtgaaagaacctgaggaagagacacgaccctaagggaatgaatgcataagcagtcttctcagtagcccagagtttccaggaaacaggaatatttatatcccttgcccactcttaaaatacatagatacataaaaaggcagtctctgtagacaacacatgcacacacccacacaaaacataattcctggggcttcctttttctgaatgttaatccattttatcgagcagtgattcccaaactttgagattttcagattttatgctctcgtctgttagattttatgacattctatcatcctaaaaaatgtactatatgtgttatatgtatatataagttaaagcaacttgaaattgacttggtttggcattgtctcaagaaccctagatatcattattgataccatggggaatcatagaaataaagttgaatatcattgatctgagagtaggatccagaaataagtagtttcagttcctgatcagttaagcctcaagtgtttgagtaaccaacacagcaagacttgggaaatgcagtgagcacccgaggaaaggaaagtggtagtctttgcctgcatttcagcatgcattttcctttcctactcagttgctatcttccacttaaataccctcatttgaccctaggaagttttttgtttttttttttagtttgagacttggacctccatcatctttgtgggggtacagatatttatgtgtaaatatcattttatgtgatttccaaattttcgagggaaacatttcaattcccagttcaacaaaaggttaaatactaattgactcaatgaccaccttcaggaaagttaaatagtaaattaggttaaattttgactggtgcttagacatttcctagttatattaacttaagcagacagcagcacattaacctgagttacacctgtgaggaaatgaccttctaaatttgattttgtttttcatctccagggccttaataagagtgtgttaacacacgactattttacaatgatagctctaaataatttattttttatttcaagaaagagaaatacaccttagaaaaacaaaacccaagattttattttatttttaaagccatatttttgtgctagtagcatttagattattccgtatgtgagatccgtatcagcatttcattacctgggtttgttctaaagaagatttatttttgttctgtgaataatttttgacagttcttgtacatgtacagatatagatacgtttgaggtcttttattgatattcctacaaagaatacaaataaactttaactttaaacaaaaaaaaaaa

SEQ ID NO: 32244 - DNA, 558 bp, Homo sapiens
ataagaggaggacaggtgtttgaaaaaaaaaggctacttgctgtttttcctcaacagccctttggcttgctaattttgtatattgttaccttttttccccgtctataacttttctttatccttcttcactgatagatgttcattcatgaaactgatagttcttaaatgtattggtgtaaataactttacttctggctcacatttgaagaagtatcattccttcactggaaggaattagtaacagtttggctttgttagcttgtgcttaaggtaaggttttagatgttcctatggtttgacagcttctgaaatataataatacctaagtggatcacctgaggtcaggagttcgagactagcctggccaacacggtgaaacaccgtctctactaaaaatacagaaattagctgggtgtggaggtgtatgcctgtagtcccagctacttaggaggctgaggcaggagaactgcttgaacccaggaggaggaggtcgcagtgagccaagatcacgccactgtactacagcctgggtgacagagtgggactccatctcaaaaa

SEQ ID NO: 32245 - DNA, 444 bp, Homo sapiens
ttaaatcctcacttcatccctgatgtgtcttgactcaactgggctacatcaacactcccttttaagactggaactacatcctccagagtacctttccttaaatagttctgggttagacatggccaataagagaaatgcatatgagattttgaaagtggatgtgaaatagacatctttattctgcaggtataggcagacacatgtgcagctggaggattcacagtggccttccagcaagctttttatactcaggcaacagtgatttgagactctctggtaggtgagttaataaaccagagaaaagcaaaacctccacagactctccttgaagtggaagtcaaggagatgactttcacttggagatgagaagattgagacagctcaggaatggcagccttgcaggagtgatagccagccagccagccagccagccagccagccatg

SEQ ID NO: 32246 - DNA, 320 bp, Homo sapiens
tacaggtgcatgccaccacacccagctaatttttttgtattttttggtagagatggggttttaccatgttggccaggtttcaggggtacatttaaccaaggaagttaaagatctgcatgtatactgacaactataaaatattgattaaggaaattaaagattatgcaaataaatggacagatatctcatgtttatggattggaaggattaatattgttaagatgtttataatccctaaagcaatctacagattcaatgcaatctccatcaaaattccaatgtcattcctcacagaaatagaaaaaaacaatcctaaaatg

SEQ ID NO: 32247 - DNA, 161 bp, Homo sapiens
ccaggctgtacagaaaataaataaattagccaagtgtggtggtacacacctatgttcccagccacttgggagattgaggtaggggaggatagcttgaacctgggaggtcaagcctgcaataagcagtgattgtgccactgcactccagcctgaatgacaga

SEQ ID NO: 32248 - DNA, 649 bp, Homo sapiens
acaggagacagaattggacaacaaggattttaagagtcattgcccattgtaaagcattaagccagagctggttattcattatcagactaactacatactagtccatgctagtgtcagcctatattaaaatagtctttccttgccatagtgctggcgaaaacccaatcccttctgatgaaacattgcttcttgggaagacaagctgaggaaagcaatgaagatcccagtgtcggcctttattgagctatgtatgagggtcagggtccctcaactcctagtgactatgaagcagcagtgtgatggcttcgccctctttgcccctctgtcatcaatcctttgcatgtggctattttaagcttctcagctttcttttgggaggcttcatgtgtaacttattatagaaatgttactgaaaagctgcctaaacaaaaaattgtataaagtaggaatttgtataaagtaatactgttgtaaatccatcttcaagatgtaaagaatcaatttgtaaagtgtatattttcacttctcccttcaaatttatgtgaacaagtttttcatgtttcaatattgcttacataggaatacaccttacgtttttatcagtataaatggaacatttaaaaccagtcaacaacagaacagataatcc

SEQ ID NO: 32249 - DNA, 428 bp, Homo sapiens
tatgtttccaaatataccccataaaaatatcttaatgaatatcagtagtttctaactatttatattttgaggcttttttggagtctaattcagatttatttagaaacaagggtatcagcagttggtaagcaactgaatatttctttttttttcagactttatgtcataagccatctttagtctttgtctcttactgaacattaatgggacaactctctttgttgtatttttttatggttgtatacaggccacttaacgaagccttttcttgctgtcacttctctaagggtatgacttgagactcgctctgtaactgtgagtcagctggtttgaacttccacaaaaggaagcagagaaacaagtagagccaggctgctgaactcttacaacccagacatgccaagcctggacatcttgcacttggagct

SEQ ID NO: 32250 - DNA, 724 bp, Homo sapiens
ttttttttttttaacaatggatattctgtaaaatatcctgtacaaaacaagactattgccagtaatgtatacaaattgtctttttgtgtacttccagcataggtttggatatatgaacatttttcttttattgttttatcttcacagaaaataaaaggtgttaatttgctttttaaaacaaatttaattatcacattttaaattactttgtggactgtgttttcaaaactttgcaaattcatctgttacacagaaaattttgacttaaaacatctgctgaattccaaatttctgtaatagctactgtatctgtgataaactttcctatatctttccttgccatttctatggattttataatgaaagaaaaaggcattggagactgaaggcagaaatggttgtgacagtgctgtttggctttttcattcttcaaatgccaagtcatccactttgttttcctgtttaggctttgcacaaatacaattgctttcaggaatcctaaagcagcattttattgagtttgaattattaaaggtacagaggaaatgtggtgatgtagaacttttcctaacacaggtatctaggaagtaagtgctgagttgattttctaggttcttacgtatttgaaaaataaaattgcaattcgagataagtgcttgagcactctacttaagtattctctgtgttttatgaagagaaaatgatctgattttcccttatactt

SEQ ID NO: 32251 - DNA, 756 bp, Homo sapiens
ctgcgctggcctagcagggtgttggtgtcttgagcccgaatcctgtgcagcattggcccaacccttgcaggtggccgccacccctttcccctgcagctggcatagccaaggtgccaggctctgcaaagggtaagctgcatctgaattgggcacgaggggatggttgtgccttccacatctccttttgtgaaagatcttcccagatgcaaacccaggatggacttgccaaagagaaatcccagtaactggctctaatctctgtgccaccagctgccattgtctcgaagttcatttgcaaacaacagaaaccaactgtggctgggttaagtgggaagtttattaaacaatattggataggtcacatggtcaccaggctaagcggctccctagccaggaccaagatcccatgtcattctccagtactcccaggttcataccccaggacttacaccacagacacccccaatgctgggcactgtcactgggaccactgcctctgctcttttggaaactaaatgtagaggcttctacttgtcaccaaaagggattttaaacagccactagctgccacttcaaggtctcaggcaagcatactgcctcggctgagggagaggttagaaaaaacagcatccagccaggcgtagtggcttgtgcctgtaatcctggcgctttgggaggcctaggcaggaggtctcgagcccaggagctagagaccagcctaggcaacaatgtgaaaccctccctacaaaaaataaa

SEQ ID NO: 32252 - DNA, 939 bp, Homo sapiens
atgatgattaaaaaaaatgcaagttcggaagacttctttattctacttggattttctaattggcctcagctggaagtagttctctttgtggttatcttgatcttctacctgatgacactgacaggaaacctgttcatcatcatcctgtcatacgtggactcccatctccacacaccaatgtacttcttcctttcaaacctctcatttctggatctctgccacaccaccagctctatccctcagttgctggtgaatctccggggcccggaaaagaccatctcgtatgctggttgcatggttcaactttactttgttcttgcactgggaatcgcagagtgtgtcctactggtggtgatgtcgtatgatcgttatgtagctgtgtgtagacctttgcattacactgtcctcatgcaccctcgtttctgccacttgttggctgcggcttcttgggtaattggttttactatctcagcacttcattcctcctttactttctgggtacccctttgtggacatcgcctagtggatcacttcttctgtgaagttccagcacttctgcgtttatcatgtgttgacacccatgcaaatgagctgaccctcatggtcatgagctccatttttgttctcatacctctcattctgattctcactgcctatggtgccattgcccgggctgtactgagcatgcaatcaaccactgggcttcagaaagtgtttaggacatgtggagcccatcttatggttgtatctctctttttcattccagtcatgtgcatgtatctccagccaccatcagaaaattctcctgatcagggcaagttcattgccctcttttatactgttgtcacaccgagtcttaatcctctaatctacactctcagaaacaagcatgtaaaaggggcagcgaagagactattggggtgggagtgggggaagtga

SEQ ID NO: 32253 - DNA, 480 bp, Homo sapiens
atcctcacacagctggccacagccgatgcccgattctggaagggccccagtgagccccatctggccaagcttgaggaagatgtgtggccttgcccccaattccatcagaccaaggctgcaagtggccctccattcgtgtgtgtatttaggggctggggagggggaggggcaggagcttggaccttggtactacctcagctgagggtggtgacacaaccccttccatttgtcagcactttccagcctgccaattgcttcccctctgtgatctcatttcatctgcactgccatacgtggagtgagcaagacagggcttaccatcctgtctaccagatgaggaaatggcagttctgagaagtcactggtctagatcccgcaggtggcacgtgacagctagggttcaaaacgttctcaccaaatccaatgctcctcacatattaattttataaccagacaaataaatattagagacaaccacca

SEQ ID NO: 32254 - DNA, 342 bp, Homo sapiens
gattgtaacagaggactccataaatgatacttggcaatgccacagactcattatcatgatagggaacctgtgatatttttgggtacctgccaaatgcatttttatttacctaaggtgatttcatagacagatggccattttgaatgtttcatgtgactcactagaggaattagagctatacagagttaagaatgcttggcgtagagggaaccgtagaaccctgggactagcttagcctcttaaagttaactaaatattgtccctgccacccccatatgttatgactgtataatttttataacttacatttcctttcatttctttattcattttctaatttct

SEQ ID NO: 32255 - DNA, 577 bp, Homo sapiens
catcagctttgcaggcattatttaattgttgcacccattctccaaggtccatgttgttccagcatttgcaagtaaggaaactaggaaactgaggtttaagaagttaagttgctgaagatcacacagctggtagtaggcaatatagctagatttgaacctacctgtattgtaattcaacactagtgctcttaagcactaccatgtcccatctctacaatgctagttttgaaaaagatactatctatggtccctttcaatcttgacctacctattaacacagtggaagatttttattaagtaactcaacctaggcaatacattaaggagaaaataagtcacaataggaaagacatgtatttgtgtcttagatgaaacaatattttttattaaattgactgttttaaagtgtgtgttggggggtgcttgtgtgcatttgtattagctattctgtgtatcctattcttagtctgtggtacatggatttcttggtagagagcagatatgaaccccaattttgtatcaggtgatagtctacaggttttatcagattctctgataggtttgagggaaaaaaaaa

SEQ ID NO: 32256 - DNA, 520 bp, Homo sapiens
tggcaatagaacatagaagtgctcttggctttccaaaatctgcacatctccaacttttcttttagctagaggtggccctgtgattgatgagtgaccagccatgtgtggagaaaagcaatgtgaacaacttctgacttcgctgttaaagaaaattggtctgtcccccatttccttgcattcccattcttactggctgaaattcaaagctgataaatggagctagagcagatagctgggaaaatgagttgagggtcttacattaagacttgccagcaagaagaagaatttttccagggttcctgacaccaccaaattgttcgatcagctctgaactctatactgagattctttaagtatgagagacatgaactttgactggcttaagtgagctattgaggtctctttgctattgtgacctaactcaggggtcagcaaataacactctgtgcgcaaaatctgacctacgatctgtttttgtaactaaataaaatttcactgaaacacaaaaaatgctcattta

SEQ ID NO: 32257 - DNA, 962 bp, Homo sapiens
aacttctgctgtgctctgggaaggcattctcactctgtttatgttgtctaagtgcagacatggatgtgcaggtttgctagaacctcctgaggatgtgcaatggttctgttcatgcctgaatcagttcttttgggagtggacattctttctctccctcatgcacagcctcaggcacatggcttgagctatggcggcacgcagtatggccatcacccaggtacaccccttccctaagaagaggctcttcaggttacactcgggtactgttgttatctggcttattgtccataggatcaacatagagtcctgaggtcagttcaaaccatcaaaccagggatgttacttattatttgaaaacttctttggaaagataatcttgggttgttcagtgggaccagtctttgacgggcaaatctccagaatacatggggtcagttctctcaggttcaggaagcatgtaatctctctaagattcattaattaaaaaaaaaagacacatgcatagaaaaatagaacaaaatggaaactctttattggatacctactatgggttatgtgccagggtttcctaatcatttggggacatgtgtgtataaacaaaaccaggctatgtggccaggcagtgtgtggctcacacctgtaatcccagtgcttagggaagccaagttgcaaggatcgcttgaaaccaggagttcgagactagcctgggcaacatagtgagacccggtctctgcaaaaaaaaaaaaaaaagaaaaagaagaagaagaaagagaaaggaaggaaggaaggaaggaaagaaagaaagaaagagaaagaaagaaagaaagaaaagaaagagagagaaagaaaaagaaaggaaagaaagaaaagaaagaaagaaagaaagaaaggaagaaacaaagaaaagaaagaaagaaagaaagaaaagctaggaagctagggtgtggggcgcatgcctgtag

SEQ ID NO: 32258 - DNA, 341 bp, Homo sapiens
gcctcttccatgccttaagtccatgagaacaagtcactttctctttcctggggactgtcatcccttcatctgaaagctgagagtttgcttcaggatcctctagtgtgtgaaattgcactgaagccactgaacactgggtaattgtacaatatttctgtgtcttaacagtgatgtggcatttggttcaattctaagccatcaggccacttgttgacatgacctagagaagatggaagtgaaacaccgagtcattaaacagggaccccaaaatgccgaattgacgtgatctggctgggtccactgtgatgcggggaatcacccgtcagccccttgctggatcg

SEQ ID NO: 32259 - DNA, 2340 bp, Homo sapiens
tgagatgggttcgctctgttgcccaggctggtgtgcagtggtgcgatctcagctcactgcaacctccacctcccgggttgaagcgattgtcttgcctcagccttccaagtagctggaattacaggtgcccgccgccacacctggctaatttttgtatttttagtagagacggggcttcaccatgttggccaggctagtctcgaactcttgacctcaagtgatccacctgccttggcctccctaagtgctgggattacaggcatgagccaccacacctgtccgacagtgtagcaactttctaaaactgaaaaatctcaaaggagatcattggaactgacttgttcatttattttttgtttttaaattaagaaagattacacaaaataagtgttactgtactttaagctattacaaatatccaacttttaaagatatgtaagaatcagtaatattctagaaagcacatatatagtaaaagggcatcctttaaatgtagaacgggtaaacatgaaacagttccatgcttgaattgttaagtatctagggggtaaacattgaatgggagaatcatttattgggttaaggtcccttccttgtcattctgggatctgtgaatcacattgtaattcctgttgacaaagctttacttgttaacatcagttgatactgacattctccataaagatatagaatgaaaatatctattaaaaatagtttatcattgttttagcttttttgttttgtttgttttgagacagagtctcactgtcacccaggcttgagtgcagcggtgtgatcttggctcaatgcaacctccacctcccaggttcaatagattctcccaccttggcctcccaagtagctgggattactggcatgcaccactatgcctggccagttttttgtatttttagtagagatggggtttcaccatgttggccaggctggactcgaactcctgacctcaagtgatccgcccacctcagcctcccaaagtgccgggattataggcatgagccactgcgcctagcctgttgcagctttttaaagcaggaaaatatccatataaactgttgggttagaatctatattagaatctttcaaactaattgaaaacaggaagactatcatctaagtagccagataatctgggtttcaaaaagttattccatggtactggtttaaaaaatacttttcaagtgttttaatttttaaagtgtaactaattcttcaaatatgttatgctgttaaaatatgtattccataagtactttttgtatatgtattcttaaattttaaaaagtcaactgaatgcgcaaagatgatataattttggatgtagacatttaaactagattcccagtcctctccttcaaaagcttggtctttgtttttcctatagggaaaaaagtcaaaataagttccaaaaactatcctcaaagtagtattgtgcttgtagtaaatgaaggttggatggatggatactgacaatggtggcaggcatttcaagccttttaaattagtactttttgtcgtcttgcttattaaaattttgttaattttagcaaagaccaattgttgtgataaactggtgttttttggatgcttcaagcacacgttaaccaattttttaattccccttttggttcctcccattgttctaaaataggactttcatattattaaaacctcaaaagatgatccacccaggatgaacaaagatcaccaaggggaaagaaaacattttttatctttacagaaaacatgttaagattatatatagatgtattctttacattggatattgtattagagtcctccttacaagaaatgaaatagtttttagcactcttagcattagagttcctagattggtgttgatagctacagttttaaaatgtataacctgaaaatgaaggttaattttgcattgtaagagcacatttgatctatgtaaaaagtgtccatttggtgtatttttttaaaaaagagaaagcactttcatattaagtagcatgtgtatgaatttagattttcatatttgttgtgtctgtattcagtgaagtaaattgagcatttaaatgtttgttgatggcaacattaactattaaattaaagcaccttatactctgctgcttaacttgcttgtaattgcacctttgttacctgcacattttcatatagaatattgttgtaacattgcttcatgtgggtctggatggaagattagtgggcctacaggatcatttatttatattgtttatattacaataatatattgtagatcagttgtaagttcatttctttacaaataaaagcctcttccatttgaaaaaaaaa

SEQ ID NO: 32260 - DNA, 426 bp, Homo sapiens
atttttttaaaaatataaaaactaatttaaaaaatcaattatatgactgatgaaaattttattgctattattatattttgcatttgattctaagaaaactgtgcttctctcttttttttttttttgagacggagtctcgctctgttgcccaggctggagtgcaatagctcgatctcggctcattgcaacctccacctcccaggttcaaacgattctcctgcctcagcctctcaagtagctgggattacaggctcccgccaccacgccaggctaatttttgtatttttttagtacagacagggtttcaccatgttggccaggctggtcttgaactccctgacctcaggtgatccgcctgccttggccttccaaagtgctgggattacaggcgtgacccaccgcacccggcctgccaactgtgcctct

SEQ ID NO: 32261 - DNA, 515 bp, Homo sapiens
agatctctgaaggcctgagggtaatgggcacaaaagagcatccgcttcaagtctgtgggagaagcagtcagatcctcccccaccagccctcctccacctcagccaccttcccagaaactgacagctatgccccccaacccctaaaccccaagcaggagactggaaactcctctctagggagacttacagccccaaaataaagaattctatcactaacttctggcagtggccctcaaattggcagggtccatgctctatttcctcatggtgagactcaacacttaaagtcggccctatgcatacagggagtttccaatcgtcccattcataaccatggaaagacagccagtaatcaccagagtttcggagagaagcctctaacaaagagaatgaccaaagtagaaaacaggtgaaaaagaacgcacaggaaacagacaaggtaggaggcaaagggaaagaaacatctacgtaacaaacgtgtgcaggaatcaataaaacattaaacaaagaaatgt

SEQ ID NO: 32262 - DNA, 454 bp, Homo sapiens
ttttccctgaaaatttttccccaaagtgggggaaaaacttgcagtgaggaccaccacagaagaagctggttggactcagtctccttcctgcctgcaaccttgagaggaggcccaagaccttcgtggggtcaaaggctggagactgctactgtcctggaagaggactgtcaggacagggctgtctgtttcgctgtgttttcctttggttctaaggaacttttttcccctgtggaagcaaacccaacaatctgcatcctgagcttgagaagttaaaggcaaagtgtgtttttggcatgatcaggcttacagataaagactggtgagtaacgtgtgggcattcatacaaatgaccactcacatgaaggtggaggagatacactgttctgggactgccatgtgaggttttaaaagatgaaatgtcagaaacattaaaaaatatgtacttaaaaacatc

SEQ ID NO: 32263 - DNA, 507 bp, Homo sapiens
tcttgaatttaataataataatattgatgctattagtcatcactataactttttattgagtgtgtattttatgtcagacacagtgtggctaagtgctttacatacattatctcatctaatccttagaaaaaaccctggtgtattagtcttaatttaaaagatgtactttggaaaggttagtagtttacccaagattatgcagctagttaaaagtggtgctggggctgggcttggtggctcacacctgtaatcgcagtgctttgggagtctgaggcaggaggatcgcttgacaccaggagtttgagactaacctgggaaacatagcaagaccccatctttacgaaaaataaaaaaattagccaggagtgggggtgcacacctgtggtcccagctacttgggaggctgaggcaggaggattgcttgagccccagaggttgaggctgcagtgagccatgattatgccactgcacatctgtctgggtgacagagcaagatcctgtctccaa

SEQ ID NO: 32264 - DNA, 395 bp, Homo sapiens
aaggaaaggtctgaaattgattagagcaatatattccaggagaaatgttttgcacgaccgttctggaggagactgtcatcacactcagatgagacatgcaagcccacagtaactcacacctgacaataggacctggtaagcaggctgggccagaggcccttggtcatcccagtgctatgtggccaagtggtgggtgtctctcccttgcaaccaggtgaagaaagcatcttcaaagactatatgtccatggaaattccgctatagacttgctctaagtaggtaagagagaaaggaggagtcttcggagcaggtcctctgaggtttatccactcagggcctggaccatatcaatcacttataatatgaaaagtgtgatagatggagcaagagaggga

SEQ ID NO: 32265 - DNA, 318 bp, Homo sapiens
ccccataagaagcatgttcagtaatcattgaatgagtgctgggaacattgtttatagttgaacctagaacctcaacattttattgataataaatcacagtttattctgaagtcatttgggtctcattggtacaaataagatactaatttatggaatctacatgtaatgcctgtctggtggccatctttattaataaacattatctattgcttgttataaatagggaactgagagaggtgataaaatgcaaaaagagccagatacagctcttgctcttcagggaatcacactcattcagatgtatatgtataaattgac

SEQ ID NO: 32266 - DNA, 361 bp, Homo sapiens
aaacacctttcaagctgtagctcttaaaggccaatctgagcatttcaggctcaattaccaccgatgacttgaaacgaaaagggtgctcaacaagagggcactattaaacactaaacactattccacaggctgagaggtacgtctcagcaccaagctgaaagtaaaatggcaattctaataataccatccctaacaggcctatgtggagatcagaagtactaggtgcaaagtggtggtactcttttttaactagggtagcaataagatacatttggccatttaaattgaagtaaggcttagttgtatgatagcagcttacattagaactacaagataggaaaagataagttagttgactcaa

SEQ ID NO: 32267 - DNA, 591 bp, Homo sapiens
gtcgactaagaaactacagctatattggagcttacaagtttggagctggcaaagagcatgcaaaagaggggatgctattcattatgtcttgtttattaaagcatgcaaataaaacaaacatctatccaaatgataagcatcaatggttgtttcatattttttccaaaaacacaatgccatgaccacagttcaatcacattacaggtttacaaatagcaatattaacaccaccagttgagactacagtacttttcctccaaatgtaattatcattatgaagcagagcaaagtgcaacagacaacactacagactatttcttaaatcagcatgcaaaactactgtgtacagggcttgaaattcactagttctgccaaccaccaacaacctaagaaatgtgtcagacaacacaaatttagagtgagatcattcaaagtatacagagtcagaaaaaattgtgaaaagaagtaaagccaggatttccagtaggaatttttcactagtgatgggaatttgcttccagtttggaaactgaccaatttgtcatctatttctccatccataatggtcttccatcaatctgctttaggaaa

SEQ ID NO: 32268 - DNA, 427 bp, Homo sapiens
ctggcttgcagatggccaccttctctctgtgtcctcacatagcacagagagaggaagcaagctctgcagtgtctgttcctatagggtactaatcctatctcatgacgtccttgaaacctagttacctccagaggctccatgtccaaataacatcacattgtgggttagggtttcagtaagtgaatttgagggggacacaattttaagtcttacagcagtggctatttaaatttacattgcaattaattgaaattaaaacaatactaaaaattcagttcctcagtcacactaaccgtatttcaagtgcttaatatccaaataaggtgactgagagtgatgttcacacctgtaatcccagcactttgggaggccaagttaggaggattggttgagcccaggaaattgagaccagactgggcaacatagc

SEQ ID NO: 32269 - DNA, 172 bp, Homo sapiens
actgggaactatgttgactatttgggcaatgggatcattaaaagtccaaacctcagcatcatgcaatatgcctttgtaacaaacctgtatgtatacctcctgcatctaaaataggtaaataaaaataaataaaaatttaaaaataaaatgtgatgactaaaaataaaataaa

SEQ ID NO: 32270 - DNA, 375 bp, Homo sapiens
catagtccagtggacaccagcatcactgagttcatatactgtccataatactccatgcatgttccataaatacatctttctgggaatgagtgttggttggtttacattcattaagttaacatttcttattctggccagaatcggtggctcatgcctgtaatcccagcactttgggaggctgaggccggtggatcacttgaggtcaggagtttgagaccagcctggccaacatcctgaaaccccatctctactaaaaatacacacacacacacacacacacacatgcacacacacaagttaacctggcgtggtggcaggcacctgtaattcccaccacttgggaggctgaggcatgagaattgcttgagccgggga

SEQ ID NO: 32271 - DNA, 425 bp, Homo sapiens
ggggaagcccgatactcgcctgacttttccaccagctcccggacatccttcttctcgggcaaccctgagtagcccaacccccggcactccaaaatggtcttcagcttcttgaagctcagcgccaccggatccaccagctgggtggcaaagatgccagtttcataccacacaatggcctcaaaaaacctggccaggacgaacaggaccaggaaatagaggagcaagaaaaaaagcttcagccacatcttccctggagtctcctctctttccagagagctcggaatacgggagagagaagggtcgagggcgggggccgcggctcggtggcagcttgggcgagggccccgtgtccacgcgcgggccacccggcgccgtcactggccggccatccccggcggggaagcaggtgacgggatccgcgcggg

SEQ ID NO: 32272 - DNA, 477 bp, Homo sapiens
agccctaaacacaggattttctacaagtggacagtcaaactccccacactaaagtggcagtcatcgtttacactccatgggcttcagcagtcccagcactaacgagagagtgccctaaaagcggggagggtagagttgtacaaaacatgattcttggccaggcacggtggctcacacctgtaaccctggcactttgggaggccaaggcgggtggatcacttgagtccagttagagaccagcctgggcaacatggtgaaaccccctctctactaaaaatacaaaaattaaccaggcatggtggtgtgcgcctgtaatcccagctactctggaggctgaggcatgaaaatcgcttgaacccaggaggtggaggctgcagtgagctgagatcatcctactgcactccagcccaggtgacagcgagactgtctcaaaaaaataaataaatataaataaaaatttaaaaaaattaaaaaaaa

SEQ ID NO: 32273 - DNA, 427 bp, Homo sapiens
agccgcgtggcttagcataggccagcctgtcctgggggcgtcctgggggctgcgtggccttcacacctctgctctcacctctgcccttgtagccaccgtgtcagggtccctggttttgtctcccttcatggggccttgttgctccagacttgcaggggagtcctccttgctgtacctaccaggacctggtctgcccctcaggactgaatccgtcggtccctggaatcctgctgagctgtcatgacctagagccagtcccaggtcccaggagcctctgtccgtgtggagctgcgacccgtgcttcctgggcacccacttcttaataacatgacctgggaagttcccgtttaagacaaggaaagtaaagcatcctggagcaatggttaacaagacctgaatctaaaataaaataagttccaacaaacat

SEQ ID NO: 32274 - DNA, 403 bp, Homo sapiens
gattgcttgtgtgtaatcttaatttgtctagataaaagtgaatctgacccaaattttgccatgaaagtcattggttctttatttactatgtctccacaattaagattttgaagctaaagcagtatcatccaacatatcccactgaactaagtactaaacttatatctactaaataacaagttgttatgacttttcttcgtcttttctcttttggagaaaacttatggccttcatgttcatagacacatatgaacagataccttctatgagtaattagtaagataagcaatttttaaaaattccacagaatcctagtctgtgtttagactttatgcttagggcctttcattactgagctggattggacctcagaggttaactgtttcctgagtgtgttgggatt

SEQ ID NO: 32275 - DNA, 295 bp, Homo sapiens
tttattatattattttgagacggaatttcgctctcgtttcccaggctggagtagaattttgagatataaagttttactccacattttctttgtcactaatatttccccactattccttgcactcataagcccttattttcagaatttattgtctattatggttttaatatgtgtcccctccaaatctcatgatgaaatgtggtctccggtgttggaggagggcctggtgggaggtgtttggatcatgggggttgatacctaatgaatggcttggcaccatctccttggtaataag

SEQ ID NO: 32276 - DNA, 406 bp, Homo sapiens
tgttatggatatcttttttaatgaaatgaagaaatgtaaatacattttaaaatatattcattttgaagaaaagtaaatcaaagggacacgggcatcacacagacttgcagagttgagaggcattctggagccatctgagtgtttctctcctccctcgcaccacagtccacactgatcgtgactgactttgtccatgtctgcaccattcgatggggtgcttcttaaggacagagaccaagacttgttccctgttgtaactccggtgtccagcacacacaggatgccctcaggaaacgtggaatggatggatgggtgggtggatgatgtggtgatcagaacaggagaggcctccgtgccccctaggcttccttctctttctatgcgttacgcgacagtagtgtggtag

SEQ ID NO: 32277 - DNA, 3554 bp, Homo sapiens
cgcagtcattgtgacgcaatcccacagccttctgggaaacgtagtttatttattctccagctggggaaaggcttagggctgtggactacctctcccgtgaggtagtgcgcaactccaccctgttcgcggcgtcttcgaacgcgccgcggcagccatgttggacgtggtcagcacaggggccggcaccacggggttatcgaagcagctgtcaagatgctggggtccctggtgttgaggagaaaagcactggcgccacggctactcctccggctgctcaggtccccaacgctccggggccatggaggtgcttccggccggaatgtgactactgggagtctcggggagccgcagtggctgagggtagccaccggggggcgccctggaacatcgccggccttgttctccggacgtggggcagccaccggggggcgccagggaggacgcttcgataccaaatgcctcgcggctgccacttggggacgccttcctggtcccgaagaaacactcccaggacaggacagctggaacggggtccccagcagggccggactgggcatgtgcgccctggccgcagcgctggtggttcattgctacagcaagagtccgtccaacaaggatgcagccctgttggaagctgcccgtgccaacaatatgcaagaagtcagcaggctgttgtcagaaggtgcagatgtcaatgcaaagcacagacttggctggacagcactcatggtggcagccatcaaccgaaacaacagtgtggtacaggtcctgcttgctgctggggctgatccaaaccttggagatgatttcagcagtgtttacaagactgccaaggaacagggaatccattctttggaagatgggggacaggacggtgcaagccggcacatcacaaaccagtggacaagtgccctggagttcaggagatggctaggactccccgctggcgtcctgatcacccgagaggatgacttcaacaacaggctgaacaaccgcgccagtttcaagggctgcacggccttgcactatgctgttcttgctgatgactaccgcactgtcaaggagctgcttgatggaggagccaaccccctgcagaggaatgaaatgggacacacacccttggattatgcccgagaaggggaagtgatgaagcttctgaggacttctgaagccaagtaccaagagaagcagcggaagcgtgaggctgaggagcggcgccgcttccccctggagcagcgactaaaggagcacatcattggccaggagagcgccatcgccacagtgggtgctgcgatccggaggaaggagaatggctggtacgatgaagaacaccctctggtcttcctcttcttgggatcatctggaataggaaaaacagagctggccaagcagacagccaaatatatgcacaaagatgctaaaaagggcttcatcaggctggacatgtccgagttccaggagcgacacgaggtggccaagtttattgggtctccaccaggctacgttggccatgaggagggtggccagctgaccaagaagttgaagcagtgccccaatgctgtggtgctctttgatgaagtagacaaggcccatccagatgtgctcaccatcatgctgcagctgtttgatgagggccggctgacagatggaaaagggaagaccattgattgcaaggacgccatcttcatcatgacctccaatgtggccagcgacgagatcgcacagcacgcgctgcagctgaggcaggaagctttggagatgagccgtaaccgtattgccgaaaacctgggggatgtccagataagtgacaagatcaccatctcaaagaacttcaaggagaatgtgattcgccctatcctgaaagctcacttccggagggatgagtttctgggacggatcaatgagatcgtctacttcctccccttctgccactcggagctcatccaactcgtcaacaaggaactaaacttctgggccaagagagccaagcaaaggcacaacatcacgctgctctgggaccgcgaggtggcagatgtgctggtcgacggctacaatgtgcactatggcgcccgctccatcaaacatgaggtagaacgccgtgtggtgaaccagctggcagcagcctatgagcaggacctgctgccagggggctgtactttgcgcatcacggtggaggactcagacaagcagctactcaaaagcccagaactgccctcaccccaggctgagaagcgcctccccaagctgcgtctggagatcatcgacaaggacagcaagactcgcagactggacatccgggcaccactgcaccctgagaaggtgtgcaacaccatctagcagccacctgcctgctcctatgtgccctcaccatccaataaaggccccttggctgtggcatggcaactgacttaccttcccctcatgccgctcccatctctacccagtctcaggcctgcttacctcctcacagcccatgaagaccccttctcagccccaaaacctgaaggaggaatttcgccctactctggcccctttgttgtgggcccataacctgctaacaagccttcaggagaggagctgcctttccacccccttcaaggcaaggagggatggaggtcccttatttccttcagaatgatccccatcccccatagtcgccagactttctcatgttcccaggaagctcagaagtatggcagctaagaacacagctggctggaagaagacagggaccagactgaactgccaccctctgctagtcctcatgcaactcagtccccagaatggctccactgggagtggaggaagagctcagaggcccaggtgcagatagttctgcaatttagtctgtagcctcctcgttccctaccctaaaattctaaggggaagggacccatagaggcttgcctgtttccgctactatattatgcccagtgttcctcctcaccccacgtcctggggtcaggccagaccatgtttcgtcagccttggggactaggccagtgttgggcacctccaggaggaggcctgactggttcattaccctcccctactcagactgagcagcagtcccagataaccaagcaagctcagctctgtgggggcctccttcaaaagaccaacatcgcagacattaggaagctgtaggaagagagatcatgggtttgacctctgcccacatggccatggagtcagcctcagccctgtctgtactgctcgtccagctaaacgagcctggaataaacatgcagtttattcagtctgcatgttagtcacaaagcagagggtctggacaccgtcccccaagggcatttcacagaccagccaatgtttcaagcccaccttagccaggcacagtaaggcctggtgcatccttgggcaccatctacagtagccactgctgggattacaggcatgagccactggacccggcctgcttttcattgttttttactttttgttttgaaataattttagacttagagaaagttgcagaaatagtagaaaattcccatgtatctttcatctagcatctcccaatgattacatcctac

SEQ ID NO: 32278 - DNA, 3522 bp, Homo sapiens
tgctggtactggtcgcgagttttaggatctggggaaaggcttagggctgtggactacctctcccgtgaggtagtgcgcaactccaccctgttcgcggcgtcttcgaacgcgccgcggcagccatgttggacgtggtcagcacaggggccggcaccacggggttatcgaagcagctgtcaagatgctggggtccctggtgttgaggagaaaagcactggcgccacggctactcctccggctgctcaggtccccaacgctccggggccatggaggtgcttccggccggaatgtgactactgggagtctcggggagccgcagtggctgagggtagccaccggggggcgccctggaacatcgccggccttgttctccggacgtggggcagccaccggggggcgccagggaggacgcttcgataccaaatgcctcgcggctgccacttggggacgccttcctggtcccgaagaaacactcccaggacaggacagctggaacggggtccccagcagggccggactgggcatgtgcgccctggccgcagcgctggtggttcattgctacagcaagagtccgtccaacaaggatgcagccctgttggaagctgcccgtgccaacaatatgcaagaagtcagcaggctgttgtcagaaggtgcagatgtcaatgcaaagcacagacttggctggacagcactcatggtggcagccatcaaccgaaacaacagtgtggtacaggtcctgcttgctgctggggctgatccaaaccttggagatgatttcagcagtgtttacaagactgccaaggaacagggaatccattctttggaagatgggggacaggacggtgcaagccggcacatcacaaaccagtggacaagtgccctggagttcaggagatggctaggactccccgctggcgtcctgatcacccgagaggatgacttcaacaacaggctgaacaaccgcgccagtttcaagggctgcacggccttgcactatgctgttcttgctgatgactaccgcactgtcaaggagctgcttgatggaggagccaaccccctgcagaggaatgaaatgggacacacacccttggattatgcccgagaaggggaagtgatgaagcttctgaggacttctgaagccaagtaccaagagaagcagcggaagcgtgaggctgaggagcggcgccgcttccccctggagcagcgactaaaggagcacatcattggccaggagagcgccatcgccacagtgggtgctgcgatccggaggaaggagaatggctggtacgatgaagaacaccctctggtcttcctcttcttgggatcatctggaataggaaaaacagagctggccaagcagacagccaaatatatgcacaaagatgctaaaaagggcttcatcaggctggacatgtccgagttccaggagcgacacgaggtggccaagtttattgggtctccaccaggctacgttggccatgaggagggtggccagctgaccaagaagttgaagcagtgccccaatgctgtggtgctctttgatgaagtagacaaggcccatccagatgtgctcaccatcatgctgcagctgtttgatgagggccggctgacagatggaaaagggaagaccattgattgcaaggacgccatcttcatcatgacctccaatgtggccagcgacgagatcgcacagcacgcgctgcagctgaggcaggaagctttggagatgagccgtaaccgtattgccgaaaacctgggggatgtccagataagtgacaagatcaccatctcaaagaacttcaaggagaatgtgattcgccctatcctgaaagctcacttccggagggatgagtttctgggacggatcaatgagatcgtctacttcctccccttctgccactcggagctcatccaactcgtcaacaaggaactaaacttctgggccaagagagccaagcaaaggcacaacatcacgctgctctgggaccgcgaggtggcagatgtgctggtcgacggctacaatgtgcactatggcgcccgctccatcaaacatgaggtagaacgccgtgtggtgaaccagctggcagcagcctatgagcaggacctgctgccagggggctgtactttgcgcatcacggtggaggactcagacaagcagctactcaaaagcccagaactgccctcaccccaggctgagaagcgcctccccaagctgcgtctggagatcatcgacaaggacagcaagactcgcagactggacatccgggcaccactgcaccctgagaaggtgtgcaacaccatctagcagccacctgcctgctcctatgtgccctcaccatccaataaaggccccttggctgtggcatggcaactgacttaccttcccctcatgccgctcccatctctacccagtctcaggcctgcttacctcctcacagcccatgaagaccccttctcagccccaaaacctgaaggaggaatttcgccctactctggcccctttgttgtgggcccataacctgctaacaagccttcaggagaggagctgcctttccacccccttcaaggcaaggagggatggaggtcccttatttccttcagaatgatccccatcccccatagtcgccagactttctcatgttcccaggaagctcagaagtatggcagctaagaacacagctggctggaagaagacagggaccagactgaactgccaccctctgctagtcctcatgcaactcagtccccagaatggctccactgggagtggaggaagagctcagaggcccaggtgcagatagttctgcaatttagtctgtagcctcctcgttccctaccctaaaattctaaggggaagggacccatagaggcttgcctgtttccgctactatattatgcccagtgttcctcctcaccccacgtcctggggtcaggccagaccatgtttcgtcagccttggggactaggccagtgttgggcacctccaggaggaggcctgactggttcattaccctcccctactcagactgagcagcagtcccagataaccaagcaagctcagctctgtgggggcctccttcaaaagaccaacatcgcagacattaggaagctgtaggaagagagatcatgggtttgacctctgcccacatggccatggagtcagcctcagccctgtctgtactgctcgtccagctaaacgagcctggaataaacatgcagtttattcagtctgcatgttagtcacaaagcagagggtctggacaccgtcccccaagggcatttcacagaccagccaatgtttcaagcccaccttagccaggcacagtaaggcctggtgcatccttgggcaccatctacagtagccactgctgggattacaggcatgagccactggacccggcctgcttttcattgttttttactttttgttttgaaataattttagacttagagaaagttgcagaaatagtagaaaattcccatgtatctttcatctagcatctcccaatgattacatcctac

SEQ ID NO: 32279 - DNA, 3464 bp, Homo sapiens
cgcagtcattgtgacgcaatcccacagccttctgggaaacgtagtttatttattctccagctggggaaaggcttagggctgtggactacctctcccgtgaggtagtgcgcaactccaccctgttcgcggcgtcttcgaacgcgccgcggcagccatgttggacgtggtcagcacaggggccggcaccacggggttatcgaagcagctgtcaagatgctggggtccctggtgttgaggagaaaagcactggcgccacggctactcctccggctgctcaggtccccaacgctccggggccatggaggtgcttccggccggaatgtgactactgggagtctcggggagccgcagtggctgagggtagccaccggggggcgccctggaacatcgccggccttgttctccggacgtggggcagccaccggggggcgccagggaggacgcttcgataccaaatgcctcgcggctgccacttggggacgccttcctggtcccgaagaaacactcccaggacaggacagctggaacggggtccccagcagggccggactgggcatgtgcgccctggccgcagcgctggtggttcattgctacagcaagagtccgtccaacaaggatgcagccctgttggaagctgcccgtgccaacaatatgcaagaagtcagcaggctgttgtcagaaggtgcagatgtcaatgcaaagcacagacttggctggacagcactcatggtggcagccatcaaccgaaacaacagtgtggtacaggtcctgcttgctgctggggctgatccaaaccttggagatgatttcagcagtgtttacaagactgccaaggaacagggaatccattctttggaagtcctgatcacccgagaggatgacttcaacaacaggctgaacaaccgcgccagtttcaagggctgcacggccttgcactatgctgttcttgctgatgactaccgcactgtcaaggagctgcttgatggaggagccaaccccctgcagaggaatgaaatgggacacacacccttggattatgcccgagaaggggaagtgatgaagcttctgaggacttctgaagccaagtaccaagagaagcagcggaagcgtgaggctgaggagcggcgccgcttccccctggagcagcgactaaaggagcacatcattggccaggagagcgccatcgccacagtgggtgctgcgatccggaggaaggagaatggctggtacgatgaagaacaccctctggtcttcctcttcttgggatcatctggaataggaaaaacagagctggccaagcagacagccaaatatatgcacaaagatgctaaaaagggcttcatcaggctggacatgtccgagttccaggagcgacacgaggtggccaagtttattgggtctccaccaggctacgttggccatgaggagggtggccagctgaccaagaagttgaagcagtgccccaatgctgtggtgctctttgatgaagtagacaaggcccatccagatgtgctcaccatcatgctgcagctgtttgatgagggccggctgacagatggaaaagggaagaccattgattgcaaggacgccatcttcatcatgacctccaatgtggccagcgacgagatcgcacagcacgcgctgcagctgaggcaggaagctttggagatgagccgtaaccgtattgccgaaaacctgggggatgtccagataagtgacaagatcaccatctcaaagaacttcaaggagaatgtgattcgccctatcctgaaagctcacttccggagggatgagtttctgggacggatcaatgagatcgtctacttcctccccttctgccactcggagctcatccaactcgtcaacaaggaactaaacttctgggccaagagagccaagcaaaggcacaacatcacgctgctctgggaccgcgaggtggcagatgtgctggtcgacggctacaatgtgcactatggcgcccgctccatcaaacatgaggtagaacgccgtgtggtgaaccagctggcagcagcctatgagcaggacctgctgccagggggctgtactttgcgcatcacggtggaggactcagacaagcagctactcaaaagcccagaactgccctcaccccaggctgagaagcgcctccccaagctgcgtctggagatcatcgacaaggacagcaagactcgcagactggacatccgggcaccactgcaccctgagaaggtgtgcaacaccatctagcagccacctgcctgctcctatgtgccctcaccatccaataaaggccccttggctgtggcatggcaactgacttaccttcccctcatgccgctcccatctctacccagtctcaggcctgcttacctcctcacagcccatgaagaccccttctcagccccaaaacctgaaggaggaatttcgccctactctggcccctttgttgtgggcccataacctgctaacaagccttcaggagaggagctgcctttccacccccttcaaggcaaggagggatggaggtcccttatttccttcagaatgatccccatcccccatagtcgccagactttctcatgttcccaggaagctcagaagtatggcagctaagaacacagctggctggaagaagacagggaccagactgaactgccaccctctgctagtcctcatgcaactcagtccccagaatggctccactgggagtggaggaagagctcagaggcccaggtgcagatagttctgcaatttagtctgtagcctcctcgttccctaccctaaaattctaaggggaagggacccatagaggcttgcctgtttccgctactatattatgcccagtgttcctcctcaccccacgtcctggggtcaggccagaccatgtttcgtcagccttggggactaggccagtgttgggcacctccaggaggaggcctgactggttcattaccctcccctactcagactgagcagcagtcccagataaccaagcaagctcagctctgtgggggcctccttcaaaagaccaacatcgcagacattaggaagctgtaggaagagagatcatgggtttgacctctgcccacatggccatggagtcagcctcagccctgtctgtactgctcgtccagctaaacgagcctggaataaacatgcagtttattcagtctgcatgttagtcacaaagcagagggtctggacaccgtcccccaagggcatttcacagaccagccaatgtttcaagcccaccttagccaggcacagtaaggcctggtgcatccttgggcaccatctacagtagccactgctgggattacaggcatgagccactggacccggcctgcttttcattgttttttactttttgttttgaaataattttagacttagagaaagttgcagaaatagtagaaaattcccatgtatctttcatctagcatctcccaatgattacatcctac

SEQ ID NO: 32280 - DNA, 2310 bp, Homo sapiens
cgcagtcattgtgacgcaatcccacagccttctgggaaacgtagtttatttattctccagctggggaaaggcttagggctgtggactacctctcccgtgaggtagtgcgcaactccaccctgttcgcggcgtcttcgaacgcgccgcggcagccatgttggacgtggtcagcacaggggccggcaccacggggttatcgaagcagctgtcaagatgctggggtccctggtgttgaggagaaaagcactggcgccacggctactcctccggctgctcaggtccccaacgctccggggccatggaggtgcttccggccggaatgtgactactgggagtctcggggagccgcagtggctgagggtagccaccggggggcgccctggaacatcgccggccttgttctccggacgtggggcagccaccggggggcgccagggaggacgcttcgataccaaatgcctcgcggctgccacttggggacgccttcctggtcccgaagaaacactcccaggacaggacagctggaacggggtccccagcagggccggactgggcatgtgcgccctggccgcagcgctggtggttcattgctacagcaagagtccgtccaacaaggatgcagccctgttggaagctgcccgtgccaacaatatgcaagaagtcagcaggctgttgtcagaaggtgcagatgtcaatgcaaagcacagacttggctggacagcactcatggtggcagccatcaaccgaaacaacagtgtggtacaggtcctgcttgctgctggggctgatccaaaccttggagatgatttcagcagtgtttacaagactgccaaggaacagggaatccattctttggaagtcctgatcacccgagaggatgacttcaacaacaggctgaacaaccgcgccagtttcaagggctgcacggccttgcactatgctgttcttgctgatgactaccgcactgtcaaggagctgcttgatggaggagccaaccccctgcagaggaatgaaatgggacacacacccttggattatgcccgagaaggggaagtgatgaagcttctgaggacttctgaagccaagtaccaagagaagcagcggaagcgtgaggctgaggagcggcgccgcttccccctggagcagcgactaaaggagcacatcattggccaggagagcgccatcgccacagtgggtgctgcgatccggaggaaggagaatggctggtacgatgaagaacaccctctggtcttcctcttcttgggatcatctggaataggaaaaacagagctggccaagcagacagccaaatatatgcacaaagatgctaaaaagggcttcatcaggctggacatgtccgagttccaggagcgacacgaggtggccaagtttattgggtctccaccaggctacgttggccatgaggagggtggccagctgaccaagaagttgaagcagtgccccaatgctgtggtgctctttgatgaagtagacaaggcccatccagatgtgctcaccatcatgctgcagctgtttgatgagggccggctgacagatggaaaagggaagaccattgattgcaaggacgccatcttcatcatgacctccaatgtggccagcgacgagatcgcacagcacgcgctgcagctgaggcaggaagctttggagatgagccgtaaccgtattgccgaaaacctgggggatgtccagataagtgacaagatcaccatctcaaagaacttcaaggagaatgtgattcgccctatcctgaaagctcacttccggagggatgagtttctgggacggatcaatgagatcgtctacttcctccccttctgccactcggagctcatccaactcgtcaacaaggaactaaacttctgggccaagagagccaagcaaaggcacaacatcacgctgctctgggaccgcgaggtggcagatgtgctggtcgacggctacaatgtgcactatggcgcccgctccatcaaacatgaggtagaacgccgtgtggtgaaccagctggcagcagcctatgagcaggacctgctgccagggggctgtactttgcgcatcacggtggaggactcagacaagcagctactcaaaagcccagaactgccctcaccccaggctgagaagcgcctccccaagctgcgtctggagatcatcgacaaggacagcaagactcgcagactggacatccgggcaccactgcaccctgagaaggtgtgcaacaccatctagcagccacctgcctgctcctatgtgccctcaccatccaataaaggccccttggctgtggcatgg

SEQ ID NO: 32281 - DNA, 2479 bp, Homo sapiens
  misc_feature (2311)..(2311): n is a, c, g, or t
cgcagtcattgtgacgcaatcccacagccttctgggaaacgtagtttatttattctccagctggggaaaggcttagggctgtggactacctctcccgtgaggtagtgcgcaactccaccctgttcgcggcgtcttcgaacgcgccgcggcagccatgttggacgtggtcagcacaggggccggcaccacggggttatcgaagcagctgtcaagatgctggggtccctggtgttgaggagaaaagcactggcgccacggctactcctccggctgctcaggtccccaacgctccggggccatggaggtgcttccggccggaatgtgactactgggagtctcggggagccgcagtggctgagggtagccaccggggggcgccctggaacatcgccggccttgttctccggacgtggggcagccaccggggggcgccagggaggacgcttcgataccaaatgcctcgcggctgccacttggggacgccttcctggtcccgaagaaacactcccaggacaggacagctggaacggggtccccagcagggccggactgggcatgtgcgccctggccgcagcgctggtggttcattgctacagcaagagtccgtccaacaaggatgcagccctgttggaagctgcccgtgccaacaatatgcaagaagtcagcaggctgttgtcagaaggtgcagatgtcaatgcaaagcacagacttggctggacagcactcatggtggcagccatcaaccgaaacaacagtgtggtacaggtcctgcttgctgctggggctgatccaaaccttggagatgatttcagcagtgtttacaagactgccaaggaacagggaatccattctttggaagtcctgatcacccgagaggatgacttcaacaacaggctgaacaaccgcgccagtttcaagggctgcacggccttgcactatgctgttcttgctgatgactaccgcactgtcaaggagctgcttgatggaggagccaaccccctgcagaggaatgaaatgggacacacacccttggattatgcccgagaaggggaagtgatgaagcttctgaggacttctgaagccaagtaccaagagaagcagcggaagcgtgaggctgaggagcggcgccgcttccccctggagcagcgactaaaggagcacatcattggccaggagagcgccatcgccacagtgggtgctgcgatccggaggaaggagaatggctggtacgatgaagaacaccctctggtcttcctcttcttgggatcatctggaataggaaaaacagagctggccaagcagacagccaaatatatgcacaaagatgctaaaaagggcttcatcaggctggacatgtccgagttccaggagcgacacgaggtggccaagtttattgggtctccaccaggctacgttggccatgaggagggtggccagctgaccaagaagttgaagcagtgccccaatgctgtggtgctctttgatgaagtagacaaggcccatccagatgtgctcaccatcatgctgcagctgtttgatgagggccggctgacagatggaaaagggaagaccattgattgcaaggacgccatcttcatcatgacctccaatgtggccagcgacgagatcgcacagcacgcgctgcagctgaggcaggaagctttggagatgagccgtaaccgtattgccgaaaacctgggggatgtccagataagtgacaagatcaccatctcaaagaacttcaaggagaatgtgattcgccctatcctgaaagctcacttccggagggatgagtttctgggacggatcaatgagatcgtctacttcctccccttctgccactcggagctcatccaactcgtcaacaaggaactaaacttctgggccaagagagccaagcaaaggcacaacatcacgctgctctgggaccgcgaggtggcagatgtgctggtcgacggctacaatgtgcactatggcgcccgctccatcaaacatgaggtagaacgccgtgtggtgaaccagctggcagcagcctatgagcaggacctgctgccagggggctgtactttgcgcatcacggtggaggactcagacaagcagctactcaaaagcccagaactgccctcaccccaggctgagaagcgcctccccaagctgcgtctggagatcatcgacaaggacagcaagactcgcagactggacatccgggcaccactgcaccctgagaaggtgtgcaacaccatctagcagccacctgcctgctcctatgtgccctcaccatccaataaaggccccttggctgtggcatggncaaaaaaaaaataaaaaaaaaaaaaaaaaaaacaaaacaacaaaaaagaaaaaaaaaagcacacaaaagaaacacaaacggggggggggcgccctcaaaatattctccccacgggggcgccccaatatgagcgcgcccccccgttttttttaaaaaggggcgccccaa

SEQ ID NO: 32282 - DNA, 1602 bp, Homo sapiens
  misc_feature (1546)..(1546): n is a, c, g, or t
cgcagtcattgtgacgcaatcccacagccttctgggaaacgtagtttatttattctccagctggggaaaggcttagggctgtggactacctctcccgtgaggtagtgcgcaactccaccctgttcgcggcgtcttcgaacgcgccgcggcagccatgttggacgtggtcagcacaggggccggcaccacggggttatcgaagcagctgtcaagatgctggggtccctggtgttgaggagaaaagcactggcgccacggctactcctccggctgctcaggtccccaacgctccggggccatggaggtgcttccggccggaatgtgactactgggagtctcggggagccgcagtggctgagggtagccaccggggggcgccctggaacatcgccggccttgttctccggacgtggggcagccaccggggggcgccagggaggacgcttcgataccaaatgcctcgcggctgccacttggggacgccttcctggtcccgaagaaacactcccaggacaggacagctggaacggggtccccagcagggccggactgggcatgtgcgccctggccgcagcgctggtggttcattgctacagcaagagtccgtccaacaaggatgcagccctgttggaagctgcccgtgccaacaatatgcaagaagtcagcaggctgttgtcagaaggtgcagatgtcaatgcaaagcacagacttggctggacagcactcatggtggcagccatcaaccgaaacaacagtgtggtacaggtcctgcttgctgctggggctgatccaaaccttggagatgatttcagcagtgtttacaagactgccaaggaacagggaatccattctttggaagtcctgatcacccgagaggatgacttcaacaacaggctgaacaaccgcgccagtttcaagggctgcacggccttgcactatgctgttcttgctgatgactaccgcactgtcaaggagctgcttgatggaggagccaaccccctgcagaggaatgaaatgggacacacacccttggattatgcccgagaaggggaagtgatgaagcttctgaggacttctgaagccaagtaccaagagaagcagcggaagcgtgaggctgaggagcggcgccgcttccccctggagcagcgactaaaggagcacatcattggccaggagagcgccatcgccacagtgggtgctgcgatccggaggaaggagaatggctggtacgatgaagaacaccctctggtcttcctcttcttgggatcatctggaataggaaaaacagagctggccaagcagacagccaaatatatgcacaaagatgctaaaaagggcttcatcaggctggacatgtccgagttccaggagcgacacgaggtgagtgatgacagtccttgattgaagcatggtttggagggcttgtcagcatgactgccggggtcttgtcatttgggcctcagataattccagcagccttgggatttgtcgttgggagcacaggtgtgcagcagggtcactgatttgtttcacataggttttgtcntaacgcgggtctccctttttggtatgaggagaaaataattaataatacaataataa

SEQ ID NO: 32283 - DNA, 2996 bp, Homo sapiens
taaggctaggtagcgaggcctgggtggtgagaaacactcccaggacaggacagctggaacggggtccccagcagggccggactgggcatgtgcgccctggccgcagcgctggtggttcattgctacagcaagagtccgtccaacaaggatgcagccctgttggaagctgcccgtgccaacaatatgcaagaagtcagcaggctgttgtcagaaggtgcagatgtcaatgcaaagcacagacttggctggacagcactcatggtggcagccatcaaccgaaacaacagtgtggtacaggtcctgcttgctgctggggctgatccaaaccttggagatgatttcagcagtgtttacaagactgccaaggaacagggaatccattctttggaagtcctgatcacccgagaggatgacttcaacaacaggctgaacaaccgcgccagtttcaagggctgcacggccttgcactatgctgttcttgctgatgactaccgcactgtcaaggagctgcttgatggaggagccaaccccctgcagaggaatgaaatgggacacacacccttggattatgcccgagaaggggaagtgatgaagcttctgaggacttctgaagccaagtaccaagagaagcagcggaagcgtgaggctgaggagcggcgccgcttccccctggagcagcgactaaaggagcacatcattggccaggagagcgccatcgccacagtgggtgctgcgatccggaggaaggagaatggctggtacgatgaagaacaccctctggtcttcctcttcttgggatcatctggaataggaaaaacagagctggccaagcagacagccaaatatatgcacaaagatgctaaaaagggcttcatcaggctggacatgtccgagttccaggagcgacacgaggtggccaagtttattgggtctccaccaggctacgttggccatgaggagggtggccagctgaccaagaagttgaagcagtgccccaatgctgtggtgctctttgatgaagtagacaaggcccatccagatgtgctcaccatcatgctgcagctgtttgatgagggccggctgacagatggaaaagggaagaccattgattgcaaggacgccatcttcatcatgacctccaatgtggccagcgacgagatcgcacagcacgcgctgcagctgaggcaggaagctttggagatgagccgtaaccgtattgccgaaaacctgggggatgtccagataagtgacaagatcaccatctcaaagaacttcaaggagaatgtgattcgccctatcctgaaagctcacttccggagggatgagtttctgggacggatcaatgagatcgtctacttcctccccttctgccactcggagctcatccaactcgtcaacaaggaactaaacttctgggccaagagagccaagcaaaggcacaacatcacgctgctctgggaccgcgaggtggcagatgtgctggtcgacggctacaatgtgcactatggcgcccgctccatcaaacatgaggtagaacgccgtgtggtgaaccagctggcagcagcctatgagcaggacctgctgccagggggctgtactttgcgcatcacggtggaggactcagacaagcagctactcaaaagcccagaactgccctcaccccaggctgagaagcgcctccccaagctgcgtctggagatcatcgacaaggacagcaagactcgcagactggacatccgggcaccactgcaccctgagaaggtgtgcaacaccatctagcagccacctgcctgctcctatgtgccctcaccatccaataaaggccccttggctgtggcatggcaactgacttaccttcccctcatgccgctcccatctctacccagtctcaggcctgcttacctcctcacagcccatgaagaccccttctcagccccaaaacctgaaggaggaatttcgccctactctggcccctttgttgtgggcccataacctgctaacaagccttcaggagaggagctgcctttccacccccttcaaggcaaggagggatggaggtcccttatttccttcagaatgatccccatcccccatagtcgccagactttctcatgttcccaggaagctcagaagtatggcagctaagaacacagctggctggaagaagacagggaccagactgaactgccaccctctgctagtcctcatgcaactcagtccccagaatggctccactgggagtggaggaagagctcagaggcccaggtgcagatagttctgcaatttagtctgtagcctcctcgttccctaccctaaaattctaaggggaagggacccatagaggcttgcctgtttccgctactatattatgcccagtgttcctcctcaccccacgtcctggggtcaggccagaccatgtttcgtcagccttggggactaggccagtgttgggcacctccaggaggaggcctgactggttcattaccctcccctactcagactgagcagcagtcccagataaccaagcaagctcagctctgtgggggcctccttcaaaagaccaacatcgcagacattaggaagctgtaggaagagagatcatgggtttgacctctgcccacatggccatggagtcagcctcagccctgtctgtactgctcgtccagctaaacgagcctggaataaacatgcagtttattcagtctgcatgttagtcacaaagcagagggtctggacaccgtcccccaagggcatttcacagaccagccaatgtttcaagcccaccttagccaggcacagtaaggcctggtgcatccttgggcaccatctacagtagccactgctgggattacaggcatgagccactggacccggcctgcttttcattgttttttactttttgttttgaaataattttagacttagagaaagttgcagaaatagtagaaaattcccatgtatctttcatctagcatctcccaatgattacatcctac

SEQ ID NO: 32284 - DNA, 3345 bp, Homo sapiens
tgctggtactggtcgcgagttttaggatctggggaaaggcttagggctgtggactacctctcccgtgaggtagtgcgcaactccaccctgttcgcggcgtcttcgaacgcgccgcggcagccatgttggacgtggtcagcacaggggccggcaccacggggttatcgaagcagctgtcaagatgctggggtccctggtgttgaggagaaaagcactggcgccacggctactcctccggctgctcaggtccccaacgctccggggccatggaggtgcttccggccggaatgtgactactgggagtctcggggagccgcagtggctgagggtagccaccggggggcgccctggaacatcgccggccttgttctccggacgtggggcagccaccggggggcgccagggaggacgcttcgataccaaatgcctcgcggctgccacttggggacgccttcctggtcccgaagaaacactcccaggacaggacagctggaacggggtccccagcagggccggactgggcatgtgcgccctggccgcagcgctggtggttcattgctacagcaagagtccgtccaacaaggatgcagccctgttggaagctgcccgtgccaacaatatgcaagaagtcagcagtgtggtacaggtcctgcttgctgctggggctgatccaaaccttggagatgatttcagcagtgtttacaagactgccaaggaacagggaatccattctttggaagtcctgatcacccgagaggatgacttcaacaacaggctgaacaaccgcgccagtttcaagggctgcacggccttgcactatgctgttcttgctgatgactaccgcactgtcaaggagctgcttgatggaggagccaaccccctgcagaggaatgaaatgggacacacacccttggattatgcccgagaaggggaagtgatgaagcttctgaggacttctgaagccaagtaccaagagaagcagcggaagcgtgaggctgaggagcggcgccgcttccccctggagcagcgactaaaggagcacatcattggccaggagagcgccatcgccacagtgggtgctgcgatccggaggaaggagaatggctggtacgatgaagaacaccctctggtcttcctcttcttgggatcatctggaataggaaaaacagagctggccaagcagacagccaaatatatgcacaaagatgctaaaaagggcttcatcaggctggacatgtccgagttccaggagcgacacgaggtggccaagtttattgggtctccaccaggctacgttggccatgaggagggtggccagctgaccaagaagttgaagcagtgccccaatgctgtggtgctctttgatgaagtagacaaggcccatccagatgtgctcaccatcatgctgcagctgtttgatgagggccggctgacagatggaaaagggaagaccattgattgcaaggacgccatcttcatcatgacctccaatgtggccagcgacgagatcgcacagcacgcgctgcagctgaggcaggaagctttggagatgagccgtaaccgtattgccgaaaacctgggggatgtccagataagtgacaagatcaccatctcaaagaacttcaaggagaatgtgattcgccctatcctgaaagctcacttccggagggatgagtttctgggacggatcaatgagatcgtctacttcctccccttctgccactcggagctcatccaactcgtcaacaaggaactaaacttctgggccaagagagccaagcaaaggcacaacatcacgctgctctgggaccgcgaggtggcagatgtgctggtcgacggctacaatgtgcactatggcgcccgctccatcaaacatgaggtagaacgccgtgtggtgaaccagctggcagcagcctatgagcaggacctgctgccagggggctgtactttgcgcatcacggtggaggactcagacaagcagctactcaaaagcccagaactgccctcaccccaggctgagaagcgcctccccaagctgcgtctggagatcatcgacaaggacagcaagactcgcagactggacatccgggcaccactgcaccctgagaaggtgtgcaacaccatctagcagccacctgcctgctcctatgtgccctcaccatccaataaaggccccttggctgtggcatggcaactgacttaccttcccctcatgccgctcccatctctacccagtctcaggcctgcttacctcctcacagcccatgaagaccccttctcagccccaaaacctgaaggaggaatttcgccctactctggcccctttgttgtgggcccataacctgctaacaagccttcaggagaggagctgcctttccacccccttcaaggcaaggagggatggaggtcccttatttccttcagaatgatccccatcccccatagtcgccagactttctcatgttcccaggaagctcagaagtatggcagctaagaacacagctggctggaagaagacagggaccagactgaactgccaccctctgctagtcctcatgcaactcagtccccagaatggctccactgggagtggaggaagagctcagaggcccaggtgcagatagttctgcaatttagtctgtagcctcctcgttccctaccctaaaattctaaggggaagggacccatagaggcttgcctgtttccgctactatattatgcccagtgttcctcctcaccccacgtcctggggtcaggccagaccatgtttcgtcagccttggggactaggccagtgttgggcacctccaggaggaggcctgactggttcattaccctcccctactcagactgagcagcagtcccagataaccaagcaagctcagctctgtgggggcctccttcaaaagaccaacatcgcagacattaggaagctgtaggaagagagatcatgggtttgacctctgcccacatggccatggagtcagcctcagccctgtctgtactgctcgtccagctaaacgagcctggaataaacatgcagtttattcagtctgcatgttagtcacaaagcagagggtctggacaccgtcccccaagggcatttcacagaccagccaatgtttcaagcccaccttagccaggcacagtaaggcctggtgcatccttgggcaccatctacagtagccactgctgggattacaggcatgagccactggacccggcctgcttttcattgttttttactttttgttttgaaataattttagacttagagaaagttgcagaaatagtagaaaattcccatgtatctttcatctagcatctcccaatgattacatcctac

SEQ ID NO: 32285 - DNA, 3292 bp, Homo sapiens
tgctggtactggtcgcgagttttaggatctggggaaaggcttagggctgtggactacctctcccgtgaggtagtgcgcaactccaccctgttcgcggcgtcttcgaacgcgccgcggcagccatgttggacgtggtcagcacaggggccggcaccacggggttatcgaagcagctgtcaagatgctggggtccctggtgttgaggagaaaagcactggcgccacggctactcctccggctgctcaggtccccaacgctccggggccatggagatgcagccctgttggaagctgcccgtgccaacaatatgcaagaagtcagcaggctgttgtcagaaggtgcagatgtcaatgcaaagcacagacttggctggacagcactcatggtggcagccatcaaccgaaacaacagtgtggtacaggtcctgcttgctgctggggctgatccaaaccttggagatgatttcagcagtgtttacaagactgccaaggaacagggaatccattctttggaagatgggggacaggacggtgcaagccggcacatcacaaaccagtggacaagtgccctggagttcaggagatggctaggactccccgctggcgtcctgatcacccgagaggatgacttcaacaacaggctgaacaaccgcgccagtttcaagggctgcacggccttgcactatgctgttcttgctgatgactaccgcactgtcaaggagctgcttgatggaggttcctccagagaattgagccctcattctccaaggcatccatcgtacacagggattaacttctctcccagggatctcaaatggagccaaccccctgcagaggaatgaaatgggacacacacccttggattatgcccgagaaggggaagtgatgaagcttctgaggacttctgaagccaagtaccaagagaagcagcggaagcgtgaggctgaggagcggcgccgcttccccctggagcagcgactaaaggagcacatcattggccaggagagcgccatcgccacagtgggtgctgcgatccggaggaaggagaatggctggtacgatgaagaacaccctctggtcttcctcttcttgggatcatctggaataggaaaaacagagctggccaagcagacagccaaatatatgcacaaagatgctaaaaagggcttcatcaggctggacatgtccgagttccaggagcgacacgaggtggccaagtttattgggtctccaccaggctacgttggccatgaggagggtggccagctgaccaagaagttgaagcagtgccccaatgctgtggtgctctttgatgaagtagacaaggcccatccagatgtgctcaccatcatgctgcagctgtttgatgagggccggctgacagatggaaaagggaagaccattgattgcaaggacgccatcttcatcatgacctccaatgtggccagcgacgagatcgcacagcacgcgctgcagctgaggcaggaagctttggagatgagccgtaaccgtattgccgaaaacctgggggatgtccagataagtgacaagatcaccatctcaaagaacttcaaggagaatgtgattcgccctatcctgaaagctcacttccggagggatgagtttctgggacggatcaatgagatcgtctacttcctccccttctgccactcggagctcatccaactcgtcaacaaggaactaaacttctgggccaagagagccaagcaaaggcacaacatcacgctgctctgggaccgcgaggtggcagatgtgctggtcgacggctacaatgtgcactatggcgcccgctccatcaaacatgaggtagaacgccgtgtggtgaaccagctggcagcagcctatgagcaggacctgctgccagggggctgtactttgcgcatcacggtggaggactcagacaagcagctactcaaaagcccagaactgccctcaccccaggctgagaagcgcctccccaagctgcgtctggagatcatcgacaaggacagcaagactcgcagactggacatccgggcaccactgcaccctgagaaggtgtgcaacaccatctagcagccacctgcctgctcctatgtgccctcaccatccaataaaggccccttggctgtggcatggcaactgacttaccttcccctcatgccgctcccatctctacccagtctcaggcctgcttacctcctcacagcccatgaagaccccttctcagccccaaaacctgaaggaggaatttcgccctactctggcccctttgttgtgggcccataacctgctaacaagccttcaggagaggagctgcctttccacccccttcaaggcaaggagggatggaggtcccttatttccttcagaatgatccccatcccccatagtcgccagactttctcatgttcccaggaagctcagaagtatggcagctaagaacacagctggctggaagaagacagggaccagactgaactgccaccctctgctagtcctcatgcaactcagtccccagaatggctccactgggagtggaggaagagctcagaggcccaggtgcagatagttctgcaatttagtctgtagcctcctcgttccctaccctaaaattctaaggggaagggacccatagaggcttgcctgtttccgctactatattatgcccagtgttcctcctcaccccacgtcctggggtcaggccagaccatgtttcgtcagccttggggactaggccagtgttgggcacctccaggaggaggcctgactggttcattaccctcccctactcagactgagcagcagtcccagataaccaagcaagctcagctctgtgggggcctccttcaaaagaccaacatcgcagacattaggaagctgtaggaagagagatcatgggtttgacctctgcccacatggccatggagtcagcctcagccctgtctgtactgctcgtccagctaaacgagcctggaataaacatgcagtttattcagtctgcatgttagtcacaaagcagagggtctggacaccgtcccccaagggcatttcacagaccagccaatgtttcaagcccaccttagccaggcacagtaaggcctggtgcatccttgggcaccatctacagtagccactgctgggattacaggcatgagccactggacccggcctgcttttcattgttttttactttttgttttgaaataattttagacttagagaaagttgcagaaatagtagaaaattcccatgtatctttcatctagcatctcccaatgattacatcctac

SEQ ID NO: 32286 - DNA, 2481 bp, Homo sapiens
tgttatggatatcttttttaatgaaatgaagaaatgtaaatacattttaaaatatattcattttgaagaaaagtaaatcaaagggacacgggcatcacacagacttgcagagttgagaggcattctggagccatctgagtgtttctctcctccctcgcaccacagtccacactgatcgtgactgactttgtccatgtctgcaccattcgatggggtgcttcttaaggacagagaccaagacttgttccctgttgtaactccggtgtccagcacacacaggatgccctcaggaaacgtggaatggatggatgggtgggtggatgatgtggtgatcagaacaggagaggcctccggcttcatcaggctggacatgtccgagttccaggagcgacacgaggtggccaagtttattgggtctccaccaggctacgttggccatgaggagggtggccagctgaccaagaagttgaagcagtgccccaatgctgtggtgctctttgatgaagtagacaaggcccatccagatgtgctcaccatcatgctgcagctgtttgatgagggccggctgacagatggaaaagggaagaccattgattgcaaggacgccatcttcatcatgacctccaatgtggccagcgacgagatcgcacagcacgcgctgcagctgaggcaggaagctttggagatgagccgtaaccgtattgccgaaaacctgggggatgtccagataagtgacaagatcaccatctcaaagaacttcaaggagaatgtgattcgccctatcctgaaagctcacttccggagggatgagtttctgggacggatcaatgagatcgtctacttcctccccttctgccactcggagctcatccaactcgtcaacaaggaactaaacttctgggccaagagagccaagcaaaggcacaacatcacgctgctctgggaccgcgaggtggcagatgtgctggtcgacggctacaatgtgcactatggcgcccgctccatcaaacatgaggtagaacgccgtgtggtgaaccagctggcagcagcctatgagcaggacctgctgccagggggctgtactttgcgcatcacggtggaggactcagacaagcagctactcaaaagcccagaactgccctcaccccaggctgagaagcgcctccccaagctgcgtctggagatcatcgacaaggacagcaagactcgcagactggacatccgggcaccactgcaccctgagaaggtgtgcaacaccatctagcagccacctgcctgctcctatgtgccctcaccatccaataaaggccccttggctgtggcatggcaactgacttaccttcccctcatgccgctcccatctctacccagtctcaggcctgcttacctcctcacagcccatgaagaccccttctcagccccaaaacctgaaggaggaatttcgccctactctggcccctttgttgtgggcccataacctgctaacaagccttcaggagaggagctgcctttccacccccttcaaggcaaggagggatggaggtcccttatttccttcagaatgatccccatcccccatagtcgccagactttctcatgttcccaggaagctcagaagtatggcagctaagaacacagctggctggaagaagacagggaccagactgaactgccaccctctgctagtcctcatgcaactcagtccccagaatggctccactgggagtggaggaagagctcagaggcccaggtgcagatagttctgcaatttagtctgtagcctcctcgttccctaccctaaaattctaaggggaagggacccatagaggcttgcctgtttccgctactatattatgcccagtgttcctcctcaccccacgtcctggggtcaggccagaccatgtttcgtcagccttggggactaggccagtgttgggcacctccaggaggaggcctgactggttcattaccctcccctactcagactgagcagcagtcccagataaccaagcaagctcagctctgtgggggcctccttcaaaagaccaacatcgcagacattaggaagctgtaggaagagagatcatgggtttgacctctgcccacatggccatggagtcagcctcagccctgtctgtactgctcgtccagctaaacgagcctggaataaacatgcagtttattcagtctgcatgttagtcacaaagcagagggtctggacaccgtcccccaagggcatttcacagaccagccaatgtttcaagcccaccttagccaggcacagtaaggcctggtgcatccttgggcaccatctacagtagccactgctgggattacaggcatgagccactggacccggcctgcttttcattgttttttactttttgttttgaaataattttagacttagagaaagttgcagaaatagtagaaaattcccatgtatctttcatctagcatctcccaatgattacatcctac

SEQ ID NO: 32287 - DNA, 2052 bp, Homo sapiens
gaggagtctttgtattgagtggcatgtgatcaagaagttgaagcagtgccccaatgctgtggtgctctttgatgaagtagacaaggcccatccagatgtgctcaccatcatgctgcagctgtttgatgagggccggctgacagatggaaaagggaagaccattgattgcaaggacgccatcttcatcatgacctccaatgtggccagcgacgagatcgcacagcacgcgctgcagctgaggcaggaagctttggagatgagccgtaaccgtattgccgaaaacctgggggatgtccagataagtgacaagatcaccatctcaaagaacttcaaggagaatgtgattcgccctatcctgaaagctcacttccggagggatgagtttctgggacggatcaatgagatcgtctacttcctccccttctgccactcggagctcatccaactcgtcaacaaggaactaaacttctgggccaagagagccaagcaaaggcacaacatcacgctgctctgggaccgcgaggtggcagatgtgctggtcgacggctacaatgtgcactatggcgcccgctccatcaaacatgaggtagaacgccgtgtggtgaaccagctggcagcagcctatgagcaggacctgctgccagggggctgtactttgcgcatcacggtggaggactcagacaagcagctactcaaaagcccagaactgccctcaccccaggctgagaagcgcctccccaagctgcgtctggagatcatcgacaaggacagcaagactcgcagactggacatccgggcaccactgcaccctgagaaggtgtgcaacaccatctagcagccacctgcctgctcctatgtgccctcaccatccaataaaggccccttggctgtggcatggcaactgacttaccttcccctcatgccgctcccatctctacccagtctcaggcctgcttacctcctcacagcccatgaagaccccttctcagccccaaaacctgaaggaggaatttcgccctactctggcccctttgttgtgggcccataacctgctaacaagccttcaggagaggagctgcctttccacccccttcaaggcaaggagggatggaggtcccttatttccttcagaatgatccccatcccccatagtcgccagactttctcatgttcccaggaagctcagaagtatggcagctaagaacacagctggctggaagaagacagggaccagactgaactgccaccctctgctagtcctcatgcaactcagtccccagaatggctccactgggagtggaggaagagctcagaggcccaggtgcagatagttctgcaatttagtctgtagcctcctcgttccctaccctaaaattctaaggggaagggacccatagaggcttgcctgtttccgctactatattatgcccagtgttcctcctcaccccacgtcctggggtcaggccagaccatgtttcgtcagccttggggactaggccagtgttgggcacctccaggaggaggcctgactggttcattaccctcccctactcagactgagcagcagtcccagataaccaagcaagctcagctctgtgggggcctccttcaaaagaccaacatcgcagacattaggaagctgtaggaagagagatcatgggtttgacctctgcccacatggccatggagtcagcctcagccctgtctgtactgctcgtccagctaaacgagcctggaataaacatgcagtttattcagtctgcatgttagtcacaaagcagagggtctggacaccgtcccccaagggcatttcacagaccagccaatgtttcaagcccaccttagccaggcacagtaaggcctggtgcatccttgggcaccatctacagtagccactgctgggattacaggcatgagccactggacccggcctgcttttcattgttttttactttttgttttgaaataattttagacttagagaaagttgcagaaatagtagaaaattcccatgtatctttcatctagcatctcccaatgattacatcctac

SEQ ID NO: 32288 - DNA, 1743 bp, Homo sapiens
tccttgtaatccaagcagtcgcaaggagaatgtgattcgccctatcctgaaagctcacttccggagggatgagtttctgggacggatcaatgagatcgtctacttcctccccttctgccactcggagctcatccaactcgtcaacaaggaactaaacttctgggccaagagagccaagcaaaggcacaacatcacgctgctctgggaccgcgaggtggcagatgtgctggtcgacggctacaatgtgcactatggcgcccgctccatcaaacatgaggtagaacgccgtgtggtgaaccagctggcagcagcctatgagcaggacctgctgccagggggctgtactttgcgcatcacggtggaggactcagacaagcagctactcaaaagcccagaactgccctcaccccaggctgagaagcgcctccccaagctgcgtctggagatcatcgacaaggacagcaagactcgcagactggacatccgggcaccactgcaccctgagaaggtgtgcaacaccatctagcagccacctgcctgctcctatgtgccctcaccatccaataaaggccccttggctgtggcatggcaactgacttaccttcccctcatgccgctcccatctctacccagtctcaggcctgcttacctcctcacagcccatgaagaccccttctcagccccaaaacctgaaggaggaatttcgccctactctggcccctttgttgtgggcccataacctgctaacaagccttcaggagaggagctgcctttccacccccttcaaggcaaggagggatggaggtcccttatttccttcagaatgatccccatcccccatagtcgccagactttctcatgttcccaggaagctcagaagtatggcagctaagaacacagctggctggaagaagacagggaccagactgaactgccaccctctgctagtcctcatgcaactcagtccccagaatggctccactgggagtggaggaagagctcagaggcccaggtgcagatagttctgcaatttagtctgtagcctcctcgttccctaccctaaaattctaaggggaagggacccatagaggcttgcctgtttccgctactatattatgcccagtgttcctcctcaccccacgtcctggggtcaggccagaccatgtttcgtcagccttggggactaggccagtgttgggcacctccaggaggaggcctgactggttcattaccctcccctactcagactgagcagcagtcccagataaccaagcaagctcagctctgtgggggcctccttcaaaagaccaacatcgcagacattaggaagctgtaggaagagagatcatgggtttgacctctgcccacatggccatggagtcagcctcagccctgtctgtactgctcgtccagctaaacgagcctggaataaacatgcagtttattcagtctgcatgttagtcacaaagcagagggtctggacaccgtcccccaagggcatttcacagaccagccaatgtttcaagcccaccttagccaggcacagtaaggcctggtgcatccttgggcaccatctacagtagccactgctgggattacaggcatgagccactggacccggcctgcttttcattgttttttactttttgttttgaaataattttagacttagagaaagttgcagaaatagtagaaaattcccatgtatctttcatctagcatctcccaatgattacatcctac

SEQ ID NO: 32289 - DNA, 1800 bp, Homo sapiens
cctgagctggggaagagcccccttacccaccacaccatcttctggaccaacgctcagaaccagtccttctctctccactcccgagaatgtgattcgccctatcctgaaagctcacttccggagggatgagtttctgggacggatcaatgagatcgtctacttcctccccttctgccactcggagctcatccaactcgtcaacaaggaactaaacttctgggccaagagagccaagcaaaggcacaacatcacgctgctctgggaccgcgaggtggcagatgtgctggtcgacggctacaatgtgcactatggcgcccgctccatcaaacatgaggtagaacgccgtgtggtgaaccagctggcagcagcctatgagcaggacctgctgccagggggctgtactttgcgcatcacggtggaggactcagacaagcagctactcaaaagcccagaactgccctcaccccaggctgagaagcgcctccccaagctgcgtctggagatcatcgacaaggacagcaagactcgcagactggacatccgggcaccactgcaccctgagaaggtgtgcaacaccatctagcagccacctgcctgctcctatgtgccctcaccatccaataaaggccccttggctgtggcatggcaactgacttaccttcccctcatgccgctcccatctctacccagtctcaggcctgcttacctcctcacagcccatgaagaccccttctcagccccaaaacctgaaggaggaatttcgccctactctggcccctttgttgtgggcccataacctgctaacaagccttcaggagaggagctgcctttccacccccttcaaggcaaggagggatggaggtcccttatttccttcagaatgatccccatcccccatagtcgccagactttctcatgttcccaggaagctcagaagtatggcagctaagaacacagctggctggaagaagacagggaccagactgaactgccaccctctgctagtcctcatgcaactcagtccccagaatggctccactgggagtggaggaagagctcagaggcccaggtgcagatagttctgcaatttagtctgtagcctcctcgttccctaccctaaaattctaaggggaagggacccatagaggcttgcctgtttccgctactatattatgcccagtgttcctcctcaccccacgtcctggggtcaggccagaccatgtttcgtcagccttggggactaggccagtgttgggcacctccaggaggaggcctgactggttcattaccctcccctactcagactgagcagcagtcccagataaccaagcaagctcagctctgtgggggcctccttcaaaagaccaacatcgcagacattaggaagctgtaggaagagagatcatgggtttgacctctgcccacatggccatggagtcagcctcagccctgtctgtactgctcgtccagctaaacgagcctggaataaacatgcagtttattcagtctgcatgttagtcacaaagcagagggtctggacaccgtcccccaagggcatttcacagaccagccaatgtttcaagcccaccttagccaggcacagtaaggcctggtgcatccttgggcaccatctacagtagccactgctgggattacaggcatgagccactggacccggcctgcttttcattgttttttactttttgttttgaaataattttagacttagagaaagttgcagaaatagtagaaaattcccatgtatctttcatctagcatctcccaatgattacatcctac

SEQ ID NO: 32290 - DNA, 935 bp, Homo sapiens
tgctggtactggtcgcgagttttaggatctggggaaaggcttagggctgtggactacctctcccgtgaggtagtgcgcaactccaccctgttcgcggcgtcttcgaacgcgccgcggcagccatgttggacgtggtcagcacaggggccggcaccacggggttatcgaagcagctgtcaagatgctggggtccctggtgttgaggagaaaagcactggcgccacggctactcctccggctgctcaggtccccaacgctccggggccatggaggtgcttccggccggaatgtgactactgggagtctcggggagccgcagtggctgagggtagccaccggggggcgccctggaacatcgccggccttgttctccggacgtggggcagccaccggggggcgccagggaggacgcttcgataccaaatgcctcgcggctgccacttggggacgccttcctggtcccgaagaaacactcccaggacaggacagctggaacggggtccccagcagggccggactgggcatgtgcgccctggccgcagcgctggtggttcattgctacagcaagagtccgtccaacaaggatgcagccctgttggaagctgcccgtgccaacaatatgcaagaagtcagcagaaacagatgtgctttgcttcattctgctgcagtacaggagtacgggtatggaaactgacccttgctgaccctggaatcacctgttggctactgcgaagggctgccgggctgcgactttccccttttggcagggcatttgcagagcagcaatgttgggaatccactcttccatcccccaggggatgccactaccatattccattgagctgccaggcattgattatttagttctttcaaatacatgtttttctaatagcaattaaacacccatcccaaaaatacagaaagtaattgaactt

SEQ ID NO: 32291 - DNA, 1340 bp, Homo sapiens
tgatcctatgaggaggtagcaggcctgagactgtatagagatgagcggcatgaggggaagataagtcagttgccatgccacagccaaggggcctttagttggaaggtgtgcaacaccatctagcagccacctgcctgctcctatgtgccctcaccatccaataaaggccccttggctgtggcatggcaactgacttaccttcccctcatgccgctcccatctctacccagtctcaggcctgcttacctcctcacagcccatgaagaccccttctcagccccaaaacctgaaggaggaatttcgccctactctggcccctttgttgtgggcccataacctgctaacaagccttcaggagaggagctgcctttccacccccttcaaggcaaggagggatggaggtcccttatttccttcagaatgatccccatcccccatagtcgccagactttctcatgttcccaggaagctcagaagtatggcagctaagaacacagctggctggaagaagacagggaccagactgaactgccaccctctgctagtcctcatgcaactcagtccccagaatggctccactgggagtggaggaagagctcagaggcccaggtgcagatagttctgcaatttagtctgtagcctcctcgttccctaccctaaaattctaaggggaagggacccatagaggcttgcctgtttccgctactatattatgcccagtgttcctcctcaccccacgtcctggggtcaggccagaccatgtttcgtcagccttggggactaggccagtgttgggcacctccaggaggaggcctgactggttcattaccctcccctactcagactgagcagcagtcccagataaccaagcaagctcagctctgtgggggcctccttcaaaagaccaacatcgcagacattaggaagctgtaggaagagagatcatgggtttgacctctgcccacatggccatggagtcagcctcagccctgtctgtactgctcgtccagctaaacgagcctggaataaacatgcagtttattcagtctgcatgttagtcacaaagcagagggtctggacaccgtcccccaagggcatttcacagaccagccaatgtttcaagcccaccttagccaggcacagtaaggcctggtgcatccttgggcaccatctacagtagccactgctgggattacaggcatgagccactggacccggcctgcttttcattgttttttactttttgttttgaaataattttagacttagagaaagttgcagaaatagtagaaaattcccatgtatctttcatctagcatctcccaatgattacatcctac

SEQ ID NO: 32292 - DNA, 619 bp, Homo sapiens
  misc_feature (563)..(563): n is a, c, g, or t
tgttatggatatcttttttaatgaaatgaagaaatgtaaatacattttaaaatatattcattttgaagaaaagtaaatcaaagggacacgggcatcacacagacttgcagagttgagaggcattctggagccatctgagtgtttctctcctccctcgcaccacagtccacactgatcgtgactgactttgtccatgtctgcaccattcgatggggtgcttcttaaggacagagaccaagacttgttccctgttgtaactccggtgtccagcacacacaggatgccctcaggaaacgtggaatggatggatgggtgggtggatgatgtggtgatcagaacaggagaggcctccggcttcatcaggctggacatgtccgagttccaggagcgacacgaggtgagtgatgacagtccttgattgaagcatggtttggagggcttgtcagcatgactgccggggtcttgtcatttgggcctcagataattccagcagccttgggatttgtcgttgggagcacaggtgtgcagcagggtcactgatttgtttcacataggttttgtcntaacgcgggtctccctttttggtatgaggagaaaataattaataatacaataataa

SEQ ID NO: 32293 - DNA, 614 bp, Homo sapiens
cccaaagttccctgaatgtggggaataagcagtttatgattcttctccacaggggatgtccagataagtgacaagatcaccatctcaaagaacttcaaggagaatgtgattcgccctatcctgaaagtaagaggtctttcttggcacttcctgctggagcctaaggttgggggagggtgatcttagccatcctaaagatctggaagccccataatttccccagtcttcccctggtgtctggtaatttccctaacccgctctgggtcactgagctcatcccacccctaacctggcccttcaggctcacttccggagggatgagtttctgggacggatcaatgagatcgtctacttcctccccttctgccactcggagctcatccaactcgtcaacaaggaactaaacttctgggccaagagagtaagagggaactgcccatgggtgggggcgggatagccagccactggaaatctggaacactggactgggggcacccccacacacataaaaggtggagcacagtggtgtggggccagtggccctggcctcaggccagagtggcaagagatggaaagcagtgggccacatgcaggcatgcttctatctgacccat

SEQ ID NO: 32294 - DNA, 988 bp, Homo sapiens
  misc_feature (839)..(839): n is a, c, g, or t
  misc_feature (889)..(889): n is a, c, g, or t
  misc_feature (937)..(937): n is a, c, g, or t
  misc_feature (953)..(953): n is a, c, g, or t
  misc_feature (973)..(973): n is a, c, g, or t
gggcgggggaggaggggcgcgcggcggccgaggaggggcgcgcggcggccgggcggggcgagcggaggcgagtggaggacgcgtagacgcgccgcggtccccgcctgccgctgctccgccgcagtcgccgctccagtctatccggcactaggaacagccccgggcggcgagacggtccccgccatgtctgcggccatgagggagaggttcgaccggttcctgcacgagaagaactgcatgactgaccttctggccaagctcgaggccaaaaccggcgtgaacaggagcttcatcgctcttggtgtcatcggactggtggccttgtacctggtgttcggttatggagcctctctcctctgcaacctgataggatttggctacccagcctacatctcaattaaagctatagagagtcccaacaaagaagatgatacccagtggctgacctactgggtagtgtatggtgtgttcagcattgctgaattcttctctgatatcttcctgtcatggttccccttctactacatgctgaagtgtggcttcctgttgtggtgcatggccccgagcccttctaatggggctgaactgctctaacaagcgcatcatccgtcctttcttcctgaagcacgagtcccagatggacagtgtggtcaaggaccttaaagacaaggccaaagagactgcagatgccatcactaaagaagcgaagaaagctaccgtgaatttactgggtgaagaaaagaagagcacctaaaccagacttggatggaaacttcctgccctctctggtaccttcctactggagcttgatggttatattagggactggggtataattnattttaataatggtggcttggaaacatttttgagaaattaaaaaaatggnaagggggtggaaggttctttgcttactttttactggctatatatatangggggcacttttaacntaatgcaagggggcaggggntcacgttttttggaa

SEQ ID NO: 32295 - DNA, 372 bp, Homo sapiens
cctaggaaatgctccctgataaatttgaagaacataatgctttccatgtggttaggggaggattgaggattacctcacaacaaaagaccagcaagaataaggtatggaagcatggaatgcctgtccatatcaggggactgggaacagtaaaggacaaattgagttaaaggtgtataggagcaactgaacaggatgctccagaggtagattaaggaaataatatttgaggcctacataaataacagtggactttattttatggacagtggaaaatcattgagcatttccaatcgtaggaacaaatacacatttcagaatgacagtaattggaagcagtgtagaaagagattgaaaagaagaaagactaggggc

SEQ ID NO: 32296 - DNA, 965 bp, Homo sapiens
aacctgggaggcggaggttgcagtgagccgagatcgcgtcattgcactccaacctgggcaaaaagagcgaaactctgtctcaaaaaaagaaaaaacgaccccccgtcttttaccttacaaccagccccaagcatctcccagcctaatccagggggaccagcttcccccgcaaaggtgggacctgggagtcgacccctccctatccaggcccctttccacgtttgactgcactgaatgtgccaagaccaggagctggcttttctgggctctggctgacaggagaagctctggggttttccaagtgcattcctggctggaataaggaggtcctgcagagtcccagctgctgctctctgccaggttccgggaggggcatggtgacaggggcttaagcctataactgctggtgatctgacagccaaaagaaaaccctgatgagagattcctgcctggcaaagagttgcccaaggagaagggtgggacagggtgttggctgctttccttcaggaaaaattcttccaccccagctccaagacgccaggattggacagaacaggctggcgagctggcagagtgcctgcccagtacacaaccttggtgctactccaaagaacattgtctatcgagacctgaatcatacccttctcgagtctatgctcagcgctcctccccattcctccccatctcagttgctcacaggtagacctattggagcaaggtagcttttatttctggaaaatccatcgtaaccatcaaacttgataaacagctggcatttgaggaatcattggagtcttcctttcattccccccacaccccccgcagagctccccatccccacccccagtctcttgtcctttttcagaagaggagttgccaaggggaagggaccagtaacattgaatgactgcttgttgtcggaccccactagctctttacataaatgatgtcatcctctcaactat

SEQ ID NO: 32297 - DNA, 714 bp, Homo sapiens
ttgaattttgttttaaatagtagacacccctttatcttctcctagatttacttgttaaccattttgtcacatttgctttctccctgtatccatattcttcagaattttttcctagttttaaactctagcttgtgtgattttaatactgcttctcctgttccctctttttttgaattacctgatatttcttatgtttgttgtgtatgtctcttgaaaatggcagatttctgtattttaatgctttacctaattggatagtttttaagataatagcacttatattgatttgattttcccttctttaccgatttattttacatttttattttctctgtttcttactgttgcttattatcaacttgtgattcattcccttaccccgcctcccagttaatgtggaaattttgttataatgtcttgtttcattaatatagttaatacaggttgagcatccctaatctgaaaatccaaaacttgaaatgcttcaaaatctgaaacttttgagtactgacatgacccacaaagtggaaaattccactcctggtctcatgtgataagttacagtcaaaacttttgtttcatgcacaaaattattaaaaagattgtataaaattatcttagattatgtgtataaagtttatatgaaacataaatgaatttcatgtttagacttgggtcccatccccaagataggataatattccagaatctgga

SEQ ID NO: 32298 - DNA, 408 bp, Homo sapiens
ttgaattttgttttaaatagtagacacccctttatcttctcctagatttacttgttaaccattttgtcacatttgctttctccctgtatccatattcttcagaattttttcctagttttaaactctagcttgtgtgattttaatactgcttctcctgttccctctttttttgaattacctgatatttcttatgtttgttgtgtatgtctcttgaaaatggcagatttctgtattttaatgctttacctaattggatagtttttaagataatagcacttatattgatttgattttcccttctttaccgatttattttacatttttattttctctgtttcttactgttgcttattatcaacttgtgattcattcccatccccaagataggataatattccagaatctgga

SEQ ID NO: 32299 - DNA, 576 bp, Homo sapiens
atgaactatgactctgaaacagaaagtcatttctatgtattctaataaatcattttaatttataattatgatattcttattaacaggatattctgggttatatactctgcttgttttcaactttaaatcactgatttaaaagaacacatttttatcaatgacttaaaaagcactcaagatcatcattatgaacatatatatactcctctgttgcagaggaaatatcctcacaaccaaaatttatgtgtgatctaaattttaaacgcaccctagacaccctaataaagttagggcagggggaaaaaaaaatgaggctaccatcaataggacaggtataaaagtctggaaaccagctcctcatatatgggttgttagttaaatcacaagtctttaccagatattgttagcctagtttcaatgatttttctttaaaaatattctattatttaaacttatcaccaattaagcctactttcactctcacccatccctactcctgttcaaataaagtattactaccagagccatttttaaagtgttcaaactaaatgatattaaaaggaagttaagaaaaaa

SEQ ID NO: 32300 - DNA, 419 bp, Homo sapiens
gccatgttagccaggatggtctcagtctcctgacctcatgatcatctgcctcggcctccgaaagtactgggattacaggcatgagccaccacgcctggcctagtatacttttaatactaaaaatgtaataccaaaaaagtaaggaaaaaagttttattcacccaaagtgatagggatggcctttctaattttaaagcataaaaaccgtggaagaaatcacaaaaaatagttgattgatttgacattaaaaattgtaaaactattctgcatgccaaatacataaacaaaacagaaggccacaatggcaaacaatatctgcaacaaacttgaaaaaaatggcacagtttaaagaattcatgcaaaatctctttgttttaaaaaaaactaggtcggggctgggcacggtggctcacacctgt

SEQ ID NO: 32301 - DNA, 420 bp, Homo sapiens
caagcctggccacaagcaagctctgaggtctcaactgtttcctttgaaaaatggaaacaaagccacctgccctacttacccttagagagttactctgagataatagatgagaaaaatgctttgaaaaggataggccaggtgcggtggctcacacctgtaatcccagcactttgggaggccgaggtgggcagatcgtttgagtccaggtgttcaagaccagcctggaaaacatggtgaaaccttgtctctactaaaaatgtagtttaaaaaatttagcggggcatagtggtacgcacctgtggtcccagctactcgggggctgaggtgggaggatcacttgagcccaggaggtcatagctgcaatgagccgtgatcatgccactgtactctagcctgggcgacagagtgagaccaagtctc

SEQ ID NO: 32302 - DNA, 369 bp, Homo sapiens
aacaatcctcccaccttagcctcctgagtagctgggactacaggtgcatgccaccatgcccagctaattttcgtattttctttgtagagatggggtctcactgtgttgcccaggttggtctcaaactcctggcctcaagtgatcctcccaccttggcctccctaagcactgggattacaggtgtgagccactgtgtccagtcaagaataagttaatgaattttatcctacaacagatatagactctattctggactaaatgggaggccatcattgcctagaacacctgacctcctgaagcagattttaaaaatttgagattttggaaaatgccaaaattagacagcaacttgaaatttagtagacacct

SEQ ID NO: 32303 - DNA, 1266 bp, Homo sapiens
gagctgaaggtaggaaattccaacattctgaagtcttcagcaaatcttagcagatcatctcctcctcacagtcctgtctttagagaacagggtcgatatttcggcttctgcgaactcagatgtcatcttttcttccctaaagtttttaaagttcctattgatatattcccctgcctagagggtttggtggtcgttttcttcctcttaactttattaaggtcatgctattgcagcatatgattcatttttataatctggtcttctctttgcccaattcctgaaaggaaaccaggcgacatcatggaaagaaagaatcaaacagctataactgaattcatcatcttgggattctccaacctaaatgaattgcagtttttactattcaccatcttctttctgacttatttctgtactttgggaggaaatatattaattatcttgacgactgtgactgatccacacctgcatacacctatgtattattttctagggaacttggcctttattgacatctgctacaccaccagcaatgtcccccagatgatggtgcacctcctctcaaagaaaaaaagcatttcttatgtggggtgtgtggttcaactttttgcatttgttttctttgtaggatcagagtgtctcctactggcagcaatggcatatgatcgttacattgcaatctgcaatcctttaaggtattcagttattctgagcaaggttctatgcaatcaattagcagcctcatgctgggctgctggtttccttaactcagtggtgcatacagtgttgacattctgcctgcccttctgtggcaacaatcagattaattacttcttctgtgacatcccccctttgctgatcttgtcttgtggaaacacttctgtcaatgagttggcactgctatccactggggtcttcattggttggactcctttcctttgtatcgtactttcctacatttgcataatctccaccatcttgaggatccagtcctcagagggaagacgaaaagccttttctacatgtgcctcccacctggccattgtctttctcttttatggcagcgccatctttacatatgtacggcccatctcaacttactcattaaagaaagataggttggtttcagtgttgtacagtgttgttacccccatgctaaaccctataatttacacattgaggaataaggacatcaaagaagctgtcaaaactatagggagcaagtggcagccaccaatttcctctttggatagtaaactcacttattga

SEQ ID NO: 32304 - DNA, 449 bp, Homo sapiens
ggccgaagcctggtcagacaaagttttaatgaacgtttttgtcacgtgtgaatagtgagacatgggaaacaagttatacctcctttcaattacaagtagttagcagggcaggttcgcagggtcagcaaacagcaggccagctgatggtggtgctcccaaaataagagagcatcactttaatttttccattcttaatttgaatataaagccactcagtttgtatttggcctgtacaattactgcctcttttagctgttgaggaaattccttctttcaagccaaaggtaatctggaaaactttaactctatcagttgtgagaatgttgttactttatgagaatatttacgatgtgaaaataatggatcacaacttgaggacgtctcagagtggacttcagaattgaggtggagatgcagaggtggcatctggagcacactccatggctctt

SEQ ID NO: 32305 - DNA, 373 bp, Homo sapiens
aaagaaagaaataaaaaaagaaaagtttcataggctgacaggaaaaaaaagtctaaaaaggatattaagggagtgataatgaaaaaaaaaattgaaggccgggtgaggtggctcgtgcctgtaatcccagcagtttgggaggccaaggcaggcagatccacttgagatcaggagttcaagaccagcctggccaaaacatggtgaaaccccgtctctactaaaaatacaaaaattagccatgcccagtggcatgtgcctgtaatcccaactactcggggaggcaggagaatcacttgaacctgagagacagaggctgtagtgagatgtgatcgtaccactgcgccccagcctgggagacagcgcaagactccgt

SEQ ID NO: 32306 - DNA, 314 bp, Homo sapiens
gcatgaaaaggagtgggcccatcactgcaggccttgaaggcggagcggggaggagtgatgaggaacgtgggtcaccttaaggaacagaggctcccagctgacggtaagaaaatggggacctgagtcttacacctaccaggaactggatcctgccaacaacatgagtgagtctggaagcagggggtctttgcagactttcccggtaggaactcagccagccaacatcttggttttcgccatgtgaaaccagccaagctagcccacacttctaacctatggactgtgagataataaattcatgttgttttaagcca

SEQ ID NO: 32307 - DNA, 447 bp, Homo sapiens
catttagggtaaaataccaaaggtaccagaagaagacacagctctgactgcaagtattatcagagcctttcccaccctccccaaggaaccccatcctgttgcagttgctagaatggtgaggccagtgtgtcacccaaggagagatattggggctgcttagtcaagtggatgtcagccagctgtgtcatgtgggacagctctgtactttctgcagacattagggctagtgctcagactgccctctatttatatcccttagtaattctgaggcatgggatacaattgctcctctaagaactcttgaggcaaataaagaggtagttaacatcaatggaccaactggggtaggaccttcaagtgttcaggcaaaactttgttaactgggctgctacccatgccatattggtgtgtcccaggaaggctgagggaagacagcaaagatataac

SEQ ID NO: 32308 - DNA, 362 bp, Homo sapiens
gctggggcttctcccaccccaacatgcaacagagaggggacgcttgctcattgtctagctagtcaatgtttgtttacagggagattgagggacagtgatgatacatcatgttaggcctgtctggacccagtgagaactttcatagtacagaagatccagaaacacatggtgacatgtgaaggtcacttcaacctttaggtccatccagctcagctctgcaatcatatgattttattgagattgaggaagagttgctaaaattccaaaaagaggattgcttgaacccagaagactgaggctgcagtgagccaagatcgtgccactgcacactagcctaggtgacaaaagtgagaccctgacta

SEQ ID NO: 32309 - DNA, 409 bp, Homo sapiens
gctgtggcttgatctcggctcactgtactctccgcctcctgggttcacaaaattctcatacctcagcctcccgagtagctgggactacaggcacggcttactcagggcactcaaatagatcttcctttcctttccctttccctctttccctttccctttccttttccttttcccttcccctcctttcctttccttttttttttttttttttaaaaaagatactgtcaccgaggctggagtgcagtggcatgaatatgactcattgcaacctccacttccctcatttaagtgattctcctgcctcagcctcctgtgccttagctgggattatgggcatgtgtcaccatgcccagctaatttttgtatttttggtagagatgaagtttcaccatgttgccaggctggactt

SEQ ID NO: 32310 - DNA, 544 bp, Homo sapiens
cttttctatgtgttactttttatattttgaagcccctgtccttggttggttttatctcacggatctgccatctaatttctttttaaatctcttcactttaatctatttctttgatatttgctctgtattactttccttccatttttctttcagaccgctgatttgatgctttgcagtaactctttttcaccttcattgagtgtttacctttgcgcactttgtttttctttggtttctagtaaatccagcaagtaagggctctaattgtacttccttgggcatttatttaaaaaaaaaaaaatgaaagtactttatgtctttcagtagtgttgcctcaggaaagaaaccatacttgttctgattattcacaagggctttcttttagcttcctcacctcttttaaatcagttctaagttttttagggggacgagcagagctattggagttgcttggaaaatggcaatcatttagatggtaacagataccatagttgacagtgtactatgtcattagcaagcaaactggtaaaatctgggggaacat

SEQ ID NO: 32311 - DNA, 523 bp, Homo sapiens
aatgaggattgcactttcacaatgaaatgagggaggacaggggccgatctctcagatatttgactgataaaccagtaccttttctagtatatgcgaccataggggaaattctctctaggctagataaacggaggagtttatttagtgttttagcaagctttatcgcctccataggtacaaattatttgcattttctagagcaagggataagacgcgccctggaatctttcctttttgatgtggattttccaattaggaaaggctgcccgtgaatagtcttttctgcttgagtgatggccaacacactggcaggtttgcaagctttctcttcatgagggtccgtccacagagctaggtgacaaacgctcagtccaggatctctgcaggttcctacacgggagccggagagcctgcgcgtcggagcctctttgttgctggggcgctggggtccagctgcgcgtgcgcagtaggccggcaccgacaagtgcgctgcaccagtggcaccggctgggggcgagccgac

SEQ ID NO: 32312 - DNA, 329 bp, Homo sapiens
gttactttccttataggactaaaacagagaggacttccttactacactgactgaggttgactgaaatctcctgttttttggaaaactggtccatttcaaagttcagtttgattatatgtcacttagcacaagcgacttcattctggtttggtctgattttctggggcctagagcaggaggctagtccataacaatggcctctcataaactttgtttaacaaaacctttcagaaatgagggtgggccggcacagtgggaggcccaggcggaggactgcttaaggtcagagttcaagacaagcctggccaacacagtgagaccttgtctct

SEQ ID NO: 32313 - DNA, 387 bp, Homo sapiens
tctgcctccaaagaaaaaaagaagtaaaaactaaaaggcagaaatgaaacccacaggcagacatcccggcgtcaaaccctgggcctagttgttaaagacagacccctgaactaattggttatgctatctatagattacagacattgtatggaaaaggactgtgaaaaaccatgtactgttctgttccattctaattaccggtgcaggtgcatgcagccactagtcatgtaccccctgcttgatcaatcgatcgcaaccctctcacactgacccccttagagttgtaagcccttaaaagggacagaaattgctcgctcagggagctctgtttttggagatgtgagtctgcctatgctcccagctgaataaagccctttccttctacaa

SEQ ID NO: 32314 - DNA, 496 bp, Homo sapiens
aggtatatccaggaaagttggctggagaaccatggtcagtatccgtccttggagtttgtggctctgttgtatgccttgcatacctgtgaccaggtatccttgtttggttttggggaagacaattgcaaaaggtggtcccattactgggatgacaaatattggtttgagaacaccatgcaaaatttcccagcagaataccagatcatcttgaaactgcagtgtgagaggaagattgctgtctacggctgagatgtttccagtggagtccccaggaggcttgacaggtagccaaggggaccttgtggtgtcagagagggactagggcttcaagcagaccctggatggagattactctgctactgaataaaaccctagcttatttctctctctggatttctggtggcattaaagggctacattctattactgattctgtcttatcaccatgtgactctcttatgctgtatcttaccaaaaaataaaattaaatgagaaa

SEQ ID NO: 32315 - DNA, 509 bp, Homo sapiens
tgggctctggggtcactatgagtatttagagtctgtcttccttgaagaaggtgaactccattctcctcccagctccaagaggaagcctggcacactagtggttgagtgagtggtgctgaaggcatgataggtgttccatgggggcagggcaggatccagcccgttacaccaccaccatcttttgtcttatccaatctctcaggtatccttgtttggttttggggaagacaattgcaaaaggtggtcccattactgggatgacaaatattggtttgagaacaccatgcaaaatttcccagcagaataccagatcatcttgaaactgcagtgtgagaggaagattgctgtctacggctgagatgtttccagtggagtccccaggaggcttgacaggtagccaaggggaccttgtggtgtcagagagggactagggcttcaagcagaccctggatggagattactctgctactgaataaaaccctagcttatttctctctctggatttctgg

SEQ ID NO: 32316 - DNA, 508 bp, Homo sapiens
ctatgtagtatgccatggtatatatgtagcacatttcctatatgtttttaagaatgattggaaccccagtcattcttaaatgagagttcttgtttgtgtgggtaatagtcatcaatattgaccatattagaaattaaaatagtattaaaatatttctatagttaattagcaataaaaacccattacatttttgcaaatatcttaatgtctggcttgataaaagataggctctcgaatctcgcgttcattcctgtgatatcacaggccttgcagcccacggaggcctctgctgtgcactctgtgagaatgagagtgagcaaggctggtggcggcttaggacgctcgggaaggtagttctgtgggactcctgaaaggcctcaggacccaggatcccagatgcacacgggagagtatgtatctggacagcgttatcttaatgcctctgcagaatcgtcctctggtattttggcatcagcatgctttttgattgcctgtctcaaaaaaaaaa

SEQ ID NO: 32317 - DNA, 649 bp, Homo sapiens
gcataatcctgtaacttttgcaatctatgatacatgtaagactctcagcttaaaaaaaatcaacatggaaatctccaactatttagaactaataaagtatgagtgcactgagagattcagccaaagtaacattgaaaggaaaatttatagccttagctatgtgcactacaaaattgaaaaagggctgggcatggtggctcatgcctgtaatcccagcactttgagaggctgaagcgggcagatcacaaggtcaggagatcgagaccctcctggctaacacagtgaaatcccgtctctactaaaactacaaaaaaattagccaggcatggtggcgggcacctgtagtcccagctactcgggaggctgaggccggagaatggcatgaacccaggaggcagagcttgcagtgagctgagattgggctactgcactccagcctgggtgacagagcaagacaccgtctcaaaaaaaaaaaaaaggaaagtgaaaaagaacaaataacgttttatttcaagaaactagtgggggaaactcaagtaggttaagattttaagagataaaaaagatttttgataatgacattagaagtaaatgttaaacgtcttctaaagagggttgatgatggcctacatgtctatggaacacagtt

SEQ ID NO: 32318 - DNA, 480 bp, Homo sapiens
gaaagtaaccagcaatggatatgtacaggggttcaaagaacctacttttcttatagacttctaaccagtattcatgtatttagtcatacatataaccctacattcagagacatctggtacctctattttctgagactgttgaggttcggttgcaaaacgcagcttgcttctaatttgtttcctgtctcaacttaaattttaacttccttcactgttgacactcatctatctgctttgtagcttgcaaaattattattaatataaaattagtattgtctcatctaccaaatctgttgtccctataggtataaatcttcttactcatttcttccaatttagtagtgtcaggaaaaaaaagagaatgcatttgattaactaaaaccttccaaattcacattacaaagggtactctagaaggtattatgtatttatttcctaatgcttacacctcttttgctacacaaagatagtacacatact

SEQ ID NO: 32319 - DNA, 425 bp, Homo sapiens
gccatgaaaatccaggcaagactgtggaagttccagagtggagaagcatagtggaatggggtcctttttgcttgagcccaggaggtggaggctgcagtgagccaggatcgtgcccctgcactccagcctgtgagacagagtgagactctgtctcaaaaacaaaaacaagacaaaaaaccctggcttttggattcagcaagacctgagatggattcctggttctgccacttaatttaaccctgagaaatgtaatctctgttactttatctatgaaacggagacaacaaatatagctatctcacagggacgttttaaatcgcaaataacatgttatgcttggcacagtggaggggaagtacaaagggctcaataaatgtttggccttgaggtgtaaagtgtttatgtctgtagcagtctaagactaa

SEQ ID NO: 32320 - DNA, 323 bp, Homo sapiens
aaacattatcctaggtgtttttgtgagggtatggtttatactaatatttaaatcagtagtctttgagtaaagccgatttcccaccatactgtgggtgagccttgtctaatcagttgaaggccttgctagagaaaagattgtcctctgttaggaaaagggaattctgccagcagaactctacctttggacttgaatggcaagtcttccctgggcctccagcctgccagccttccctgaagattttggacttgccaagtctccataatcatttgagctaattccttaaaataaatattaatctctcttcccccagggaacacaca

SEQ ID NO: 32321 - DNA, 207 bp, Homo sapiens
ataagcccaggtacacaagcactttccaagtctgttacattcacatttgctaatgccctctctattgaccaaagcaattcacttgattaggcccagagccagtgtacaaggaaacaccaggggcatggaaggtacagaggagagggcgggatgatcacagctgtttttgcaaacaatctttgacataaacagtgatatcaatgccat

SEQ ID NO: 32322 - DNA, 403 bp, Homo sapiens
accttgtctcactccctaaaagctaccactgcatgattttagggttctgggaagacagtcgcttccaaaaagagaatctgtggcatctggttttgatgctaggaattctttctttgttatgagataaatgtgtcaactacccctgaactatgtcacctttaagttctataatgtctattttaaatatttttgccagaactgtttccatctgagggaggagggaaaaggataaaggcatgttgagctctaggagctgggagcccacagaaaggaaaacagagcagggagatccaaggtccccagagacatggtgttcttcccatgttgggtgaccatcagtgtaccccaaaggttccaaaccccgaaggcactgatagacctggggggatgaggaggtatgaac

SEQ ID NO: 32323 - DNA, 488 bp, Homo sapiens
ttagtgttgattgtggtttggaggaaaggggtgttgtcatgtattagtggaagagcacactgttcaaattttggagcagcataaattggcagtactataaaaattaaaaatctacacacccaacaatctagtaattccacttaattggtatacagaaatacttgcacaaattcacaataatttatgtaccaggatatttatcagcagttttatttataataatggaaaactgagggcaatctaactataagtcaatacataatccatactctgaaatacaagtcattaaagttattaagtaatgtctgaagatattaacatagaaggatgagctcaatatattaatgaatgcaaaaaaatgtagaatggtatacagtacatatagcatagtaagctcaactaatggattcatggtacttgtttccattattttattgttgtagtaggagcagaaaagtagtaaaagtattttaacccaaagaaaaaaa

SEQ ID NO: 32324 - DNA, 400 bp, Homo sapiens
gtgacaatggaaatgtttggattctgtgctatccaatatggtagccatgagccacatttgaacacttgaaatacgggtagtgcgaagaactaagtttaacttttattccattttaactaaatttaaatagccacatgtggctagcaggtaccatattggaccacatagctataaaccatttgtgcatggggagagaatgactagcatctcctcccagccagagccccagctagcgtggttctatgctgttggggtaaacatgatcttgcattttctagttaccttctccccatcccactctccatactagcaggtattctgggtcagaccgatttggtctgaagctacttagacttaaaaaaaggagtattctatgtactcccatccagcttagagctct

SEQ ID NO: 32325 - DNA, 245 bp, Homo sapiens
ttgcccagtttggtaagggctgcgaaggcctctgctttacggggtctcaataagacatatgaccccagggccagaggcttatcagaaccaagtcaggtcaggcacagtggctcacacctataatctcagcagtttgggaaaatgaagcaggaggatcacttcaggccaggagttagaggttgcagtgagctgtgatcgcaccactgcactccagtctgcatgggcagagcaagatcctgtctcaa

SEQ ID NO: 32326 - DNA, 205 bp, Homo sapiens
cttggatgttcaaggaagaggtgagagtaggggattcaaagacaagcatggcaggtgatggtggcaaacagacaccaaaagaaagatcatagagggccttgagggccaaggtaaggtctttggaggtttgtctgaatttgatgggagcattctgcaaggtttggaggtttggagcaaataggtgatagaatccaacttacaaatt

SEQ ID NO: 32327 - DNA, 205 bp, Homo sapiens
aaaactgaattatagtctgttgtatggatttccactgattattcactgcttccctgctggtggatatttcctttaaaagtacttgtgtagaaaagtgtgtaacttttgacataacatttaaatgtattttgatattgccaaattgctctccaaaaaaattagttcctaccaatggtaagaaagaggaggaggatcttttgatgtt

SEQ ID NO: 32328 - DNA, 575 bp, Homo sapiens
agagggacagggactttgtctattcattattatatttctatgacttgaaaggacctacatgtcataggaggaactctaaatatttgttgaataaattactaaatgaaagaaaataggttaagaagtgacttaattcctcccctcaatgttatttcctttctcagaagtagctacagtctggaatctctttctccagaccctcttctgttcacttacatatatattatatattgtacataatcacatattcattttttctacataaatggaatcatattatgtatacttgtctgaaatacacttttttctctttcatatattttagagagccatccaagttggtgcatatagatcctcaactcattctttttaactgctatatagcattccatattgtgaccatttcataatttattgaatgattctctattgattgatactttggtggtttcttattttttgctaattaaatgtttctgtaatgaacatccttattcatatatccttgtacatatgtgagcatttctgtagcacagatttagggttctttctatagatataatatgtataaagag

SEQ ID NO: 32329 - DNA, 454 bp, Homo sapiens
tggtcgcgaactgttgagctcaagccatctgtctgccttggccacccaaagtgctaagattacaggtgtgctacggtgatttttatttttattttttttaaattgttttttgagacagaatctcactctgtcactctggctggaatgcagtggtgcgatctcggcatactgtaacctccacctcctaggttcaagcgattctcctgcctcatcctcctgagtagctgggattgcaagtgtgtaccaccatgcctggctaatttttgtatttttagtagagacagagtttcaccgtattgacgatgctggtctcaaactcctgacctcaggtgacctgcctgcgttggcctcccaaagtgctgggattacaggcgtgagccacctcgcccagcccagttattttaatgactccatttaaatggatataaaaataaactatttttgtgctttctga

SEQ ID NO: 32330 - DNA, 743 bp, Homo sapiens
gtgtgtataagtgtatgtgtgtatatactgcgctccagcctcagcgacagagtgagactgtatctcaagaaaaaaggttttgaaaaaggaaaaggaggtgttgcttcagccacatcttaaaggaggtaacacttgaccagaaggaaaagggatctggatgttcttggtacagaaaccacaagttcatatgaacagaagtgtcaacagctgaaaaagtaaggggacaagtagtcccatgggactgcagccaaatgtacaaggttagcgaccagataagactctggacgggtcagcaggaggggccaggtgatggatgccagaccactgggtcctgggtacttaccacattgtgcttcctagtccccaagatgtggtcctcaaaaaaacgaaaagtcacggtcaaatgaatttgggagatgccaagttaaagctctcccaagcagggaaatatagaggaccaaaccccttttgtaggaaaaccctagaaaacctcacttggggaattctgctataagcagtgaaacaccatggaaggattctgagctgttgacaacagattttcatttagaaattcattctgcaaaatacaaaaattagccaggcaaggtggtacatgcctgtagtcccagctacttgggaggctgaagtcaggggatcacttgagcctgggaggtcaaggctacagtgagccatgtttgtgtcactgcactccagcctgggtgacaaagtgagaccctgtctca

SEQ ID NO: 32331 - DNA, 144 bp, Homo sapiens
tacctatacatacttcccaaccctaacctcatatgtccattaaaatattgggcatcatggtcctgtaacctctccccattgccagtatcaattaagattcctcttcttctcacagcaaataaaatcccatttgtatgatttaag

SEQ ID NO: 32332 - DNA, 435 bp, Homo sapiens
gaagtgcaggtatgatttaatcaaaagagctaaattgctcatttatcacccaccctgaggtcatttaggtaatgcagacaaaggtgttctctcataattaatgtgctctccctgtgtgtttctgtggcttaaatgtaatagtccccgtcattggagcttgtttaaaattgctgagatgttcaagtgggtgttgggacgccatgccataatgcagtgaaagtcatatgttaaccaggcctcacactgctgaaagggtcttggccctgggtggagtgaggaggagctggcatgtgtataatgaccgtggttctgcttccagaacatctggacttcctgaactttgctggaaatgttgctggaaattcaagccttaaaaggtgctttctgcctgccccccaaattatcagcctattccaggagagcgtatgggaggat

SEQ ID NO: 32333 - DNA, 4838 bp, Homo sapiens
  misc_feature (686)..(686): n is a, c, g, or t
  misc_feature (4263)..(4264): n is a, c, g, or t
gtctggagctcttagagacaagataaacagcgatgtctggttctgctcagaggaggctttcttaagtgagaggcacagttggatcagcagactcagctgagtgtgacctgctctgttccctccctgctgacctgggacagtcgctaccaggcagtgctggcctctgggcgggtgccgaggagggtcatccctgagcactcaccaggtgagatgtctagggtcagagaggcagcgactggtccagagacccagatgtgaccctgggccatgctcttagccctgccctgtgctacgctggactcaagccctgacctctgtggcctccctgccctggattccaaatccatccggggttccagcccctgatggggcagagtctggccctggaagagccactgggacagagatcctatgggtgaggtggagggggtggtcctcagtccaagtctgtgccctaagctgggaccccgcgggaggtctcaccaactcagacttcacatgtggtcactgagggtcattgtgggacccactggacacagggggtcccttgtctgggagtggggtgaagagccttctgcccttgggcagttaggtaggggactttgagcactgctgctttgggacctgggaagtggggacctgggcagcggggtcctcgtcattgagaacatggtcagtgagagatntggtcatcatgggttgggtcaggggggcctggtcagcagagacttggacactggggcttagtgaaaatatgatcagtggggaaatagtcacggggcctgctcagtagggcctggctagcagaggcctggccagctggccactggatgacctgacagggggtttgtccttggagcctctttgcctctattcatagtggggatgagtcatagcatccctcagcactcgccaggtgcaggttttgtgctgaccttgtagatggccttttccttcatccccacagcaactccatggggcggatcctgtccccgaatgtagccattccacaggtgagatgtctagagtcagagaggtgatgactggcccagagacccagatgtggcctgggccgtgcactcagccctgccctgtgcagtgctagactcaagccctgacctttgcagcctccctgccttagatcccacatttccctggggttctggaccctgatggggtggagggggtgattctcagtccaagtctgtgcccaaagcttggtccccacaggaggaggtctcatcaactcagacttcaggtgcggtcactgatggttgctgtgggacccactggacacatggagtccttcgtctgggagtggggtggggaggcctctgccctcgggcagttgtggaaaatgaaggagctctagagggctgcctggagggtgatgatcgtccctcttggtcaaaggggcttggggactggaaccttctctgtctgattctctagaggtcttgtcttccctttgtcccaagtattcccaaggaagatggtccccctgggtgttctccaggaccaagtccccagaattctcttgttttttccttggtgatccaggaaaacgaagccccctcctgtattgacagctgggaattgtggagtccaccgtcctccacctgagacgagcacagggtctccacgaggacagaggctgctttggactcaatagaaaactgggcatcttcatggtcctagaaggatcccaggaggctgatcctatagagacgtctggttcctgaccccaactgcctccaggtgcctggaacagcccatcgtgggccctttaccctcagcaggtggacgccgttggtcctgccagggatggagatggatgagcacccggatatcctgcccacccaggggcaaggcaacatcatcattactaagtatgagcagggacgctgagctggggcagcagtggacacagagcatgagcgtgttgacatctggaaattcaccagtcgtctctgggttgtgtgtgagacagagctgcccgtgtcagtgccctggaggtgaagggaagagcctgtgcctgctgcgtgggagactggtccagggacagggaatcaggagtggttgggccccaaagcccaggacccagcatccatgggccgctgccggaggcctggcagctccgctaactccatcatggctcatttgacagcaaaggtgtcaggaaataaaatgtactgacaagtggctgaagatgcttggagactggccaaaatataagaacagcaagaaggtgacatggcggttgggcctggtagctcaggcctgtaaccccagcacttcgggaggctgaggtgggcggatcacctgaggtcaggagttcgagaccatcctggccaacatggcgaaaccccgtctctactaaacatgcaaaaattagctgggcacggtggcgggcacctgtaatcccagctactcaggaggctgaggcacgagaattgcttgaacccaggcagtggaggttgcagtgagccaagatcgcaccactgaactccagcctgggcgacaagagggagacttcatctcaaaaggaaaagaagctgtctcgaagcaggtacaaaggcattcccctggtgtgaggccaggcgtgggcacttctgctagacattgacaaagtcaagtcccagaacccaggaaatacaaggaggtgggctaccacagggacctgagccgcaacactgccgtcctcctttatctgccggaggaagatgctttctgggtggctggctcagctgctggccggtgagaggcactccctgcaggcccaaatactgcccagctccggaagctcctatcacatcaggagcaggtgctgcacaagtccttcccaaagatcatgagacagctgggcaaggaagggctatgcattgagggttccatgctgacgaggctcctccagtgtttccttgatgggccacctcactgctgagatgagtcccccatgaggagctgcaggaccttgtctgaccgcagcctcatggaggggtctcatcccatggaaaggggtcctcagcactccagaggactgaaaccccaatgggtcctgctcaggccaccagccccagcctggaaaggccaggtcctcccacacctgctgtccccaaagaaatccttcgggctcaccctgcgactgtgggatgtgcttatcttggagggcgagcaggtactgacagccatggcgcatgcatcattcaaaatacacagggagcacctcatgaagctttcctggagcaccgtctgggagtttcaggagcgactctctcagagctgggccctggaggacaactcggtcctcaggaaccttcaaacctctatgaaggaactcacaaaaaaacactgggacctgccatccccaggagaactcgagagagggtcctcgagggtgtctcctggcattaggcccctctgtgagggggacagattggccctgcccagcccaccagctcagctccaggggctcatgccatcagccccccaggacaaaagccttgtcctcccccagcctggcctgacagggttgtctccatggcggaggccaaggcccagcagcacgaaggggcttccccagaacccagggcagcaggctgctctctgggtggcccagaggatcaagatgtggccaccctgtttcccggtgaggtcaggcctcgtattacataaaaatacctgtgctgggactctatgccacacctccacacagacctggatgctgggatccatggtttccttactacaattttgaacagggctactgggcccctgtcacttcaacatgttacctggacagccctgcaaccacacgacgggcctggcccagcaagcccactgggaccccgacaccaggccctgcccaggcttatgacagaggaggcaggtcaggagacaccccagcaacaaggcagcacctgcctgcgatgcccctcagtagaagaacgtggcatggaaggagcccaggtggcacacgcccagctgcgtcgcagccccagatggctgctggaccttggttctgggccttggaaaatcccattcagcggggcttggtcccatcaaggcctctggagggaaggctaagcatagggttcctgcagccccagccagccagccagccagcagcatgccctggggcctctgaccccacctgtgagtcccaggcccagaggtccctggcttcaactcgagtcctaggaagagagaggcaccagaggcaccacaggctcccagggtgaccacagaggggaccagggcacnntgagccctgatgctgtaaggattcacatcagagaacctgggcaagacgggagaccgtgcagtaatgaggatgtggagggctggctcaatgcggccaacagctgtgaacactgctgcctcttcccagcctcatcactgcagtgcaggcagtctgatctctggagcccagcccaaaagtgtcctgagtgccccggcttcacatgccaatatgccacctggaggcttcaaggccctgcctgctgcacgcccgcctcaccattgctgagcaccccatctgatgatgagagacttgctgtggattcctgggccggcaccatttcccaggaggaccagcgggctgcctgtgggcaggccgcccacactgtggagggggctgagatcagccttcactgtaggaagcccctacctggacacagacttgccggctctacctatcgccatcatggcagcctacatggcattacttgtgaccagggtgccccatccaggtcggtctgccctggctgctgttttccctcctgccaccctctctttgactgcttgtgtcaataaaaggagaactggccagttttcag

SEQ ID NO: 32334 - DNA, 557 bp, Homo sapiens
ccaggccagaaggagatttcttttctttctttatttttatttttatttttattttttgagatggagctttgctctgtcacccaggctggagtgcagtggcaccatctcagctcactgcaaacttctacctcccaggttcaagcgattctcctgcctcagcctcctgagtagctgggactacaggcatgcaccacaatgccaggctaatttttgtatttttaatagagacagggtgtcactgatacacacaggagacagggaaatactggatagaagagggcagttccctggcaaaggcccaccctcaagcctggaaacctgcggccctaaatgaggacaggcattcctgttttcgcccccaaaagttgccttttgacctgccatgctcccctatcctgtacccgtataaaccccaaaccccaggctccacaagcagatgagatgaacagaagagcagaatggcagaatggcctggcggagagaagaggagtgtgtgaacacggagaagagttcggctggggacagttggagaggagattggccactgaatggccaaa

SEQ ID NO: 32335 - DNA, 367 bp, Homo sapiens
cacatatagatttttctgcaggaagcaaagggctttcaggcttacttgatgagtagatttctgcatcacctccgtggtaaagggttagctgcttttaagaggcaaaaatgcccagactgaaataaagaaggaaaaaaaataataatacattccagaccaccttgtaaaaaataggtaggcgttctcaatcttggcctttcactccagtcccacttgaggtcactctctttccagaggctctatggaacaacaagggtggtgagaacgctgaattaggaggcaaaagcccatgctagtgttctgtcccctaatgtgacccacggttagtggggattcctgtttcagaaccttcaacctgctcttcctc

SEQ ID NO: 32336 - DNA, 231 bp, Homo sapiens
agatactgttattattctccttattttttttcttaccaacttctgtcattcctgttcggtaaagtgcccttgtgtgatttaatgtctggcagtggcctgtggaaacctttcgagtcaaactatcatcttttcttccttggcaatctcctattcttcaggttttaagcaatgactagtttttacattttcagcaccttatatatttaatagtggattaaaaatcctgatgtg

SEQ ID NO: 32337 - DNA, 444 bp, Homo sapiens
gggatttttagtacgttcatagaattgtgcatcatccatcaccacaggccactttagaacattttcatcatcttaaaaacaaaagacttgttggtggctccttcctgtagttccagctgcttgggaggctggaggtgggaggactgtttgagcccaggagttcaagtccagtctgggcaacatagtgagaccttgtcttgagcaagaggaagaggaaaggagaggaaaggataaaaggcagaagagaggagaggaagggagagagagagagaaagagaaagaaggaaggaaggaaacaaagaaagaaacaaggaaggaaggaaagaaagaaagaaacaaggaaggaaggaaagaaaaagagaaagataaaaagaaaaaaaggaaggaaggaagaaagagagagagaacacccactgactgtcattctaggcaaccactaatttg

SEQ ID NO: 32338 - DNA, 362 bp, Homo sapiens
gacagatgaaacccacgaatcttttgtttccctgcaaaccctataaaacagtacaaaaagaggcatatactcacaagatggagattacaagaatggaggcagtgacagtcatatttaattgtttggttaaaaaaatacataatttaggctaagtgtggtggctcacacctgtaatcccagcactttgggagtccaaagtggaaggattgcttgagcccaggagtttgagaccagcctggacaacatagtgagactccatttctctaaaaaaaaatttaaaaattagctgggtgtggtggcacatgcctgtggttcctattactctggtggagactaaagcaggaggatggctggagctcaga

SEQ ID NO: 32339 - DNA, 325 bp, Homo sapiens
aaggcagcagcttaggagcagcgtattacaaaggaaatatgaatagtagaaaatagacttcaatatgttaaatatgaagattataattattgaaaatgtatacttttagccctctatttctaagaaaatacctaaagaaacatgtactgttctaatgatacagaatttgttcagaatttttaaatatcaaaacatttttgtaataaccttccagcatagcaacctttctgcagatagcgatcataaactcgggacggaattaaacaaaacagaacaaaacacatactgtaaaactctagaattaaacaatgataggcagattctg

SEQ ID NO: 32340 - DNA, 438 bp, Homo sapiens
ttttttttttttttttgagatgaagtcttgctctgtcgcccaggctggagtgcagcggtgcgatcccggctcactgcaacctccacctcctgggttcgagcgattctcctgcctcagcctcccgagtagctggaactacaggcgcacgccaccatgccaggctaatttttgtacttttagtagaaacggggtttcgccatgttggccaggatggtctcgatctcttgacctcgtgatctgcccgcctcagcctcccaaagtgctgggattacaggcgtgaaccaccacgcccgaccccactttcttccctctctttaccattccaggtaccaccactcaactcctcctcctagtactcccttctcaaaattttcccactgcttcctgataatgccggacttctaaagctagagaaaatcctctacagtctagtctatc

SEQ ID NO: 32341 - DNA, 464 bp, Homo sapiens
accaggagggattgtgccctgttcttgctaactgggtgctcgtaactggagacggggtgtacctgttagcggtggttagacgaggtggatacagaatccagaatggtcacattgcagccatagggaacagatagatgcagagaagaggcttcagccctctgagttagggcagtgcatggccttgctctgctgaaatagcccagaggtcccatttgcttggtgacatctctcacttgaatagaaagctggctgtttatcagacactgttttcttaaatggcagctcctccacatctgcgtcatctccattatctcccctatccatctctttttggaaggaatccacgaagccctcatgactgtttgtttgtttttgtttttttgttgtcgttgttgttttttggagataggttcgtcctctgcattccagccggagtgatagagccagaccttatatcaaaaaaa

SEQ ID NO: 32342 - DNA, 469 bp, Homo sapiens
tttttttgagatggagtctcattctgtcccccagcctgtagtgcagtagcacaatcttggttaactgcaactctgtccataggcatcagttttaggccaaaacatatggtaatacataaactgatcatatgctgtctgcatcactcagcagagaaaggcagcatctcaaaggatttcctcaaatcctttatctaagaaaggcatggaaaccatttcaccagaaatcatttcctccatggtagtgtgcaaagatagtccactcaggtgcataataaaccctcaggaaataatgaaaacagcggactctgttgcaggtggagatgaaaatagtggttggtcttaaccatctatgcaatgcaatcattaagatatttaaatataagaaacccatttcatgggtctctaaaattatgcttctatttcaacaatccagggtagaaattgtgaaaagcggtctctctgtgggtgc

SEQ ID NO: 32343 - DNA, 292 bp, Homo sapiens
agtcccaagacactgagatccgggtattcttcctgaggctgtttcctcttcctgtcttcagggagtggaggcctcaggatgaagctaagctccttggagagttctagtcagtgacctttgattctgtgcctggggctgggaaatgcttaggggactgtcacaaacccatatggttcctttgtgcggagttggaaaatgttccatcagtttgaaattgttgggctaggcactgtggcccatacctataatcagggactttgggaggctgaggtgggaggattgcttgagtcca

SEQ ID NO: 32344 - DNA, 758 bp, Homo sapiens
aacgtgagctcactttaggaaggatacgaacttggcattaaatatgacggaagcacctactgagaaagcaactccctcttcacttccccttcgaacaggcttagtttgatactgagatgtctttagcatctctcatatttcttgattctctttttaacaaggactgagctttgcaaccatatgcaaccaattgagctttgcaatccagactcatgcttgcaaccatatgtcaggtatacttaggtggacacctataaaattgttgtaactcaaaaatggctgagtaatggcacttgtgcgtggctctgctaataaggcactgatctctaggaaacgtcagcgtgcagatgtggcctttttttcctcacccaattctactaactgtcttgtttctatacctccctccttcctacctccttacccagcttaatttccatggagtactgttgctaatacaacccagtctcccaggcccttcctgttttcctagcatgtccatttggcaaaacctcaccttggatgaaccccagctttccgcttttgatttacctgcacctgagcctcagtgcttaactggagaatgttacacaagaacacaaactcctctcatcacacacgcaaatctgggtcactaacctcagaagcagatattctcttctgccggatcgtcttcccaatatgtttttcttttattaatactttttgtccccagagacctgtgttctttttttattctacttttttgagacagagtcttt

SEQ ID NO: 32345 - DNA, 353 bp, Homo sapiens
cctcttttccccgtatttctggaataaggtagaaaaccctcctagttcctggaaattggcaattgacagtgttagtggttcctggagtagccccttcctgtggatcctactcctgtttttggctggatgggttcaactccattaggaagagagcagggtatgtgaggtggcctcactgacatcagcaataggaagaagacaaaaggaggagataggtaaatcataagcaacacaagaatcctgcaacgtgaggacattgaatgtagaggaaaatgactcagttggtgctatgcaaatgagaaccaaggttatttaatgacaaccaatgctcattgggatgatcctggtccact

SEQ ID NO: 32346 - DNA, 356 bp, Homo sapiens
tttttttttgtgagacagagttttactcttgtcattcaggctagagtgcagtggcgcaatctcggctcactgcaacctccacctcctgggttcaagccattctcctgcttcagcctcccaagtagctgggattacaggcgtgagccaccacgcctggctgatttttgtatttttggtagagatagaatgtcaccatgttggcaggctggtctcgaactcccgacctcaggtgatccgcctacctcagcctcccaaaatgccggggttacaggcgtgagccaccatgcccaaccttttgtcatttgtagccattcctaattcttgtatttcagttatctgttgtaaatgttgtctgc

SEQ ID NO: 32347 - DNA, 178 bp, Homo sapiens
ttttttccttttgtcatttcgagaagacaatgagtatacctgcatttaaaattgggaagggaacaaaatttcattttcaaaactagcatcctggatttcttcttccttatttcttttcgacatgttatactggggatgaggcgaggaaactctttccagagagaagtcattccatact

SEQ ID NO: 32348 - DNA, 795 bp, Homo sapiens
cacacaacatggccttcagcaatgctgattcaggctttgtggatgcccagctggtgctgacccacaaggacctcctgtctggcagtatcatggccacggatgagcccatgcagcccatcttctgcttcatccaggaggggcctcaggaagaggcgagtcctgttcacgcactcaggctgaccatggctggatcctgctgcatgtgtccgacaggcagcaccaggccatcttggtgctggaggtgcaggccttggagccttacctctatgtggccaatggctccggcctcaaggtccctcaaggagaccagggtaccatcaatatggccgagctccacctgggcaccaacctcgacatccgcagtggggatgaggtccactaccacatcacagacagcccttgctggggacagttgctccaggccactcagccagcacagccttcgcccagaaggacctgctggttggggccgttctctttggccacaatggcagcctcagctcccgcaacaccctggccttctcaatggatgtggggccttctcaatggatgtggggccttctcaatggatgtggggccagtgcacacagacagtgcacacggtgcactctacaagtgaccattgccctagagggcccactagccccactgaagctggcctggcacaagaagatctacatcttcctgggagaggcagctgagatcagaagggaccagctggagaccacggagttcatcatctcggagccgctggccaatctgtactcatgtggggaccagaacacactgatggag

SEQ ID NO: 32349 - DNA, 451 bp, Homo sapiens
ccacctcattccctgacagcacaacctcgttgatcttccggtacaacctcatttcttctcccaacacagcttcattctccaacagctcaacctcatctaatcttatgcctccagccagggcctgccagatctccgggagccaaaggagagtgtagagaaaagagaggtccctcatttgctgtcccccacccacaagggctgcctggtgctataaccatccaatttctccaggcccagaaggggccatggactttgagttctaggctgcttggccaagccagaactccactattgccctgcctcctgttctgtccccaccatggctacagagggcccacaggatggattctgggacatggactcatggttgctgtaccatcttcttatttatttatagccaggttcgttcattctttcttttcttttcttttcctctttctttctttctttc

SEQ ID NO: 32350 - DNA, 650 bp, Homo sapiens
ccacctcattccctgacagcacaacctcgttgatcttccggtacaacctcatttcttctcccaacacagcttcattctccaacagctcaacctcatctaatcttatgcctccagccagggcctgccagatctccgggagccaaaggagagtgtagagaaaagagaggtccctcatttgctgtcccccacccacaagggctgcctggtgctataaccatccaatttctccaggcccagaaggggccatggactttgagttctaggctgcttggccaagccagaactccactattgccctgcctcctgttctgtccccaccatggctacagagggcccacaggatggattctgggacatggactcatggttgctgtaccatcttcttatttatttatagccagagaggaggatttcttatgttgcccacgttggtttcaaactcctgacctcaagtgatcttcctgcctcggcctcccaaagtgctgggattacaggtgtgagccaacttgcctggccatctctgtgccatcttcttctgatcctgggcagtgggactaggggaagttaccttttctggggcacatttagtggtgtgctggcaaatgtttaaccaccagctcttctggaagttaaaaaaaaaacctacctga

SEQ ID NO: 32351 - DNA, 3182 bp, Homo sapiens
ggggccggctgttggcggcggttggctcggcgcgggagtcggctgcacgtgcgggcgggggcgatgcgtcactgatcggaggaacgagaatgaatatgactcaagcccgggttctggtggctgcagtggtggggttggtggctgtcctgctctacgcctccatccacaagattgaggagggccatctggctgtgtactacaggggaggagctttactaactagccccagtggaccaggctatcatatcatgttgcctttcattactacgttcagatctgtgcagacaacactacaaactgatgaagttaaaaatgtgccttgtggaacaagtggtggggtcatgatctatattgaccgaatagaagtggttaatatgttggctccttatgcagtgtttgatatcgtgaggaactatactgcagattatgacaagaccttaatcttcaataaaatccaccatgagctgaaccagttctgcagtgcccacacacttcaggaagtttacattgaattgtttgatcaaatagatgaaaacctgaagcaagctctgcagaaagacttaaacctcatggccccaggtctcactatacaggctgtgcgtgttacaaaacccaaaatcccagaagccataagaagaaattttgagttaatggaggctgagaagacaaaactccttatagctgcacagaaacaaaaggttgtggaaaaagaagctgagacagagaggaaaaaggcagttatagaagcagagaagattgcacaagtggcaaaaattcggtttcagcagaaagtgatggaaaaagaaactgaaaagcgcatttctgaaatcgaagatgctgcattcctggcccgagagaaagcgaaagcagatgctgaatattatgctgcacacaaatatgccacctcaaacaagcacaagttgaccccggaatatctggagctcaaaaagtaccaggccattgcttctaacagtaagatctattttggcagcaacatccctaacatgttcgtggactcctcatgtgctttgaaatattcagatattaggactggaagagaaagctcactcccctctaaggaggctcttgaaccctctggagagaacgtcatccaaaacaaagagagcacaggttgatgcaagaggtggaaatgttctccatatcaagatgtggcccaaggggttaagtgggaacaatcattatacggactcttcagatttacagagaacttacacttcatctgttccacctctcctgcgatagtcctgggtgctccactgattggaggatagagccagctgtctgacacacaaatggtcttttcagccacagtcttatcaagtatcctatatgtattcctttctaaactgctactcatgaatgaggaaagtctgatgctaagatactgcctgcactggaatgttaaacactaaatatataacaagctgtgttttcctaagctgagatctgttgaataatgtttacattcgtcccccggggaaatgtatgctcagccaccattcaagagatgactgagaaggagatggtaagttcaagaagactgattgcacctgggacccaggccctttctttgggatccagtcccagccttcatccatgtgattaagatccaggccgctgaagttccccaggaaatgatcttccacttgagcaaccttttacttgatacgatttgcacctttctgttttcctgcagtcagggtggtggcctgcagggacctgagctttgctacccaaccagattcctcatagagattcctaatcactagtttcttgtattcataaactcagagatacagagggcttggtttgaagttggggtgagatgaaacctttgctctgagccaaagctctggggccttgcattccctgcattgggttgatgactgtcagcatcactgccgcaggccatgcttgactaaggtacctggttttagccacagccacctccttgtatgttacctttcagctctggccaagagtgggacagggttttaaccacaaataggagcagcatgcaattcctagtgacttgctgcacagtattgtatcataattacaggaagtttttatttttaaaactggatctggggtatattcatttgccccatcacctctgtctaaaggcccaagtcctagggctgccatggtcacaagcacactgatgctccttaagattgtttatctggagcccacatagtgtggaacaaaaagtcacctagaaagcatccttggtcatcattgtctccttcccacctggcccagagatgcttaaatccaagttgtttctccagctgtcacctcccccaggagatcaggattccactgacgtcctgggcagccagtgaatttaattttccatgagaaacaacagagttaacctgtggcattaggagacctacttcatgtggaccctttttttccttcagtttaacttttctggagcagtgtgctgcgtagttcggcctgagtttgtgcagcttgttaagacaactcttgtgtacgctatgttgaagctcaacaaaaaagtcatgggaccacttctagaaatctttcagctgtcaggcctgtcagtctcatgacagtttgttggttgtgccaaacactttatttgggaaaggaaagcccagatttgaatgggtctttcccctgggccttatcctatagaggcatttgtaatatggagaaaataatttttcatttttgctcatttaattctataaattctctttataaatgaattttgtgttctttagttctccttaaaagaacttttgaattataaaaataaaatctttacctgtcgaattgttgctgcagatgattgttgtggaaaatctggatcattgacctctgtgctttcattcctagagatgttttatagttacatgagcaaaagctgttgccccaaagtgatggccctggaggcggggctgaggaacagggaaatgccgctgtgaagtcttaaagcacttctgcttaaactccatgtgtgaggagtgtgcctccctgtgccctctcagctctgaggctggccgtctttcggggtgttccttttggcaaatatacactgtaatcttgagtctaaatttatatgttgaaatgctaccttttttaaaataagaaactaaataaaattattttactatcaaaaaaaaaaa

SEQ ID NO: 32352 - DNA, 3240 bp, Homo sapiens
ggggccggctgttggcggcggttggctcggcgcgggagtcggctgcacgtgcgggcgggggcgatgcgtcactgatcggtgaggcgcggccgaggggtcggctttcctcgcgagcctgcggctgggcttcttctcagaggaacgagaatgaatatgactcaagcccgggttctggtggctgcagtggtggggttggtggctgtcctgctctacgcctccatccacaagattgaggagggccatctggctgtgtactacaggggaggagctttactaactagccccagtggaccaggctatcatatcatgttgcctttcattactacgttcagatctgtgcagacaacactacaaactgatgaagttaaaaatgtgccttgtggaacaagtggtggggtcatgatctatattgaccgaatagaagtggttaatatgttggctccttatgcagtgtttgatatcgtgaggaactatactgcagattatgacaagaccttaatcttcaataaaatccaccatgagctgaaccagttctgcagtgcccacacacttcaggaagtttacattgaattgtttgatcaaatagatgaaaacctgaagcaagctctgcagaaagacttaaacctcatggccccaggtctcactatacaggctgtgcgtgttacaaaacccaaaatcccagaagccataagaagaaattttgagttaatggaggctgagaagacaaaactccttatagctgcacagaaacaaaaggttgtggaaaaagaagctgagacagagaggaaaaaggcagttatagaagcagagaagattgcacaagtggcaaaaattcggtttcagcagaaagtgatggaaaaagaaactgaaaagcgcatttctgaaatcgaagatgctgcattcctggcccgagagaaagcgaaagcagatgctgaatattatgctgcacacaaatatgccacctcaaacaagcacaagttgaccccggaatatctggagctcaaaaagtaccaggccattgcttctaacagtaagatctattttggcagcaacatccctaacatgttcgtggactcctcatgtgctttgaaatattcagatattaggactggaagagaaagctcactcccctctaaggaggctcttgaaccctctggagagaacgtcatccaaaacaaagagagcacaggttgatgcaagaggtggaaatgttctccatatcaagatgtggcccaaggggttaagtgggaacaatcattatacggactcttcagatttacagagaacttacacttcatctgttccacctctcctgcgatagtcctgggtgctccactgattggaggatagagccagctgtctgacacacaaatggtcttttcagccacagtcttatcaagtatcctatatgtattcctttctaaactgctactcatgaatgaggaaagtctgatgctaagatactgcctgcactggaatgttaaacactaaatatataacaagctgtgttttcctaagctgagatctgttgaataatgtttacattcgtcccccggggaaatgtatgctcagccaccattcaagagatgactgagaaggagatggtaagttcaagaagactgattgcacctgggacccaggccctttctttgggatccagtcccagccttcatccatgtgattaagatccaggccgctgaagttccccaggaaatgatcttccacttgagcaaccttttacttgatacgatttgcacctttctgttttcctgcagtcagggtggtggcctgcagggacctgagctttgctacccaaccagattcctcatagagattcctaatcactagtttcttgtattcataaactcagagatacagagggcttggtttgaagttggggtgagatgaaacctttgctctgagccaaagctctggggccttgcattccctgcattgggttgatgactgtcagcatcactgccgcaggccatgcttgactaaggtacctggttttagccacagccacctccttgtatgttacctttcagctctggccaagagtgggacagggttttaaccacaaataggagcagcatgcaattcctagtgacttgctgcacagtattgtatcataattacaggaagtttttatttttaaaactggatctggggtatattcatttgccccatcacctctgtctaaaggcccaagtcctagggctgccatggtcacaagcacactgatgctccttaagattgtttatctggagcccacatagtgtggaacaaaaagtcacctagaaagcatccttggtcatcattgtctccttcccacctggcccagagatgcttaaatccaagttgtttctccagctgtcacctcccccaggagatcaggattccactgacgtcctgggcagccagtgaatttaattttccatgagaaacaacagagttaacctgtggcattaggagacctacttcatgtggaccctttttttccttcagtttaacttttctggagcagtgtgctgcgtagttcggcctgagtttgtgcagcttgttaagacaactcttgtgtacgctatgttgaagctcaacaaaaaagtcatgggaccacttctagaaatctttcagctgtcaggcctgtcagtctcatgacagtttgttggttgtgccaaacactttatttgggaaaggaaagcccagatttgaatgggtctttcccctgggccttatcctatagaggcatttgtaatatggagaaaataatttttcatttttgctcatttaattctataaattctctttataaatgaattttgtgttctttagttctccttaaaagaacttttgaattataaaaataaaatctttacctgtcgaattgttgctgcagatgattgttgtggaaaatctggatcattgacctctgtgctttcattcctagagatgttttatagttacatgagcaaaagctgttgccccaaagtgatggccctggaggcggggctgaggaacagggaaatgccgctgtgaagtcttaaagcacttctgcttaaactccatgtgtgaggagtgtgcctccctgtgccctctcagctctgaggctggccgtctttcggggtgttccttttggcaaatatacactgtaatcttgagtctaaatttatatgttgaaatgctaccttttttaaaataagaaactaaataaaattattttactatcaaaaaaaaaaa

SEQ ID NO: 32353 - DNA, 3128 bp, Homo sapiens
ggggccggctgttggcggcggttggctcggcgcgggagtcggctgcacgtgcgggcgggggcgatgcgtcactgatcggaggaacgagaatgaatatgactcaagcccgggttctggtggctgcagtggtggggttggtggctgtcctgctctacgcctccatccacaagattgaggagggccatctggctgtgtactacaggggaggagctttactaactagccccagtggaccaggctatcatatcatgttgcctttcattactacgttcagatctgtgcagacaacactacaaactgatgaagttaaaaatgtgccttgtggaacaagtggtggggtcatgatctatattgaccgaatagaagtggttaatatgttggctccttatgcagtgtttgatatcgtgaggaactatactgcagattatgacaagaccttaatcttcaataaaatccaccatgagctgaaccagttctgcagtgcccacacacttcaggaagtttacattgaattgtttgatcaaatagatgaaaacctgaagcaagctctgcagaaagacttaaacctcatggccccaggtctcactatacaggctgtgcgtgttacaaaacccaaaatcccagaagccataagaagaaattttgagttaatggaggctgagaagacaaaactccttatagctgcacagaaacaaaaggttgtggaaaaagaagctgagacagagaggaaaaaggcagttatagaagcagagaagattgcacaagtggcaaaaattcggtttcagcagaaagtgatggaaaaagaaactgaaaagcgcatttctgaaatcgaagatgctgcattcctggcccgagagaaagcgaaagcagatgctgaatattatgctgcacacaaatatgccacctcaaacaagcacaagttgaccccggaatatctggagctcaaaaagtaccaggccattgcttctaacagtaagatctattttggcagcaacatccctaacatgttcgtggactcctcatgtgctttgaaatattcagatattaggactggaagagaaagctcactcccctctaaggaggctcttgaaccctctggagagaacgtcatccaaaacaaagagagcacaggttgatgcaagaggtggaaatgttctccatatcaagatgtggcccaaggggttaagtgggaacaatcattatacggactcttcagatttacagagaacttacacttcatctgttccacctctcctgcgatagtcctgggtgctccactgattggaggatagagccagctgtctgacacacaaatggtcttttcagccacagtcttatcaagtatcctatatgtattcctttctaaactgctactcatgaatgaggaaagtctgatgctaagatactgcctgcactggaatgttaaacactaaatatataacaagctgtgttttcctaagctgagatctgttgaataatgtttacattcgtcccccggggaaatgtatgctcagccaccattcaagagatgactgagaaggagatggtaagttcaagaagactgattgcacctgggacccaggccctttctttgggatccagtcccagccttcatccatgtgattaagatccaggccgctgaagttccccaggaaatgatcttccacttgagcaaccttttacttgatacgatttgcacctttctgttttcctgcagtcagggtggtggcctgcagggacctgagctttgctacccaaccagattcctcatagagattcctaatcactagtttcttgtattcataaactcagagatacagagggcttggtttgaagttggggtgagatgaaacctttgctctgagccaaagctctggggccttgcattccctgcattgggttgatgactgtcagcatcactgccgcaggccatgcttgactaaggtacctggttttagccacagccacctccttgtatgttacctttcagctctggccaagagtgggacagggttttaaccacaaataggagcagcatgcaattcctagtgacttgctgcacagtattgtatcataattacaggaagtttttatttttaatcctagggctgccatggtcacaagcacactgatgctccttaagattgtttatctggagcccacatagtgtggaacaaaaagtcacctagaaagcatccttggtcatcattgtctccttcccacctggcccagagatgcttaaatccaagttgtttctccagctgtcacctcccccaggagatcaggattccactgacgtcctgggcagccagtgaatttaattttccatgagaaacaacagagttaacctgtggcattaggagacctacttcatgtggaccctttttttccttcagtttaacttttctggagcagtgtgctgcgtagttcggcctgagtttgtgcagcttgttaagacaactcttgtgtacgctatgttgaagctcaacaaaaaagtcatgggaccacttctagaaatctttcagctgtcaggcctgtcagtctcatgacagtttgttggttgtgccaaacactttatttgggaaaggaaagcccagatttgaatgggtctttcccctgggccttatcctatagaggcatttgtaatatggagaaaataatttttcatttttgctcatttaattctataaattctctttataaatgaattttgtgttctttagttctccttaaaagaacttttgaattataaaaataaaatctttacctgtcgaattgttgctgcagatgattgttgtggaaaatctggatcattgacctctgtgctttcattcctagagatgttttatagttacatgagcaaaagctgttgccccaaagtgatggccctggaggcggggctgaggaacagggaaatgccgctgtgaagtcttaaagcacttctgcttaaactccatgtgtgaggagtgtgcctccctgtgccctctcagctctgaggctggccgtctttcggggtgttccttttggcaaatatacactgtaatcttgagtctaaatttatatgttgaaatgctaccttttttaaaataagaaactaaataaaattattttactatcaaaaaaaaaaa

SEQ ID NO: 32354 - DNA, 1980 bp, Homo sapiens
ggggccggctgttggcggcggttggctcggcgcgggagtcggctgcacgtgcgggcgggggcgatgcgtcactgatcggaggaacgagaatgaatatgactcaagcccgggttctggtggctgcagtggtggggttggtggctgtcctgctctacgcctccatccacaagattgaggagggccatctggctgtgtactacaggggaggagctttactaactagccccagtggaccaggctatcatatcatgttgcctttcattactacgttcagatctgtgcagacaacactacaaactgatgaagttaaaaatgtgccttgtggaacaagtggtggggtcatgatctatattgaccgaatagaagtggttaatatgttggctccttatgcagtgtttgatatcgtgaggaactatactgcagattatgacaagaccttaatcttcaataaaatccaccatgagctgaaccagttctgcagtgcccacacacttcaggaagtttacattgaattgtttgatcaaatagatgaaaacctgaagcaagctctgcagaaagacttaaacctcatggccccaggtctcactatacaggctgtgcgtgttacaaaacccaaaatcccagaagccataagaagaaattttgagttaatggaggctgagaagacaaaactccttatagctgcacagaaacaaaaggttgtggaaaaagaagctgagacagagaggaaaaaggcagttatagaagcagagaagattgcacaagtggcaaaaattcggtttcagcagaaagtgatggaaaaagaaactgaaaagcgcatttctgaaatcgaagatgctgcattcctggcccgagagaaagcgaaagcagatgctgaatattatgctgcacacaaatatgccacctcaaacaagcacaagttgaccccggaatatctggagctcaaaaagtaccaggccattgcttctaacagtaagatctattttggcagcaacatccctaacatgttcgtggactcctcatgtgctttgaaatattcagatattaggactggaagagaaagctcactcccctctaaggaggctcttgaaccctctggagagaacgtcatccaaaacaaagagagcacaggttgatgcaagaggtggaaatgttctccatatcaagatgtggcccaaggggttaagtgggaacaatcattatacggactcttcagatttacagagaacttacacttcatctgttccacctctcctgcgatagtcctgggtgctccactgattggaggatagagccagctgtctgacacacaaatggtcttttcagccacagtcttatcaagtatcctatatgtattcctttctaaactgctactcatgaatgaggaaagtctgatgctaagatactgcctgcactggaatgttaaacactaaatatataacaagctgtgttttcctaagctgagatctgttgaataatgtttacattcgtcccccggggaaatgtatgctcagccaccattcaagagatgactgagaaggagatggtaagttcaagaagactgattgcacctgggacccaggccctttctttgggatccagtcccagccttcatccatgtgattaagatccaggccgctgaagttccccaggaaatgatcttccacttgagcaaccttttacttgatacgatttgcacctttctgttttcctgcagtcagggtggtggcctggaagcccatctcggggctgctgtgtggacggcgctgcctcaggcactctcctgtctgaacctgccttatgtgtttaacctggtgctcaggatgcttctgataggggggggggggaggggtgggctgtgaaaattgcgtttcaccacatgggctgctcgggggccgatgtagggggcagggggcgagggggagggccgggggggcccgggggggggggggcccgggccggggcgacagcggggggggg

SEQ ID NO: 32355 - DNA, 1203 bp, Homo sapiens
  misc_feature (896)..(897): n is a, c, g, or t
ggggccggctgttggcggcggttggctcggcgcgggagtcggctgcacgtgcgggcgggggcgatgcgtcactgatcggtgaggcgcggccgaggggtcggctttcctcgcgagcctgcggctgggcttcttctcagaggaacgagaatgaatatgactcaagcccgggttctggtggctgcagtggtggggttggtggctgtcctgctctacgcctccatccacaagattgaggagggccatctggctgtgtactacaggggaggagctttactaactagccccagtggaccaggctatcatatcatgttgcctttcattactacgttcagatctgtgcagacaacactacaaactgatgaagttaaaaatgtgccttgtggaacaagtggtggggtcatgatctatattgaccgaatagaagtggttaatatgttggctccttatgcagtgtttgatatcgtgaggaactatactgcagattatgacaagaccttaatcttcaataaaatccaccatgagctgaaccagttctgcagtgcccacacacttcaggaagtttacattgaattgtttgatcaaatagatgaaaacctgaagcaagctctgcagaaagacttaaacctcatggccccaggtctcactatacaggctgtgcgtgttacaaaacccaaaatcccagaagccataagaagaaattttgagttaatggaggctgagaagacaaaactccttatagctgcacagaaacaaaaggttgtggaaaaagaagctgagacagagaggaaaaaggcagttatagaagcagagaagattgcacaagtggcaaaaattcggtttcagcagaaagtgatggaaaaagaaactgaaaagcgcatttctgaaatcgaagatgnntgcattcctggcccgaaaacaggaaagcggatgcggcaatcatggggacacaaaagccaccgccaaaaagccgaggtggaccccggacaatggggggcgcaaaagtccacgccgcgggtcaaacgggtaaccattggggaccgcaccccgcaggtcagggaccccacggtcgtggtgaatacgaaatctgaccgcagcgaaaagcgcccgccctgaggcagagcaggcgacactcatccacaaaacagtcgcgaccagcagatcgcccaaacacacggggcacgcggcaaaacagccatcgcagcg

SEQ ID NO: 32356 - DNA, 531 bp, Homo sapiens
gcggccgcagagcaagaggcccaggaaggaccctccgagcgctgtggggagcggcaacgccggtggctcggggccccgcggaaaaggtagggcggcccgtccccttgggagaccccagcccctctccggggtgtgccgcgggggagaggaacccctcgccccagccgggctccaccctagctcacccatcccgcggcctacactgaggctctcaatttgggtggcacttatggggcatgtgtcccctctctccttcgaagaggctgcgactttctatatttaaactctttgaagaggcagtgagtatccttttttgggggggagtcgaagagatcccttaaagctgtttcctttccaaaggatcactgatggttttctatggttttgtgtttcaaacagcggacaatagttcggaaacgggaagagaaaaaaatacctgctgtatctctttcccagacatcaggcggtggaaatgcaccaagggagcaggcttttgaaactcattggggggaagatgggtaagaagcggag

SEQ ID NO: 32357 - DNA, 769 bp, Homo sapiens
gcggccgcagagcaagaggcccaggaaggaccctccgagcgctgtggggagcggcaacgccggtggctcggggccccgcggaaaaggagctgaaggtggtggatcatcgtctggaaatgtgtctggggttgcccctgctgcccctgcagggggctcgcgctcctcctcccggaacttagggtcttctggtggcgagaaggaagaaggcaaaaaggtccggcggcagtgggagtcgtggagcacagaggacaagaacaccttcttcgaggggctgtacgagcatgggaaagactttgaagcgattcagaacaacattgcgctgaagtacaagaagaaaggcaagccagcaagcatggtgaagaacaaggagcaggtccgccacttctactaccgcacctggcacaagatcaccaagtacatcgactttgatcatgtgttctctcgaggcctgaagaagtcatcccaggaactgtatggcctgatctgctatggcgagctgcgcaagaagattgggggctgtatggatgacaagaatgcaacaaagctgaatgaactcattcaggttggggccaccactgtacgttacaaagggcggaacctgcggatcaaagcgcccatgtgccgggccctgaagaagctgtgcgatccagatggcttgagtgatgaagaggaccagaagccagtgcgcctgcctctgaaagtccctatagagctacagccgcggaacaaccacgcctgggcccgtgtgcagagccttgcccagaaccca

SEQ ID NO: 32358 - DNA, 1042 bp, Homo sapiens
gcggccgcagagcaagaggcccaggaaggaccctccgagcgctgtggggagcggcaacgccggtggctcggggccccgcggaaaaggagctgaaggtggtggatcatcgtctggaaatgtgtctggggttgcccctgctgcccctgcagggggctcgcgctcctcctcccggaacttagggtcttctggtggcgagaaggaagaaggcaaaaaggtccggcggcagtgggagtcgtggagcacagaggacaagaacaccttcttcgaggggctgtacgagcatgggaaagactttgaagcgattcagaacaacattgcgctgaagtacaagaagaaaggcaagccagcaagcatggtgaagaacaaggagcaggtccgccacttctactaccgcacctggcacaagatcaccaagtacatcgactttgatcatgtgttctctcgaggcctgaagaagtcatcccaggaactgtatggcctgatctgctatggcgagctgcgcaagaagattgggggctgtgagtacgctgactgtggggttgcccacggctcctcctgtcctttgtcacctttgggctttagtgctcagagttgtttctagtttccctctaacttttatcttgaaaaaattttactagaagaggtgaagaatatgatggcggccgtgctctttagcttagatggacctgttgctgacgttggctacatttgctctctttctccatgcacatgcacacatgctcgcgtgcacacatgtgttcacacactctgcattccactcgactgtaagatgtcacgccacagcccagaatacctccaccggcatcacctcagagaacatttctcctatatagccttgataccatggtcgcacctagacttttagcatttaccaaacaggtgtagtgatcttacctaatttcctgcccatattcagattttctaaaacatcccaaaatatcagtcagggcttctgtcaagggccgttgccctgcatgtgactgtggagtctcccttgggtgtctttgacttagagcggccg

SEQ ID NO: 32359 - DNA, 813 bp, Homo sapiens
atgaaatgtgatgtgaggcttcattttgcagagggaagggatctctgtctccattgtggacagggcgtcttaggctgcagcgtcattgtgctgttacatggttccacataaaatcttgctccttttctaagagctgaaggtggtggatcatcgtctggaaatgtgtctggggttgcccctgctgcccctgcagggggctcgcgctcctcctcccggaacttagggtcttctggtggcgagaaggaagaaggcaaaaaggtccggcggcagtgggagtcgtggagcacagaggacaagaacaccttcttcgaggggctgtacgagcatgggaaagactttgaagcgattcagaacaacattgcgctgaagtacaagaagaaaggcaagccagcaagcatggtgaagaacaaggagcaggtccgccacttctactaccgcacctggcacaagatcaccaagtacatcgactttgatcatgtgttctctcgaggcctgaagaagtcatcccaggaactgtatggcctgatctgctatggcgagctgcgcaagaagattgggggctgtatggatgacaagaatgcaacaaagctgaatgaactcattcaggttggggccaccactgtacgttacaaagggcggaacctgcggatcaaagcgcccatgtgccgggccctgaagaagctgtgcgatccagatggcttgagtgatgaagaggaccagaagccagtgcgcctgcctctgaaagtccctatagagctacagccgcggaacaaccacgcctgggcccgtgtgcagagccttgcccagaaccca

SEQ ID NO: 32360 - DNA, 686 bp, Homo sapiens
tttgagggaggggctgcagctactgtagggcttttattccagaggaactttaatattcggtaatgggatttgagtctatattgagcggaattgtatgggaatcttcagtggctttgctcctaactacattgtggtctcatttatttattttttccatttaaaggtatggatgacaagaatgcaacaaagctgaatgaactcattcaggttgggtaagtcccagtttccatgtgaaacatcacttctctgggtgttttgtgtttattctctaaaatacagaagctgaaatgctctcagtgaggaccttccgagttaaaacttcataacctctcagttacgtgttcagtcccaacaaaaggtgcttggtccagggagcagtgactgcgcccagagcctgtgcctgccccggggagggaaggaagtgccgtctttggcctcctccttcccgagggtctctggctgggcgttgtggtctcgacgcagcactcagggccctgctttttgtgctccttttcctccacctttgtgcctgctgtggggctggtccccggcttctagggcctctcctttccattgcatttttgtcgtgtcctgggccacttctgacagcttccctgccttcttgtgccctggatgcttctgtctccaactggccgctctcctcccctcacacacctgactcccag

SEQ ID NO: 32361 - DNA, 334 bp, Homo sapiens
agtgtcccctgtggttgacagcttgcatgacaaaggtacagggaggagatccaagaaaccacgtgagcctggtgtggctctcacacccaagccaggcagcgcctcctgttcccctctctaaagccgccttctcttctgtttctcagtgttctctcgaggcctgaagaagtcatcccaggaactgtatggcctgatctgctatggcgagctgcgcaagaagattgggggctgtgagtacgctgactgtggggttgcccacggctcctcctgtcctttgtcacctttgggctttagtgctcagagttgtttctagtttccctctaacttttatctt

SEQ ID NO: 32362 - DNA, 411 bp, Homo sapiens
gcagggccagggaaccctcagggtgatctagacccaggggacaacatgatcaaaagtatggaaatgtaaggctgtgatgtgatggggcataccaactgtttagcgcagaggtcacctgtaatcccagcacttagggagcagaggccagaggatagctagagcccaggagtttgagacctgctcaggcaatacagcgagccccctttctccacaaaaaggggaaaaaaaagacaaaaaaacccaagtgtagagcagaggtcagcaaaccggcttgcatgccaaatccagcctgctgcctgcttttttaaggcccacaaggtaagaattgttttcactttcttttgagacaggtctcagtctgcactccagcctgggtgacagagtgagactgtctcaaaaaggaaaaaaaaa

SEQ ID NO: 32363 - DNA, 520 bp, Homo sapiens
gctctagactgaacacgggaagactaactcaaagtccacacactgaagggtgaaatttccaacgttccttcttttctcagtttcctgaatgctgttagctaagtataaatgtctgagttgaaaaagaggcttattctctggagaagccaaccaaccaaagagaaaaaggcctgcacatacatttttggatcctctgatgaaattgccaggaatctgccaaataatcaccagggagcccattcgttgatgagttttgcccatatatacacaggtcccagacacattccagagcttttctttgaaatacaaagagagctaacgattgtcagatatgtgaggaaagaccagaacaggtaaactgaaaaacaaggaaataaaggcaatgtgaattttgacaaatagaagtaggaaaaaaaggcaatgtaaataacaaaagaaaaggtcacaaaatcatagtatctgaatttagagcgaagatactgtatccatgcaacaataacaggaaacttaaaaaaaaaaa

SEQ ID NO: 32364 - DNA, 357 bp, Homo sapiens
ttgcagaaatacttaagtgccttactataatgtcttgctaaggacatggctcatgcagaagagttgggtgaagacttgaaaacagaaattgagaaagagtatgaaaactgtggcaaaactggaaaatgtgaaatgttacgaattcctggtacatggaaggatacctaatgataggctttaaatttctattatcaggtatttggatagcttaagctatatctctcctcttacagtggaaataaatcaacgtagcatagcaaattaaaactcaggttttggaatgactatagaatagagtgactttgaacaaataactctctgaatagcagtgggctggaaaactagctctccacaaga

SEQ ID NO: 32365 - DNA, 722 bp, Homo sapiens
ggacttattcatttcaccgtggttagcaatgatgctgtccagcacagtcacacagctagctgacaaaataaagcccaccagcaacccaggagagacagacttccctttctcacacccatctctgattgttacataaagggcttgaaacctaatgacaatgtcataaataggtattttatgaaagctgcagaaatcttcctacaatggttcctaaagcaaaccttgggtaaggaatgagcctgatgttgaataacccaataattgagccatgtggtattttcagattgtcttgaaattacatcttaaacaatctggtcgggacaatggatgctgactaactgccctgtttcctgtactacagcaattggggaactcagggtttctatggcttcctttataagcctcttaattctaaacaaagccacaacccaaccaggaacatgctggcctctctgacacaaatgattacagctgctgctgatgcattttataatatggaagccaagcttgttctttgcatgagtttaaaaatccattatagctttagaatgttttaaacaatagcaaacgaagctctattgtggatacagtttttttttttgtttgtttgtttgtttttttgagacagagtcttgctctgtcccccaggctggagtacagtggcgtgatctcggctcactgcaagctcctcctcccgggttcacgccattctcctgcctcag

SEQ ID NO: 32366 - DNA, 402 bp, Homo sapiens
atcccagcactttgggaggccgaggcgggcagatcatgaggtcaggagatagagaccatactggctaacatggtgaaaccccatttctactaaaaatacaaaaaaattagctgggtgtggtggcacgcggctgtagtcccagctactcgggaggctgaggcaggaggctgagggaggagaatcatttgaacttgggaggcggaggttgcagtaagccgagatcgcaccactgcactccagcctgagtgacacagcgagactccgtctcaaaaaacaaacaaaaaagaacgttgacaaaattaaaatattttgttatggaattgtatgtggtgttaaaggtattgtttgtgaaatgtatgtgttaaaaataataaaatttcagagtaattactttcatgttgt

SEQ ID NO: 32367 - DNA, 329 bp, Homo sapiens
tgttttctaattctcgaacttaaaaataaactgaatacatatattataatgcaaaatttaaaactaacttcgtgtgactggagtaaatcggaattttgtttggtatgtacattttaaacttgctctttcagaacaacaaattctcagtcccacaaatgtgaatcgtttttgtacatttttcattatatctggctacactggtggctgatactatttttttaaggtttgtcattggttggtttttttgttgtttgagacagagtcttactctattgcactccagcctgggtgatggagtggacagggtgagactccatctcactccacca

SEQ ID NO: 32368 - DNA, 445 bp, Homo sapiens
tgttttctaattctcgaacttaaaaataaactgaatacatatattataatgcaaaatttaaaactaacttcgtgtgactggagtaaatcggaattttgtttggtatgtacattttaaacttgctctttcagaacaacaaattctcagtcccacaaatgtgaatcgtttttgtacatttttcattatatctggctacactggtggctgatactatttttttaaggtttgtcattggttggtttttttgttgtttgagacagagtcttactctattgcactccagcctgagtgacacagcgagactccgtctcaaaaaacaaacaaaaaagaacgttgacaaaattaaaatattttgttatggaattgtatgtggtgttaaaggtattgtttgtgaaatgtatgtgttaaaaataataaaatttcagagtaattactttcatgttgt

SEQ ID NO: 32369 - DNA, 546 bp, Homo sapiens
  misc_feature (67)..(67): n is a, c, g, or t
agaatcgagtcggacctcggaggtgtatcataatgccaggtactgtcctaggcattatggatataanacagtaaatttctttgttttgaaattagtggaggagaaccagagagatgccaggagaccagttagttgggagatgactgtagttagagatggtggtagcttcaaaggtagtggaatgagataagtggaaataattgagtagctggagtcaactggactggagatggattggaaatggagggcatgagaaggggtgaagttaaggatcacacttcagctgggcacagtggctcatgcctgtaatcccagcactttgggaggctgaggtgggtggattgcttgagtccaggagttcgagaccagcctgggcaaacatgatgaaaccccatctctacaaagaatacaaaattagctgggcatggtggtgtgggcctgtggtcccagctactcaggaggctgaggcgggaggatctcctgagcccaggagtttgaggcttcagtgcgccatgatcacgccactgcactctagcctgggtgaca

SEQ ID NO: 32370 - DNA, 667 bp, Homo sapiens
gcggcgcctactactactaaattggcggccgctcgacaaaaggatggagtctggagactaaatttgggagtggggagacatggtgtgtcctgcacctggaaatgtagatagacctcaggccatacaatacctggaggctatggtaagcatctttagtaagagcaagggggagtgttgtgagcactgtcacagtaaatttctttgttttgaaattagtggaggagaaccagagagatgccaggagaccagttagttgggagatgactgtagttagagatggtggtagcttcaaaggtagtggaatgagataagtggaaataattgagtagctggagtcaactggactggagatggattggaaatggagggcatgagaaggggtgaagttaaggatcacacttcagctgggcacagtggctcatgcctgtaatcccagcactttgggaggctgaggtgggtggattgcttgagtccaggagttcgagaccagcctgggcaaacatgatgaaaccccatctctacaaagaatacaaaattagctgggcatggtggtgtgggcctgtggtcccagctactcaggaggctgaggcgggaggatctcctgagcccaggagtttgaggcttcagtgcgccatgatcacgccactgcactctagcctgggtgaca

SEQ ID NO: 32371 - DNA, 1052 bp, Homo sapiens
  misc_feature (7)..(7): n is a, c, g, or t
  misc_feature (39)..(39): n is a, c, g, or t
  misc_feature (89)..(89): n is a, c, g, or t
tcagctntgttgtgggacaaacaacctggagtgtagcanggtgctgcatatttgcaggacagtatgaaagcgttctggagatggatggnggacatgtctgtacaatgtgggggatgcacttaataccactgaatttttcctttgaaaatggctaaaatagtagattttgtatgtattttaccacagtaaaaaatcaagctggccgggcatggtggcttacacctgcaatcccagcactttgggaggccaaggcgggcagatcacttgaggtcaggagttcatgaggaaagtttgagctgcagtcatagatacatagaagttagctagctaggcagagggagggtattgcattctggaaagagggaatagcacatacaaatgcctagtggttggaggaattgtgatgcttttaaagaactgtaaaaaggatggagtctggagactaaatttgggagtggggagacatggtgtgtcctgcacctggaaatgtagatagacctcaggccatacaatacctggaggctatggtaagcatctttagtaagagcaagggggagtgttgtgagcactgtcacagtaaatttctttgttttgaaattagtggaggagaaccagagagatgccaggagaccagttagttgggagatgactgtagttagagatggtggtagcttcaaaggtagtggaatgagataagtggaaataattgagtagctggagtcaactggactggagatggattggaaatggagggcatgagaaggggtgaagttaaggatcacacttcagctgggcacagtggctcatgcctgtaatcccagcactttgggaggctgaggtgggtggattgcttgagtccaggagttcgagaccagcctgggcaaacatgatgaaaccccatctctacaaagaatacaaaattagctgggcatggtggtgtgggcctgtggtcccagctactcaggaggctgaggcgggaggatctcctgagcccaggagtttgaggcttcagtgcgccatgatcacgccactgcactctagcctgggtgaca

SEQ ID NO: 32372 - DNA, 391 bp, Homo sapiens
catctatttttttttatcctccattcttgccttcttttagatgtattccagttcatcctaggatttgcttattagttacacattctttaaaaaattccgtttagtaggccagtcatggtggctcacgcctgtaatcccagcactttgggagaccgaggcgggcagatcacgaggtctggagattgagaccatcctggctaacacggtgaaaacctgtaactactaaaaatacaaaaagaaattagctgggcgtggtggtgggcgcctgtagtcccagctactcaggaggctgaggcaggagaatggtgtgaacctgggaggtggagcttgcagtgagccaagatcctgccactgcactccaggctgggcgacagagcaagactccgtttcc

SEQ ID NO: 32373 - DNA, 160 bp, Homo sapiens
atgaatgtgtcacacttctgaggttaatgataaatgaattggtcctgcttacctcaggaaaaactttcaagtctttctgaaaaactaatttaattcagtagtattttctaagatttaggttatgtttttaatcaatttggaaaccaagatttacttatag

SEQ ID NO: 32374 - DNA, 712 bp, Homo sapiens
aagtggcggatggcctgtccaaggggcgtcttttccatgaccacctggataccgaccggaatagatgtacccattgttttcagagatcggatgacagacagcagaaaactgtagtccctgagtgaaggaaagaaaaaatgagataagccctatgattgctctagtttgctgcctggagccagtgtccaggcccctctgaaggcaggggagccctgatactgaactaggaaaagacattgcaagaaaagaaaactacaaacatctctcgtgaaatgcttaacaaaattagcaactaaaatctagcaatatgttaaaagtataatacatcatgatcaagtggggtttattcaagaaacacaggtaagctcaacattcaaaaatcaggcaataacctttactacataaataaactaaaaagaaaaacatatgatcatgtcaatggatacaggaaaaacttttgacaaaattaatacccattcatagttttaaatggaaagaaaagctctcataaaaataggaatacaagatgacttcctcaacctgacaaaggacatctaccaaaaattcttctgttagcataatatttcatgatagaagactgattgcttttaccttaagatggcgaatgtggggaggatgtctactctctctacttttgttccacattgtactggaggtcatagccagagaaacaagactagaaaaaaaaaaa

SEQ ID NO: 32375 - DNA, 350 bp, Homo sapiens
taattttaatttaggcccatctaactgttgaatttacattagcaacagctaatcagtgagtgtttatgaaaaactttagtcacaggtaagtcccaaattaggaagaagctgtgttccaaagatttgtaaatattttgcttattttaaactcaaagtatatttttccatagaaaaaatttatgattggtgtttcagtcccctggcaagaccacaaatgcctcttaatgcatgcagatgtcctgatcatactgttaaacctaatctttgcgaccaacaacgtatttaggctctgctattaactgtcatttaacctttctgagcctcacttccttctgtaaagtaaagagatt

SEQ ID NO: 32376 - DNA, 422 bp, Homo sapiens
tccagccaggaatgcataatccatatattataatgaagaaacaagtagacaaaccccaaatgaagaatgttctattaagataaaggggaagattgaattcttcaataatatcaacaccatgcagacaaagaaaggctaaccattcccgattaagggatactagagagaaacaacaaccgaatgcaatacagcattcttagacttgatcctgtgctagaggagaaatggcatctaaagggtgttactgagacaagtgacaaagtaactttgataccacattggatcagtgtgaaatttaatgcagtggataactgtactgtgggaggaaacacactatttaggggtagaggaacatgaggtctgcaacttattctcaactagattggaatcaaagtcatctgtatataccttaaatagagaga

SEQ ID NO: 32377 - DNA, 2311 bp, Homo sapiens
  misc_feature (574)..(574): n is a, c, g, or t
tatttagtaaatatttgataaactaatgataagccattatagcttataccattttccatttctcaacaattcaaataatcaccatgtactatgctttatgtcttgctttgcttttctgtaggaaaactttggaccttattgagaagaggaaaacacttaattgggcagaagtcctagtggcacccaccagagctctactgcattcagacactgttcacacactgaccattcatgtgtgttcagcatctgaacttggccttgtgacgtagagaccctgatgaaagctaatgtttctgttttcatgaaaatattcaatctagggaacaccttagaggaaaaaagacttttaggtaagattggtttggaaattgggaatgacccagcttgtgcctatatatgtgggcctgcaatcaacttctgtggtaggagtgagttgcctacctgaagggaaactttttacataggatttaaaaagatgatactaatttaaaaacaaacaacattttaaataggttcaaagctagtgaaagtaaaaataaactaattaatattaccccagtattaagaatttagnacacctacaaccatctgatcttcaacaaacctgacaaaaacaagcaatggggaaaggactccctatttaatcaatggtgctgggagaactggctagccgtatgcagaaaattgaaactgaaccctttccttacaccttcatacaaaaattagttccagatggattaaagacttaaatgtaaaacccaaaactataaaatccctagaagaaaatctaggcaatactatctgggacataggcacaggcaaagattttataatgcaaataccaaaatcacttgcaacacaagcaaaaattgacgactgggatctaattgaactaaagagcttctgcacagcaaaagaaactatcaccagagcaagtagacaacttacagaatgggagaacatttttgcaatctgtccatctgacaaaagtctaatatccagagtctacaaataacttaaacaaatttacaagaaaaaaccccattaaaaagtgggcaaaggacatgaacagacacttctcaaaagaagacatgcatatggccaacaaacctatgaaaagaagctcaacatcactgatcattagagaaatcctaatcaaaaccacaatgaaataccatctcacaccagtcagaatggcaattattaaaatgtcaaaaaaaaaaaaaataacagatgcttccgaggttgtggaggaaaaggaacacctttacactgttgctgggagtgtaaattagtttaaccattgtggaagacagtgtggcaattccccaaagatctaaaagcagaaataccatttgacccagcaataccattgctgggtatatatccaaaggaatataaatcattctattataaagatacatggatgcgtatgttcactgcagcactattcacaatagcaaatatgtggaatccatccaaatgtccatcatagactggacaaataaaatactgtacacatatatatacacaccatgaaatactatgcagccataaaaaagaacaagatcttgtcatttgcatggatatgcatggagctggaggccgttatccttagcaaactaaggcaggaacggaaaaccaaacagtgcatattctcacttataagtgggagctgaatggtgagaacacatggacacatagggggaacaacacgccactggggcctgttgaggaggggagggagagaatcaggaagaatagctaatggatgctgggcttaacatctaggtgatgggatgatctgtacagcaaaccaccacaccacacatttacctatgtaacaaacctgcacatcctgcatatgtaccccttaaaagctgaagataaaaaattgttttttagtggtttctacctgtaatctcactttgggaggctgacgcaggaggatcgcttgagcccaggagtttgagaccagcttgggcaacaaacaaagggagatcccatctctacaaaaaattaaaaattgctgggcacggcggtttacacctgtaatcccagcactttgggaggccaaggtgggaggatcgcttgagtccaggagatcaagatcagtttaggcaatatagtgagaccctgtctctacaaaaaaaatttaaaaattagccaggtgtgttggtgtgtgcctgtagtcccagctacttgggaggctgaggtgggaggatcacttgagcctgagaggtcaaggttgcagtgagccatgatcatgccacttcaccccagcctgggtaacagagcgagaccctgtctc

SEQ ID NO: 32378 - DNA, 736 bp, Homo sapiens
gtggctcacatctgtaatctcagcacttcaggaggccgaggcaggcggatcatgaggtcaggagttcgagagcagcctggccaacatagtgaaaccccatctctactaaaaatacaaaaaattagccgggcacggtggcgggcatctgtaatcctacctactcgggaggctgaggcaggagaatcacttgaacccaggaggcggaggttgcagtgagccgagattgcaccattgcattgcagcccaggtgacagtgcaagactccgtctcaaaaaaaataataaaaatgaagtaccatttttttcacagattaggctgacaaacactggaaagaatgataaaacctcatgtggatgagcgttggcaagttggactcacattgctacaattcttctggagagttaaaaaaaaaaaaaaaaaaaagaaaaaaaattttgggggggctggggcctcggaaagacggttcaccaaacaccaaatatcggctgagggagacgcggcgggcgccaagagcaggggtaacggcgcaacaggtggacaaacagggtacccaaagggagaccccggggcaaccacgacacaagtgatggggattaccaccaagctaaaaaaaaacgcccggagggcacaccggcggcgtctgtgaaacacccaagagggggtctggagggcacatcacggggcactaccacgaggggccacgcgagcgctgataaaattcgcgcgccctggggta

SEQ ID NO: 32379 - DNA, 687 bp, Homo sapiens
ggacagggcaggaggcttctgagcgtgtggcccctagctagggaggcaccgaggcgggagagggagcccaggccactttcccagcctgggttcctggctcccccgccttgactgtgcaggggtgtctggttgaggagggaagtcctagatcagtccccagtcccagtcctcggagggtttgctctttctggaagtccttggctcaggatccttggacttgtctgtgggtttggttcttctcctggttgtctggatgggaggggaggggcctaggcttgctggggctgtgtgtagggtcaaaggcactatggatcctaatggagaacctcagggcaaaaccaacagtactgccatacccatggatgtggtgcaggttcggttccaaaccatagcaaagcaaatatagcaataaagcaagtcacacaagttttttggtttcccagtgtgtataaaagttatgtttgcactatagttgattaggtgtgcaatggcattatgtctaaaagagcgtataccttaattttaaaatattttattgataaaaatgctaacacagagacatgaagtcagcacgtgctgttggaaaatggcactgatagacctgctcaatgctgggttgccacaaacattcaatttgtaaaaaaatctaacctgcggagcataataaagcaaagtgccataaaagga

SEQ ID NO: 32380 - DNA, 750 bp, Homo sapiens
tatataattaaagtacattaggtttagtgattgcaatttgagaaaccaatgtcctttcttattgaaaaaggccctggtacagaaagtgttctatcttcctcacaagatctgaggtcaaaggagagattttgaaacattatagcaatggcttctagttattgaataaagaatgtcatttgctcctcacaggacccctttcagggagatttcacatattgggaaacagcctcatgagctttctacaaacatctttgtccttaagtcttcccatttcagtaattggctgtaccactcatccagcagctttcaaagttagaaacctggcaatcttcctttaacatccatttccctttccctcattcccccatatccaatcatgtgtattggaggtttttccacctctaaacttgagaacccatttactttttctccatctcctttgccatcacactagtccaagtgaagtgtttcatcatctcatttgcagcatcctttagtttaccctagattatcaatttttgtccccctcccaattcagtctctactcatgagctaacatgagtttattaagtgttcattctgaccatgccattccttgctcaaaattctctagtgccttcccaatgcccttaaaataaaattcctcatatggcctttgtggatctgcactcctacctcttctcctattgcaaccaaccctgttacctttttctcttttcacactggtcttcattctgtgctgcaaactgg

SEQ ID NO: 32381 - DNA, 618 bp, Homo sapiens
atggcggcagcggctgggggcgcggcgagccgccggggtgccgggcggccctgccccttctccatcgagcacatcctctccagcctgcccgagcggagcctcccggcccgggccgcctgcccaccgcagcccgccggtcgccagagccccgcgaagccagaggagcccggggcgcccgaggctgcgccctgcgcctgctgctgctgctgcggcccccgcgcggcgccctgcgggcccccagaggcggccgccgggctgggcgctcgtctggcgtggccgctgaggctgggaccggcggtgcccttgtctctgggtgcgccagccggaggttccggggcgctcccgggcgcggtcggcccgggttcgcagcggcgcacgaggcgccaccgcaccatcttcagcgaagagcagctgcaggcgctcgaggcgcttttcgtgcagaaccagtatcctgacgtgagtacgcgcgagcgcctggccggccgcatccgccttcgcgaggagcgcgtggaggtctggttcaagaaccgccgggccaaatggcgacaccagaagcgcgcgtcggcttccgcgaggctcctgcccggcgtcaagaagtccccgaaggggagctgctga

SEQ ID NO: 32382 - DNA, 399 bp, Homo sapiens
attcccatgagaagtggcctctgttgggagcctagaaagctcgattaacatactgaaaccacctaaggaagaataactgacccacttcctctctcattatcccatcctgggcccaccttctttctgtgactccctaagaacattcccctgctatgttctgtctttgccaggcgtggatctttatttcacatttgggttctaaatttcaaacccagctcagtctggtagttttaacagttgtagggggctgggggtggaatgtgtttgaattctgagaaaaagtgcgcaaaaatcttcttggaaatcagcattgttcccattcatcattgtggctcctaatttgatttgatgagttaaatagaaataaatcaaaaacatgtggatcaaatttatgttaaa

SEQ ID NO: 32383 - DNA, 314 bp, Homo sapiens
agtcatctttttaaaacattcctccaggtttatgtgtgtatgctcacaaaagacacaaagagttaagtcaaaatgtacggagaccaggaaggcgagtctatcagtagcagcaaaatgaagatgtgaacaatcagaagtttgaggatcagacagtgaccttctgctccaggctacagtaaatcagaaaggcacaaaattttgaaggaagaaaaaagattcatctttatatatattttttccctaactgctatacaaagccccaaagcctggaagtgttaattattatatgatcaatagtcctagccaaaaagaaa

SEQ ID NO: 32384 - DNA, 606 bp, Homo sapiens
ctgctgccatttcctctgtccctgaggtctccagaagagaaaggagctccagccttgcattctttgggtgtggagaggagcagagcagaatggagcctgcaggtcatgccaggagtcaccgcaaggctgtggctgtcagctcagaattccatcatcacttgggagatttctgcgaatcatcactaaagccattcactttctcataactaaacaagaatcttcttctggagttaagtatcagatatgaatgttctcactgacctcaggaagcaaaagtcctaaatcattatatggcagtgaaggtacaaaaaaaaaaaaaaatcagcaggaaataaagcggaactgctgccaacacatacaagctgcagtagcacccacaaaatgtgtagtatctattctaacacattcattggactgattacattggctcatagacttggttaactctggaagaacataataggtgtttattgtttactatggggatgggaaacataattaagtctatagtctccaattcttctcaagttcaaatgaaaccaacaattttggttttgtcttaacattcaggatgtgtttctaattaaactgaaatcacagtaagca

SEQ ID NO: 32385 - DNA, 428 bp, Homo sapiens
ttttctcatctgcaaaatgaccagtttgaactagatattctttgaggtagattccacgtgcagcgtttaaaagtctttgctcagtctgttgtttcagtgggctcttcaagcaccaacaggggccaatcaggaaggtaggacctgcctgatgtcaactcagggcacgtcccacaatatttccaggtgtcttcaggaatatggagcaccactgtcaccccgtgtcacctgtaagatgggagaagggaacccagtcaataaagattatgaggagggccgggcacgtaggctcacgcctgtaatcccagcactttgggaggccaaggtgggcagatcactgggtcaggagtttgagaccagcctggccaaaatggtgaaacctccatctctactacaaatacaaaaattagctgggcatggtggtgggcgcc

SEQ ID NO: 32386 - DNA, 1118 bp, Homo sapiens
acctggttgtctttggtcagacaagtgccctgagcatcgaagagtcatgcaggcctggagataaagtccctccaattaaaccaaatgctggggaagaatctgtcacgagtcttgacaaattgagatttgctgatggaagaagcataagaacatcggaactgcgactcagcatgcagaagtcaacgcaaaatcatgctgccgtgttccgtgtgggaagcttgttgcaagaaggttgtgggaaaatcagcaagctctatggagacctgaagcatctgaagacgtttgaccggggaatggtctggaacacggacctggtggagaccctggagctgcagaacctgatgctatgtgcgctgcagaccgtcaatggagcagaggcggggaaggagtcacggggcgcgcacgccggggaagactacaaggtgcgccttctcgccacgcccacctgcacctgccttttcctcccgcctggtgggactcagccccacccctgcattttctctgcattttatgtcgtttccccaaaagtatatccaaaaaatgcctttttccctctggtaactttgatccctgggttctcgccattttctggatcactgtgacctgttccttgctttgggtcggcatccactgatgccagcagtggcatctccaagccaatgtgctttgctgttagaaggccaaggttagaagtgcagccagcgtggcatgaccaggaaataaatgccagtttattaaataacgagtaagccaccgtttcaagcctgccctgtggaggaaatgccagtttattaaataacgagtaagccaccatttcaagcctgccctgtggaggaaatgccagtttattaaataacaagtaagtcaccgtttcagacctgccctgtggaggaaatgccagtttactaaataacgagtaagccactgtttccaacctgtcctgtggtttggaaaaggtattatagagcctgtcctgtggtttgattacggagcctgccctgtggtcacttgttcttcagatgaactgatttttgtgcagagcacacgtgttggattctgcctggtaagagtttttcacatatgatagcaaaaaacgacggaaagggaagcttggggtg

SEQ ID NO: 32387 - DNA, 712 bp, Homo sapiens
  misc_feature (648)..(648): n is a, c, g, or t
gtgcagtggtgcagtctcagctcactgcagcctcaaactcctgggcagctcaggtgatcttcccgactcagccttctgagcagttggggctacagagacagagttttgccatgctgcccaggctggagtgcagtggtgtgatctcggctcactgcagcctccacctcctgggctccagcagtcctcccacctcaacctccctaagagctgagactacagtgcacagccagagaacaacacatcacacacaagaaacagttgtgctcatgtgatgggggcctcagcactaggaaggagtggactgttggcgcacgcagcagcttgaataaatctgaaagtcactacgctgcgtaagagaagccaaataaagcgcatgctgtgtacagagggtgtcgagaatgcctcctacgtgacggaaagcagatccgtggttccctgcagactggcaggagcagattccaaaggcacaggaagaagcttgcagtacaaagattagactctgaagtaatatctggactctgaaattagttccttaatgacaacacaaaggggagaatcctacccactgtgagagtcatgactcttgattgcagctgacagaaactcatgacagcctgctttatatgaaaggggagagaaagactggangatctttggagtggggttccacctctttgaggaagacaagagaatcttgtgacacgcggtgggg

SEQ ID NO: 32388 - DNA, 1411 bp, Homo sapiens
gtgcagtggtgcagtctcagctcactgcagcctcaaactcctgggcagctcaggtgatcttcccgactcagccttctgagcagttggggctacagagacagagttttgccatgctgcccaggctggagtgcagtggtgtgatctcggctcactgcagcctccacctcctgggctccagcagtcctcccacctcaacctccctaagagctgagactacaggtgtgagccaccatgcctggctaatttttagagacagggtttcaccctcttgcccaggctggtcccaaactcctgggctcaagcagtcctcctgcctcagcctcccagagtattgggattataggtgtgagccactgccagaaaaacgtttcctaagacaaggcaggtcttacattatatttaaattttttttaatgatgtcttttttggcagtgcacagccagagaacaacacatcacacacaagaaacagttgtgctcatgtgatgggggcctcagcactaggaaggagtggactgttggcgcacgcagcagcttgaataaatctgaaagtcactacgctgcgtaagagaagccaaataaagcgcatgctgtgtacagagggtgtcgagaatgcctcctacgtgacggaaagcagatccgtggttccctgcagactggcaggagcagattccaaaggcacaggaagaagcttgcaggtagaatgtgttcattaccttctgcgcattataccacaaaaaagctgggaataaaaatgctaaccaaaaaaaaaggtgaaagtagataaaatttctcaactgtgtgatgggtaaacgtgcaggtttgctgtcatgctttgtttatgaagctgtggggtacaaggactctcatagtcactgtggaatgcagaacgttgcagcctcatggaagaggatttggcagcatctaacaaaatgacatggcatttgcccttagactcagcaattctagaatctgcctcaaaaaaaactctggcaaagaaatgaaaggactttacccacagagttcttttcacagcctgaatgtgtttgccacaaagttcttcactgtggcatttgtaaaactggaaacaatcaaaatgtccatcagtaggggattgggaacattaattcgtgcagtggggaactccgtaccagaaggaggaatgaggaacgcctattgataaggggcagagtacatatcatatgatgcaaatatatattgctttttcttaaaacagtacaaagataaaagtctaaagtggttgctgtggaggacaggggtcagtggtggaagtgagaccgaaatagactctgaagtaatatctggactttgaaattgttaagtgttttacatattaccaaactaagtttttaagatagtccctaaaattgaaagaatggtatctgaaatga

SEQ ID NO: 32389 - DNA, 1054 bp, Homo sapiens
acctggttgtctttggtcagacaagtgccctgagcatcgaagagtcatgcaggcctggagataaagtccctccaattaaaccaaatgctggggaagaatctgtcacgagtcttgacaaattgagatttgctgatggaagaagcataagaacatcggaactgcgactcagcatgcagaagtcaacgcaaaatcatgctgccgtgttccgtgtgggaagcttgttgcaagaaggttgtgggaaaatcagcaagctctatggagacctgaagcatctgaagacgtttgaccggggaatggtctggaacacggacctggtggagaccctggagctgcagaacctgatgctatgtgcgctgcagaccgtcaatggagcagaggcggggaaggagtcacggggcgcgcacgccggggaagactacaaggtgcggattgatgagtacgatcactccaagcccatccaggggcaacagaagaagccctttgaggagcactggaggaagcacaccctgtcctatgtggacgtcagcactgggaaggtcactgtggaatatagacccataatcgacaaaactttgaatgaggctgactgtgccactgtccccccagccattcactcctactgatgagacaagatgcggtgatgacagaatcagcttttgtaattatgtataatagctcatgcatgtgtcaatgtcataactgtctttatacgcttctgcactctggggaagaaggagtacattgaagggggattggcacccagtggccggggagcgtggcactttgtcccttgcttcattcttgtgacaagataaaactgggcacagctcttaaataaaatataaatgaacaaaatttcttttatttccaaatccatttaaaatattttactgttgtgactttagtcatatttgttgacctaaaaatcaaatgtaattatctttgtattctgttacatcaaaatccagatattttgttgtagtttcttttttttttttttcttgggaacgggtccggggcggggggccggtcccagttaatcggaggctctcaa

SEQ ID NO: 32390 - DNA, 1843 bp, Homo sapiens
agctcggtaccccgaccatttcaaccacacaaggacccagctaagaaacttcccctggttctgtcaccatcagaggaagcctgagctcctacatctctgtcctgcactttttcactttagtaacgaccctccaggctcggtagctgatgcctgtaatttcagcacttgggacgcttgaggcaggatgattgattgagcccgggaagtcaaggctctggcgagctgtgatcacaccattacgctccagcccaggtgacatagcgagaccctgtctcaaaagaaaaaaaaagtgtttttaataaaaacaggctgaaagaaaggattgaggtagtctcccagcgcttggagcaaaaagacaaagtatttgacaaactcttaggtacataaaggatgtctaagggaacatgcggacatggattactctggactcactgctggctgcacattgctggccagccatgtggcctctgtgcgttctgaacgtgtgatggtgccaacctcctgggctgaagtggaaatggaatgggttctagggcatctgtctcttagatcattttaacgtttgctgtgttttttctgtattgctctgttagagtaatgagaaatgtgatggtgtttctgggctcaggtgcggattgatgagtacgatcactccaagcccatccaggggcaacagaagaagccctttgaggagcactggaggaagcacaccctgtcctatgtggacgtcagcactgggaaggtcactgtggaatatagacccataatcgacaaaactttgaatgaggctgactgtgccactgtccccccagccattcactcctactgatgagacaagatgcggtgatgacagaatcagctttttgcacagccagagaacaacacatcacacacaagaaacagttgtgctcatgtgatgggggcctcagcactaggaaggagtggactgttggcgcacgcagcagcttgaataaatctgaaagtcactacgctgcgtaagagaagccaaataaagcgcatgctgtgtacagagggtgtcgagaatgcctcctacgtgacggaaagcagatccgtggttccctgcagactggcaggagcagattccaaaggcacaggaagaagcttgcaggtagaatgtgttcattaccttctgcgcattataccacaaaaaagctgggaataaaaatgctaaccaaaaaaaaaggtgaaagtagataaaatttctcaactgtgtgatgggtaaacgtgcaggtttgctgtcatgctttgtttatgaagctgtggggtacaaggactctcatagtcactgtggaatgcagaacgttgcagcctcatggaagaggatttggcagcatctaacaaaatgacatggcatttgcccttagactcagcaattctagaatctgcctcaaaaaaaactctggcaaagaaatgaaaggactttacccacagagttcttttcacagcctgaatgtgtttgccacaaagttcttcactgtggcatttgtaaaactggaaacaatcaaaatgtccatcagtaggggattgggaacattaattcgtgcagtggggaactccgtaccagaaggaggaatgaggaacgcctattgataaggggcagagtacatatcatatgatgcaaatatatattgctttttcttaaaacagtacaaagataaaagtctaaagtggttgctgtggaggacaggggtcagtggtggaagtgagaccgaaatagactctgaagtaatatctggactttgaaattgttaagtgttttacatattaccaaactaagtttttaagatagtccctaaaattgaaagaatggtatctgaaatga

SEQ ID NO: 32391 - DNA, 1286 bp, Homo sapiens
cgggtctagccaggctcaggcaaccctccacctcagcctctgaatagctgggactgcaggaagactacaaggtgcggattgatgagtacgatcactccaagcccatccaggggcaacagaagaagccctttgaggagcactggaggaagcacaccctgtcctatgtggacgtcagcactgggaaggtcactgtggaatatagacccataatcgacaaaactttgaatgaggctgactgtgccactgtccccccagccattcactcctactgatgagacaagatgcggtgatgacagaatcagctttttgcacagccagagaacaacacatcacacacaagaaacagttgtgctcatgtgatgggggcctcagcactaggaaggagtggactgttggcgcacgcagcagcttgaataaatctgaaagtcactacgctgcgtaagagaagccaaataaagcgcatgctgtgtacagagggtgtcgagaatgcctcctacgtgacggaaagcagatccgtggttccctgcagactggcaggagcagattccaaaggcacaggaagaagcttgcaggtagaatgtgttcattaccttctgcgcattataccacaaaaaagctgggaataaaaatgctaaccaaaaaaaaaggtgaaagtagataaaatttctcaactgtgtgatgggtaaacgtgcaggtttgctgtcatgctttgtttatgaagctgtggggtacaaggactctcatagtcactgtggaatgcagaacgttgcagcctcatggaagaggatttggcagcatctaacaaaatgacatggcatttgcccttagactcagcaattctagaatctgcctcaaaaaaaactctggcaaagaaatgaaaggactttacccacagagttcttttcacagcctgaatgtgtttgccacaaagttcttcactgtggcatttgtaaaactggaaacaatcaaaatgtccatcagtaggggattgggaacattaattcgtgcagtggggaactccgtaccagaaggaggaatgaggaacgcctattgataaggggcagagtacatatcatatgatgcaaatatatattgctttttcttaaaacagtacaaagataaaagtctaaagtggttgctgtggaggacaggggtcagtggtggaagtgagaccgaaatagactctgaagtaatatctggactttgaaattgttaagtgttttacatattaccaaactaagtttttaagatagtccctaaaattgaaagaatggtatctgaaatga

SEQ ID NO: 32392 - DNA, 1721 bp, Homo sapiens
agctcggtaccccgaccatttcaaccacacaaggacccagctaagaaacttcccctggttctgtcaccatcagaggaagcctgagctcctacatctctgtcctgcactttttcactttagtaacgaccctccaggctcggtagctgatgcctgtaatttcagcacttgggacgcttgaggcaggatgattgattgagcccgggaagtcaaggctctggcgagctgtgatcacaccattacgctccagcccaggtgacatagcgagaccctgtctcaaaagaaaaaaaaagtgtttttaataaaaacaggctgaaagaaaggattgaggtagtctcccagcgcttggagcaaaaagacaaagtatttgacaaactcttaggtacataaaggatgtctaagggaacatgcggacatggattactctggactcactgctggctgcacattgctggccagccatgtggcctctgtgcgttctgaacgtgtgatggtgccaacctcctgggctgaagtggaaatggaatgggttctagggcatctgtctcttagatcattttaacgtttgctgtgttttttctgtattgctctgttagagtaatgagaaatgtgatggtgtttctgggctcaggtgcggattgatgagtacgatcactccaagcccatccaggggcaacagaagaagccctttgaggagcactggaggaagcacaccctgtcctatgtggacgtcagcactgggaagtgcacagccagagaacaacacatcacacacaagaaacagttgtgctcatgtgatgggggcctcagcactaggaaggagtggactgttggcgcacgcagcagcttgaataaatctgaaagtcactacgctgcgtaagagaagccaaataaagcgcatgctgtgtacagagggtgtcgagaatgcctcctacgtgacggaaagcagatccgtggttccctgcagactggcaggagcagattccaaaggcacaggaagaagcttgcaggtagaatgtgttcattaccttctgcgcattataccacaaaaaagctgggaataaaaatgctaaccaaaaaaaaaggtgaaagtagataaaatttctcaactgtgtgatgggtaaacgtgcaggtttgctgtcatgctttgtttatgaagctgtggggtacaaggactctcatagtcactgtggaatgcagaacgttgcagcctcatggaagaggatttggcagcatctaacaaaatgacatggcatttgcccttagactcagcaattctagaatctgcctcaaaaaaaactctggcaaagaaatgaaaggactttacccacagagttcttttcacagcctgaatgtgtttgccacaaagttcttcactgtggcatttgtaaaactggaaacaatcaaaatgtccatcagtaggggattgggaacattaattcgtgcagtggggaactccgtaccagaaggaggaatgaggaacgcctattgataaggggcagagtacatatcatatgatgcaaatatatattgctttttcttaaaacagtacaaagataaaagtctaaagtggttgctgtggaggacaggggtcagtggtggaagtgagaccgaaatagactctgaagtaatatctggactttgaaattgttaagtgttttacatattaccaaactaagtttttaagatagtccctaaaattgaaagaatggtatctgaaatga

SEQ ID NO: 32393 - DNA, 1198 bp, Homo sapiens
gtgcagtggtgcagtctcagctcactgcagcctcaaactcctgggcagctcaggtgatcttcccgactcagccttctgagcagttggggctacagagacagagttttgccatgctgcccaggctggagtgcagtggtgtgatctcggctcactgcagcctccacctcctgggctccagcagtcctcccacctcaacctccctaagagctgagactacagtgcacagccagagaacaacacatcacacacaagaaacagttgtgctcatgtgatgggggcctcagcactaggaaggagtggactgttggcgcacgcagcagcttgaataaatctgaaagtcactacgctgcgtaagagaagccaaataaagcgcatgctgtgtacagagggtgtcgagaatgcctcctacgtgacggaaagcagatccgtggttccctgcagactggcaggagcagattccaaaggcacaggaagaagcttgcaggtagaatgtgttcattaccttctgcgcattataccacaaaaaagctgggaataaaaatgctaaccaaaaaaaaaggtgaaagtagataaaatttctcaactgtgtgatgggtaaacgtgcaggtttgctgtcatgctttgtttatgaagctgtggggtacaaggactctcatagtcactgtggaatgcagaacgttgcagcctcatggaagaggatttggcagcatctaacaaaatgacatggcatttgcccttagactcagcaattctagaatctgcctcaaaaaaaactctggcaaagaaatgaaaggactttacccacagagttcttttcacagcctgaatgtgtttgccacaaagttcttcactgtggcatttgtaaaactggaaacaatcaaaatgtccatcagtaggggattgggaacattaattcgtgcagtggggaactccgtaccagaaggaggaatgaggaacgcctattgataaggggcagagtacatatcatatgatgcaaatatatattgctttttcttaaaacagtacaaagataaaagtctaaagtggttgctgtggaggacaggggtcagtggtggaagtgagaccgaaatagactctgaagtaatatctggactttgaaattgttaagtgttttacatattaccaaactaagtttttaagatagtccctaaaattgaaagaatggtatctgaaatga

SEQ ID NO: 32394 - DNA, 1593 bp, Homo sapiens
agctcggtaccccgaccatttcaaccacacaaggacccagctaagaaacttcccctggttctgtcaccatcagaggaagcctgagctcctacatctctgtcctgcactttttcactttagtaacgaccctccaggctcggtagctgatgcctgtaatttcagcacttgggacgcttgaggcaggatgattgattgagcccgggaagtcaaggctctggcgagctgtgatcacaccattacgctccagcccaggtgacatagcgagaccctgtctcaaaagaaaaaaaaagtgtttttaataaaaacaggctgaaagaaaggattgaggtagtctcccagcgcttggagcaaaaagacaaagtatttgacaaactcttaggtacataaaggatgtctaagggaacatgcggacatggattactctggactcactgctggctgcacattgctggccagccatgtggcctctgtgcgttctgaacgtgtgatggtgccaacctcctgggctgaagtggaaatggaatgggttctagggcatctgtctcttagatcattttaacgtttgctgtgttttttctgtattgctctgttagagtaatgagaaatgtgatggtgtttctgggctcaggtgcggattgatgagtacgatcactccaagcccatccaggggcaacagaagaagccctttgaggagcactggaggaagcacaccctgtcctatgtggacgtcagcactgggaaggtcagtgtggagctcgttctcaccacagcccagcacccacacggccccgcccaggtctgcgggctggccttgctgatggtgaacgcagaggagcaggccagatttaaatcacctcccgacagatttgaggcaccgctgaaaaaggcactctgacagcagttgggcttcgggctggaaacagaatccagtgcctgcaggtggttcagaggagccttaaggaagggttgctccgtggtgtgggccagatggacgtcactgggcaggagcaagtgtccaaggcctggtggcaggggaagagatgatgattatggacctagcgagaagtcagcatctgtgtagtggggacagagccactaccagaaaccagtcccgagccaagggagcccagaagagacccctcccctctcttcccatgggctgggccaactggaagcatctgcaggggagcagaggggatgtggtgcagcccttagcatcccctgggcactgagcaagcagagaagggcagaaatggaggcagggttggggtaagcagcgtcctgggaacagccagccgagggtgtggtaggggggttgcagcttgttccacacaagcacagcgtcctgggaacagccagccgaggatgtggtagggggttgcagcttgttccacacaacgcagttcacccgtgtggcatttcccgctgggcattgagattcagaaatcatgaagatagaaagcttttacccttaagcttttcataacttgtaagggagagtcgtataatcacttagctgtgtctgtggaagttacctttggactctcactatcatctagtgtgtctgtgattcaggcagtaggtcattttcag

SEQ ID NO: 32395 - DNA, 1443 bp, Homo sapiens
agctcggtaccccgaccatttcaaccacacaaggacccagctaagaaacttcccctggttctgtcaccatcagaggaagcctgagctcctacatctctgtcctgcactttttcactttagtaacgaccctccaggctcggtagctgatgcctgtaatttcagcacttgggacgcttgaggcaggatgattgattgagcccgggaagtcaaggctctggcgagctgtgatcacaccattacgctccagcccaggtgacatagcgagaccctgtctcaaaagaaaaaaaaagtgtttttaataaaaacaggctgaaagaaaggattgaggtagtctcccagcgcttggagcaaaaagacaaagtatttgacaaactcttaggtacataaaggatgtctaagggaacatgcggacatggattactctggactcactgctggctgcacattgctggccagccatgtggcctctgtgcgttctgaacgtgtgatggtgccaacctcctgggctgaagtggaaatggaatgggttctagggcatctgtctcttagatcattttaacgtttgctgtgttttttctgtattgctctgttagagtaatgagaaatgtgatggtgtttctgggctcaggtgcggattgatgagtacgatcactccaagcccatccaggggcaacagaagaagccctttgaggagcactggaggaagcacaccctgtcctatgtggacgtcagcactgggaaggtcagtgtggagctcgttctcaccacagcccagcacccacacggccccgcccaggtctgcgggctggccttgctgatggtgaacgcagaggagcaggccagatttaaatcacctcccgacagatttgaggcaccgctgaaaaaggcactctgacagcagttgggcttcgggctggaaacagaatccagtgcctgcaggtggttcagaggagccttaaggaagggttgctccgtggtgtgggccagatggacgtcactgggcaggagcaagtgtccaaggcctggtggcaggggaagagatgatgattatggacctagcgagaagtcagcatctgtgtagtggggacagagccactaccagaaaccagtcccgagccaagggagcccagaagagacccctcccctctcttcccatgggctgggccaactggaagcatctgcaggggagcagaggggatgtggtgcagcccttagcatcccctgggcactgagcaagcagagaagggcagaaatggaggcagggttggggtaagcagcgtcctgggaacagccagccgagggtgtggtaggggggttgcagcttgttccacacaagcacagcgtcctgggagaatcgcttgagactgggaggcagaggttgcagtgaaccgagatcatgccaccgcacttcagcctgggtgacagagaaggactccgtctcaa

SEQ ID NO: 32396 - DNA, 1167 bp, Homo sapiens
aatgcctcctacgtgacggaaagcagatccgtggttccctgcagactggcaggagcagattccaaaggcacaggaagaagcttgcagtacaaagataaaaatctaaagtggttgctgtggaggacaggggtcagtggtggaagtgagaccgaaatagactctgaagtaatatctggacttttgaaatttgcacagccagagaacaacacatcacacacaagaaacagttgtgctcatgtgatgggggcctcagcactaggaaggagtggactgttggcgcacgcagcagcttgaataaatctgaaagtcactacgctgcgtaagagaagccaaataaagcgcatgctgtgtacagagggtgtcgagaatgcctcctacgtgacggaaagcagatccgtggttccctgcagactggcaggagcagattccaaaggcacaggaagaagcttgcaggtagaatgtgttcattaccttctgcgcattataccacaaaaaagctgggaataaaaatgctaaccaaaaaaaaaggtgaaagtagataaaatttctcaactgtgtgatgggtaaacgtgcaggtttgctgtcatgctttgtttatgaagctgtggggtacaaggactctcatagtcactgtggaatgcagaacgttgcagcctcatggaagaggatttggcagcatctaacaaaatgacatggcatttgcccttagactcagcaattctagaatctgcctcaaaaaaaactctggcaaagaaatgaaaggactttacccacagagttcttttcacagcctgaatgtgtttgccacaaagttcttcactgtggcatttgtaaaactggaaacaatcaaaatgtccatcagtaggggattgggaacattaattcgtgcagtggggaactccgtaccagaaggaggaatgaggaacgcctattgataaggggcagagtacatatcatatgatgcaaatatatattgctttttcttaaaacagtacaaagataaaagtctaaagtggttgctgtggaggacaggggtcagtggtggaagtgagaccgaaatagactctgaagtaatatctggactttgaaattgttaagtgttttacatattaccaaactaagtttttaagatagtccctaaaattgaaagaatggtatctgaaatga

SEQ ID NO: 32397 - DNA, 813 bp, Homo sapiens
agacaagggttctcccacttttcatgatgggagcatttttgtaaagcaaagcactgagaatctggtacagtgtcattttcgttgctctgttccactctaccgatctgccgtcatttacagtcccctgttgcgcatgtagatcatttttgaatttgttattggaaaatactgcagcaaataccttaaagtttacatgccgtaaatctacttttatagttaaaatttttcaaaaggaacacaagagatggctttttgtacatttttgtgcttaacttaccactgacttcttttcaaggtcactgtggaatatagacccataatcgacaaaactttgaatgaggctgactgtgccactgtccccccagccattcactcctactgatgagacaagatgcggtgatgacagaatcagcttttgtaattatgtataatagctcatgcatgtgtcaatgtcataactgtctttatacgcttctgcactctggggaagaaggagtacattgaagggggattggcacccagtggccggggagcgtggcactttgtcccttgcttcattcttgtgacaagataaaactgggcacagctcttaaataaaatataaatgaacaaaatttcttttatttccaaatccatttaaaatattttactgttgtgactttagtcatatttgttgacctaaaaatcaaatgtaattatctttgtattctgttacatcaaaatccagatattttgttgtagtttcttttttttttttttcttgggaacgggtccggggcggggggccggtcccagttaatcggaggctctcaa

SEQ ID NO: 32398 - DNA, 3691 bp, Homo sapiens
ctgaccctgggagcgcggggagcgccaagcctcttctagcgctcacctcgcgctcactcctgcgctcgccgggctgcttgtgcggggaaggggcggggcccgcctgggctcctccccggtcggagcccggagcaagggggcagagcgcgccgggcgctggttaaagaggcgtgcggaggcgggcgcggcgcatactgctagtggcgcgcggaggagcgacgcgtggagaagcggcccacgtgtctgcccagagtcaagtcctgtgttcttcccgctccttacgcatccgcggtccagggcgccctttcagccccgctggtgttcgcccaccccgggccgcgtgagtggggccccacgcagctccccgcactccgtgggccaacttggccaagcaactctgtccggggagcggtgcttgcggggggtgagtaccgggcactgcgcatgcggagctccaaattcaaacagctgttttcagaggctggagggcgggcggactggtagcagctggggctaggagaggctttctctaggaggcggccgctcgggagccatggtggaccggggccctctgctcacctcggccatcatcttctacctggccatcggggcggcgatcttcgaagtgctggaggagccacactggaaggaggccaagaaaaactactacacacagaagctgcatctgctcaaggagttcccgtgcctgggtcaggagggcctggacaagatcctagaggtggtatctgatgctgcaggacagggtgtggccatcacagggaaccagaccttcaacaactggaactggcccaatgcaatgatttttgcagcgaccgtcattaccaccattggatatggcaatgtggctcccaagacccccgccggtcgcctcttctgtgttttctatggtctcttcggggtgccgctctgcctgacgtggatcagtgccctgggcaagttcttcgggggacgtgccaagagactagggcagttccttaccaagagaggtgtgagtctgcggaaggcgcagatcacgtgcacagtcatcttcatcgtgtggggcgtcctagtccacctggtgatcccacccttcgtattcatggtgactgaggggtggaactacatcgagggcctctactactccttcatcaccatctccaccatcggcttcggtgactttgtggccggtgtgaaccccagcgccaactaccacgccctgtaccgctacttcgtggagctctggatctacttggggctggcctggctgtccctttttgtcaactggaaggtgagcatgtttgtggaagtccacaaagccattaagaagcggcggcggcgacggaaggagtcctttgagagctccccacactcccggaaggccctgcaggtgaaggggagcacagcctccaaggacgtcaacatcttcagctttctttccaagaaggaagagacctacaacgacctcatcaagcagatcgggaagaaggccatgaagacaagcgggggtggggagacgggcccgggcccagggctggggcctcaaggcggtgggctcccagcactgcccccttccctggtgcccctggtagtctactccaagaaccgggtgcccaccttggaagaggtgtcacagacactgaggagcaaaggccacgtatcaaggtccccagatgaggaggctgtggcacgggcccctgaagacagctcccctgcccccgaggtgttcatgaaccagctggaccgcatcagcgaggaatgcgagccatgggacgcccaggactaccacccactcatcttccaggacgccagcatcaccttcgtgaacacggaggctggcctctcagacgaggagacctccaagtcctcgctagaggacaacttggcaggggaggagagcccccagcagggggctgaagccaaggcgcccctgaacatgggcgagttcccctcctcctccgagtccaccttcaccagcactgagtctgagctctctgtgccttacgaacagctgatgaatgagtacaacaaggctaacagccccaagggcacatgaggcagggccggctccccaccccacctttgatggcctcttcccccctcaccctagggtgtcccgagatgaccgggacgcctggcccctggtgggggggcagcctcggaactgggagtggggggccaggggccttcctaaccttccatcatcctcagctagatgtatgcccgggacagggcctctgttctccagctgaaccataccctggctgtgggggcatctgtcctgagcttggctggtgtatctcacaatgcaaagacatgctggctggcgggacaggtgggcaggactgaccctgaggaggccttgcctgcagggtctttgtctcaccatttggtggagtatcacacggttctctgaggtctggggcctcagctgtttaagtttaccggtattactgagctcggcatttggagagggagctctgaagtgtctggggaggtaccgctgtgcgtggggtcaggtgtttccgtaccacagcaggagcagggcccgcccgcatcccagctgtgggcctgccggtcaggtcgggcacctactacaaaccgtagtggggtggaggctgctggaggtgggagtgaggagatgagggcagggtctcaaacagtcctgactcacagggcctggaaacaagtcctatgtgggcctggggcctggggtcctcatcctccttgttggtctactcaggcccagcccagagctgtgttccctgtctcaggtcaagcagtggcagacgcaaggctttctgtgggcccccaagtggtaggagggagagtagcagagcatgggttactggaagccgggactgctagggctggtggccagggagctgcaagagtgaggctcagctctggctggttctgcccttacccctcctgcccgcctgagaactgcacaccctgcccgctggccccaggacctgcactcccaatcctgctgtcttctccttccctgtgccctgaacaaggacctcactgcccgccttcccctcccaccagcccccctggggctggcccactgtgtcctgaatgtttttgttattttttgttttattttttaaacaaactgctgtttttatatacctggaatctgttgttggcttcagagccagtggttaaagagcagggtcccaaggattgggagatctagtgtctgccctcctgccctgcaactcaattgggcctttttcggtgacctcatccaaggccatgatgtcaagggccatgtccccaagcagaggtggagaaggggacactgaggtgagcaaaagcaggaaggggcatccactgcgggtgactggaggccgggcaggaagcaagtcatcagagccgctcagctccgttcactctctgccttctgccccactactgtggggcagtggggccagagcccacctccccaacatgtgaagacagtgatgggcacgtgcccacacccccacttctctagccgtttgcagaggccgccacccagcaggggcctgaaaaggagcagcctcgtatttttctgtgaaatgttttaatgaaccatgttgttgctggttgtcctggcatcgcgcacactgtatgtacatactggcaacgatgtcaaatgtaatttattttaacatttttacaataaaacatgaggtggacaggc

SEQ ID NO: 32399 - DNA, 994 bp, Homo sapiens
ctgaccctgggagcgcggggagcgccaagcctcttctagcgctcacctcgcgctcactcctgcgctcgccgggctgcttgtgcggggaaggggcggggcccgcctgggctcctccccggtcggagcccggagcaagggggcagagcgcgccgggcgctggttaaagaggcgtgcggaggcgggcgcggcgcatactgctagtggcgcgcggaggagcgacgcgtggagaagcggcccacgtgtctgcccagagtcaagtcctgtgttcttcccgctccttacgcatccgcggtccagggcgccctttcagccccgctggtgttcgcccaccccgggccgcgtgagtggggccccacgcagctccccgcactccgtgggccaacttggccaagcaactctgtccggggagcggtgcttgcggggggtgagtaccgggcactgcgcatgcggagctccaaattcaaacagctgttttcagaggctggagggcgggcggactggtagcagctggggctaggagaggctttctctaggaggcggccgctcgggagccatggtggaccggggccctctgctcacctcggccatcatcttctacctggccatcggggcggcgatcttcgaagtgctggaggagccacactggaaggaggccaagaaaaactactacacacagaagctgcatctgctcaaggagttcccgtgcctgggtcaggagggcctggacaagatcctagaggtcagtcgccgcctgtacccccatatacatctgaagctggcttgagctttagggggcgctgaaaggaagaccccttcacagctttgggtgaccctcagtccctgtggaaggtccagggggtgatgagagagcgtgtctcatcatgggtcaggcttcgaggatctgtcgctcacccgagggacacaggggtcccccaggcgcggagactctttggaacttagtttggccggagacaaattggagttgattcccggg

SEQ ID NO: 32400 - DNA, 3970 bp, Homo sapiens
ctgaccctgggagcgcggggagcgccaagcctcttctagcgctcacctcgcgctcactcctgcgctcgccgggctgcttgtgcggggaaggggcggggcccgcctgggctcctccccggtcggagcccggagcaagggggcagagcgcgccgggcgctggttaaagaggcgtgcggaggcgggcgcggcgcatactgctagtggcgcgcggaggagcgacgcgtggagaagcggcccacgtgtctgcccagagtcaagtcctgtgttcttcccgctccttacgcatccgcggtccagggcgccctttcagccccgctggtgttcgcccaccccgggccgcgtgagtggggccccacgcagctccccgcactccgtgggccaacttggccaagcaactctgtccggggagcggtgcttgcggggggtgagtaccgggcactgcgcatgcggagctccaaattcaaacagctgttttcagaggctggagggcgggcggactggtagcagctggggctaggagaggctttctctaggaggcggccgctcgggagccatggtggaccggggccctctgctcacctcggccatcatcttctacctggccatcggggcggcgatcttcgaagtgctggaggagccacactggaaggaggccaagaaaaactactacacacagaagctgcatctgctcaaggagttcccgtgcctgggtcaggagggcctggacaagatcctagaggtggtatctgatgctgcaggacagggtgtggccatcacagggaaccagaccttcaacaactggaactggcccaatgcaatgatttttgcagcgaccgtcattaccaccattggatatggcaatgtggctcccaagacccccgccggtcgcctcttctgtgttttctatggtctcttcggggtgccgctctgcctgacgtggatcagtgccctgggcaagttcttcgggggacgtgccaagagactagggcagttccttaccaagagaggtgtgagtctgcggaaggcgcagatcacgtgcacagtcatcttcatcgtgtggggcgtcctagtccacctggtgatcccacccttcgtattcatggtgactgaggggtggaactacatcgagggcctctactactccttcatcaccatctccaccatcggcttcggtgactttgtggccggtgtgaaccccagcgccaactaccacgccctgtaccgctacttcgtggagctctggatctacttggggctggcctggctgtccctttttgtcaactggaaggtgagcatgtttgtggaagtccacaaagccattaagaagcggcggcggcgacggaaggagtcctttgagagctccccacactcccggaaggccctgcaggtgaaggggagcacagcctccaaggacgtcaacatcttcagctttctttccaagaaggaagagacctacaacgacctcatcaagcagatcgggaagaaggccatgaagacaagcgggggtggggagacgggcccgggcccagggctggggcctcaaggcggtgggctcccagcactgcccccttccctggtgcccctggtagtctactccaagaaccgggtgcccaccttggaagaggtgtcacagacactgaggagcaaaggccacgtatcaaggtccccagatgaggaggctgtggcacgggcccctgaagacagctcccctgcccccgaggtgttcatgaaccagctggaccgcatcagcgaggaatgcgagccatgggacgcccaggactaccacccactcatcttccaggacgccagcatcaccttcgtgaacacggaggctggcctctcagacgaggagacctccaagtcctcgctagaggacaacttggcaggggaggagagcccccagcagggggctgaagccaaggcgcccctgaacatgggcgagttcccctcctcctccgagtccaccttcaccagcactgagtctgagctctctgtgccttacgaacagctgatgaatgagtacaacaaggctaacagccccaagggcacatgaggcagggccggctccccaccccacctttgatggcctcttcccccctcaccctagggtgtcccgagatgaccgggacgcctggcccctggtgggggggcagcctcggaactgggagtggggggccaggggccttcctaaccttccatcatcctcagctagatgtatgcccgggacagggcctctgttctccagctgaaccataccctggctgtgggggcatctgtcctgagcttggctggtgtatctcacaatgcaaagacatgctggctggcgggacaggtgggcaggactgaccctgaggaggccttgcctgcagggtctttgtctcaccatttggtggagtatcacacggttctctgaggtctggggcctcagctgtttaagtttaccggtattactgagctcggcatttggagagggagctctgaagtgtctggggaggtaccgctgtgcgtggggtcaggtgtttccgtaccacagcaggagcagggcccgcccgcatcccagctgtgggcctgccggtcaggtcgggcacctactacaaaccgtagtggggtggaggctgctggaggtgggagtgaggagatgagggcagggtctcaaacagtcctgactcacagggcctggaaacaagtcctatgtgggcctggggcctggggtcctcatcctccttgttggtctactcaggcccagcccagagctgtgttccctgtctcaggtcaagcagtggcagacgcaaggctttctgtgggcccccaagtggtaggagggagagtagcagagcatgggttactggaagccgggactgctagggctggtggccagggagctgcaagagtgaggctcagctctggctggttctgcccttacccctcctgcccgcctgagaactgcacaccctgcccgctggccccaggacctgcactcccaatcctgctgtcttctccttccctgtgccctgaacaaggacctcactgcccgccttcccctcccaccagcccccttgggccaggcagggtgaggccaaattgctcttggcccacaaatgggtgatggtcagatatgtgaatcaagctcctttctctagctagtgtttgatgtgcacgtgtgtgtgcacagtgcgtgtgtgcacacgcacacctgtgcactcgtgtgtgtttaagaaaggaaaggatttgggctggggagcaaaagataatgtgaaactgttggtggactctctggtgaggggtgggcagaacttgctgctactagagttcttgggttctccatgatgttcaccctggggctggcccactgtgtcctgaatgtttttgttattttttgttttattttttaaacaaactgctgtttttatatacctggaatctgttgttggcttcagagccagtggttaaagagcagggtcccaaggattgggagatctagtgtctgccctcctgccctgcaactcaattgggcctttttcggtgacctcatccaaggccatgatgtcaagggccatgtccccaagcagaggtggagaaggggacactgaggtgagcaaaagcaggaaggggcatccactgcgggtgactggaggccgggcaggaagcaagtcatcagagccgctcagctccgttcactctctgccttctgccccactactgtggggcagtggggccagagcccacctccccaacatgtgaagacagtgatgggcacgtgcccacacccccacttctctagccgtttgcagaggccgccacccagcaggggcctgaaaaggagcagcctcgtatttttctgtgaaatgttttaatgaaccatgttgttgctggttgtcctggcatcgcgcacactgtatgtacatactggcaacgatgtcaaatgtaatttattttaacatttttacaataaaacatgaggtggacaggc

SEQ ID NO: 32401 - DNA, 4114 bp, Homo sapiens
ctgaccctgggagcgcggggagcgccaagcctcttctagcgctcacctcgcgctcactcctgcgctcgccgggctgcttgtgcggggaaggggcggggcccgcctgggctcctccccggtcggagcccggagcaagggggcagagcgcgccgggcgctggttaaagaggcgtgcggaggcgggcgcggcgcatactgctagtggcgcgcggaggagcgacgcgtggagaagcggcccacgtgtctgcccagagtcaagtcctgtgttcttcccgctccttacgcatccgcggtccagggcgccctttcagccccgctggtgttcgcccaccccgggccgcgtgagtggggccccacgcagctccccgcactccgtgggccaacttggccaagcaactctgtccggggagcggtgcttgcggggggtgagtaccgggcactgcgcatgcggagctccaaattcaaacagctgttttcagaggctggagggcgggcggactggtagcagctggggctaggagaggctttctctaggaggcggccgctcgggagccatggtggaccggggccctctgctcacctcggccatcatcttctacctggccatcggggcggcgatcttcgaagtgctggaggagccacactggaaggaggccaagaaaaactactacacacagaagctgcatctgctcaaggagttcccgtgcctgggtcaggagggcctggacaagatcctagaggtggtatctgatgctgcaggacagggtgtggccatcacagggaaccagaccttcaacaactggaactggcccaatgcaatgatttttgcagcgaccgtcattaccaccattggatatggcaatgtggctcccaagacccccgccggtcgcctcttctgtgttttctatggtctcttcggggtgccgctctgcctgacgtggatcagtgccctgggcaagttcttcgggggacgtgccaagagactagggcagttccttaccaagagaggtgtgagtctgcggaaggcgcagatcacgtgcacagtcatcttcatcgtgtggggcgtcctagtccacctggtgatcccacccttcgtattcatggtgactgaggggtggaactacatcgagggcctctactactccttcatcaccatctccaccatcggcttcggtgactttgtggccggtgtgaaccccagcgccaactaccacgccctgtaccgctacttcgtggagctctggatctacttggggctggcctggctgtccctttttgtcaactggaaggtgagcatgtttgtggaagtccacaaagccattaagaagcggcggcggcgacggaaggagtcctttgagagctccccacactcccggaaggccctgcaggtgaaggggagcacagcctccaaggacgtcaacatcttcagctttctttccaagaaggaagagacctacaacgacctcatcaagcagatcgggaagaaggccatgaagacaagcgggggtggggagacgggcccgggcccagggctggggcctcaaggcggtgggctcccagcactgcccccttccctggtgcccctggtagtctactccaagaaccgggtgcccaccttggaagaggtgtcacagacactgaggagcaaaggccacgtatcaaggtccccagatgaggaggctgtggcacgggcccctgaagacagctcccctgcccccgaggtgttcatgaaccagctggaccgcatcagcgaggaatgcgagccatgggacgcccaggactaccacccactcatcttccaggacgccagcatcaccttcgtgaacacggaggctggcctctcagacgaggagacctccaagtcctcgctagaggacaacttggcaggggaggagagcccccagcagggggctgaagccaaggcgcccctgaacatgggcgagttcccctcctcctccgagtccaccttcaccagcactgagtctgagctctctgtgccttacgaacagctgatgaatgagtacaacaaggctaacagccccaagggcacatgaggcagggccggctccccaccccacctttgatggcctcttcccccctcaccctagggtgtcccgagatgaccgggacgcctggcccctggtgggggggcagcctcggaactgggagtggggggccaggggccttcctaaccttccatcatcctcagctagatgtatgcccgggacagggcctctgttctccagctgaaccataccctggctgtgggggcatctgtcctgagcttggctggtgtatctcacaatgcaaagacatgctggctggcgggacaggtgggcaggactgaccctgaggaggccttgcctgcagggtctttgtctcaccatttggtggagtatcacacggttctctgaggtctggggcctcagctgtttaagtttaccggtattactgagctcggcatttggagagggagctctgaagtgtctggggaggtaccgctgtgcgtggggtcaggtgtttccgtaccacagcaggagcagggcccgcccgcatcccagctgtgggcctgccggtcaggtcgggcacctactacaaaccgtagtggggtggaggctgctggaggtgggagtgaggagatgagggcagggtctcaaacagtcctgactcacagggcctggaaacaagtcctatgtgggcctggggcctggggtcctcatcctccttgttggtctactcaggcccagcccagagctgtgttccctgtctcaggtcaagcagtggcagacgcaaggctttctgtgggcccccaagtggtaggagggagagtagcagagcatgggttactggaagccgggactgctagggctggtggccagggagctgcaagagtgaggctcagctctggctggttctgcccttacccctcctgcccgcctgagaactgcacaccctgcccgctggccccaggacctgcactcccaatcctgctgtcttctccttccctgtgccctgaacaaggacctcactgcccgccttcccctcccaccagcccccttgggccaggcagggtgaggccaaattgctcttggcccacaaatgggtgatggtcagatatgtgaatcaagctcctttctctagctagtgtttgatgtgcacgtgtgtgtgcacagtgcgtgtgtgcacacgcacacctgtgcactcgtgtgtgtttaagaaaggaaaggatttgggctggggagcaaaagataatgtgaaactgttggtggactctctggtgaggggtgggcagaacttgctgctactagagttcttgggttctccatgatgttcaccctggggctggcccactgtgtcctgaatgtttttgttattttttgttttattttttaaacaaactgctgtttttatatacctggaatctgttgttggcttcagagccagtggttaaagagcagggtcccaaggattgggagatctagtgtctgccctcctgccctgcaactcaattgggcctttttcggtgacctcatccaaggccatgatgtcaagggccatgtccccaagcagaggtggagaaggggacactgaggtgagcaaaagcaggaaggggcatccactgcgggtgactggaggccgggcaggaagcaagtcatcagagccgctcagctccgttcactctctgccttctgccccactactgtggggcagtggggccagagcccacctccccaacatgtgaagacagtgatgggcacgtgcccacacccccacttctctagccgtttgcagaggccgccacccagcaggggcctgaaaaggagcagcctcgtatttttctgtgaaatgttttaatgaaccatgttgttgctggttgtcctggcatcgcgcacactgtatgtacatactggcaacgatgtcaaatgtaatttattttaacatttttacaataaaacatgaggtggacaggccagcttggtgtgtgctgtgtgtgggtcaggttagagaggggttggcttctggcctctgagcagcaggggagcctgggcgcatccacagaagatagagaggactcaggacagactgataagaggattggatggtctggaggggag

SEQ ID NO: 32402 - DNA, 449 bp, Homo sapiens
tcatgatcagagtatgatcaagggaaatatcattacttaagtactgacaatagatcaatatcaatttatcttagagaacgggctgtgtgtgtgttggaagcaaggcccactggtttgaccacccctcctgttcttggcctcactctctccttcctcaggatatggcaatgtggctcccaagacccccgccggtcgcctcttctgtgttttctatggtctcttcggggtgccgctctgcctgacgtggatcagtgccctgggcaagttcttcgggggacgtgccaagagactagggcagttccttaccaagagaggtgtgagtctggtatgtcccctaccctgggtgttgggcagagatgggggaaccatgacaggtgaggggaggacaggaggcctctaggaattggaccaagggtgtaaggacagatggcaagaggatagtttcagag

SEQ ID NO: 32403 - DNA, 1041 bp, Homo sapiens
atggatacaggccccgaccagtcctacttctccggcaatcactggttcgtcttctcggtgtaccttctcactttcctggtggggctccccctcaacctgctggccctggtggtcttcgtgggcaagctgcggtgccgcccggtggccgtggacgtgctcctgctcaacctgaccgcctcggacctgctcctgctgctgttcctgcctttccgcatggtggaggcagccaatggcatgcactggcccctgcccttcatcctctgcccactctctggattcatcttcttcaccaccatctatctcaccgccctcttcctggcagctgtgagcattgaacgcttcctgagtgtggcccacccactgtggtacaagacccggccgaggctggggcaggcaggtctggtgagtgtggcctgctggctgttggcctctgctcactgcagcgtggtctacgtcatagaattctcaggggacatctcccacagccagggcaccaatgggacctgctacctggagttctggaaggaccagctagccatcctcctgcccgtgcggctggagatggctgtggtcctctttgtggtcccgctgatcatcaccagctactgctacagccgcctggtgtggatcctcggcagagggggcagccaccgccggcagaggagggtggcggggctggtggcggccacgctgctcaacttccttgtctgctttgggccctacaacgtgtcccatgtcgtgggctatatctgcggtgaaagcccggtgtggaggatctacgtgacgcttctcagcaccctgaactcctgtgtcgacccctttgtctactacttctcctcctccgggttccaagccgactttcatgagctgctgaggaggttgtgtgggctctggggccagtggcagcaggagagcagcatggagctgaaggagcagaagggaggggaggagcagagagcggaccgaccagctgaaagaaagaccagtgaacactcacagggctgtggaactggtggccaggtggcctgtgctgaaaactag

SEQ ID NO: 32404 - DNA, 409 bp, Homo sapiens
gtttcaggatacaaaattaatttgcataaatcagcagctcttctatacaccaacagtgaccaagctgagaatcaaatcaagaacttaactccttttgcaatagctgcaaaaaaccccaaaatactttgtacctaaccaaggaggtgaaagacctctacaaggaaaactacaaaacactgctgaaacaaatcatagacaacacaaacaaatggaaacacatcccatgctcatggatgggtaaaatcaatattgtgaaaatgaccatactgccaaaagcaatctacaaattcagtgcagttcccatcaaaataccaccatcattcttcacagaactagaaaaaccaatcctaaaatccatatgaaacctaaaagagcctgcatagccaaagcaagactaagcaaaaataaa

SEQ ID NO: 32405 - DNA, 319 bp, Homo sapiens
tgtatttttagtagagacggggcttcactgtgttaagccagggtgatcttgatctcctgacctcgtgatctgcccacctcggcttgagccactgcacccggcctcaacattttcttttttagtgataggattaacattcattactcaccgaacaaacgtttgagctctttctatgtgccattgtatgcagagtgatgaaacaagataaacataatccctccctgatggatcttataattcggtgaagaagaaagatattaaatacgaaagtttgttgagaattagaataaggaaagtaataaagaaaatacattttctg

SEQ ID NO: 32406 - DNA, 138 bp, Homo sapiens
cctcaccacaacctcatgggtggtcggtcaatgtcgtaggcccgctttacagccgaggagacagaggcttccagaggcaaacacactggtccatgagtagcagaacgagggtaggcccaggaagccatgtccttggcc

SEQ ID NO: 32407 - DNA, 308 bp, Homo sapiens
tggttcctctttaaagttcgtagtagttagcagtagaagaaatagtgaaagtcttaaagtctttgatccttcttatagtgcatagaagaaaacgctgacgtatgctgccttctctctctgcctcagctacctaaaagggaagggccccctgtcccatgatcacttgacttgcttgaccttatcaatcacttagaagattcaccctccttaccctgcccccttgtcttgtatgcaataaatatcagtgcgcccagtggttcggggccactaccagtctctgcgtcttggtggtggtggtcccctgggcc

SEQ ID NO: 32408 - DNA, 164 bp, Homo sapiens
tctaaattgcagtgccttttgagtgaaagagagtgctgacaataaatatgttacaggagcaggtgttaagctggactatcccaggcaaattgggacatatggtcaccctagttaaagggtgctgttgtagctttgctaccttcttttttttaaatgagacggag

SEQ ID NO: 32409 - DNA, 3119 bp, Homo sapiens
aagacgcagtcttcagcaaggaagtgctgggaacgccctggagtgaacccaggaagatgcctgcagtgggtgccagggcccctctccaccgtccctgctgggcttcggggccacgcccgactgctgtgaacggcctgcggagcaccacgtgcgacggctggaggcgagaggtctgcctttgatgtggctgttggtgcagggcctgtggtgccttccgcagcggaaatggcgcgccgcccggggagggcgggagcagcgtcccgggtgcccctgtgaggatgagcgacgagatgactggagggtccctgaagacctcactagggtgcccccagccggtccgctcccaggaagcgacacccccacagccccagggctgcagctgagggggtcgccactctggctgggcgaggctgggcccttgggggcaggcgccagagtggcctcaggctctacaagatgcctgaaaacaccaacctctccagggctcactagcattggacgctttcacgctctgccctggccggaagccccctcaccccgcgcgatgtgcaaactcctgcagggctcactcagtttccagaactttaattattggaaagttctccctggtccagcccccaaatctgccgtgaacgttgacagctgagttgctgctccatgcgtgctttggctgagagcagaggggacccctgtcctccctgagctgctgacgaggggaggggtgaagggtggggcctctggagagggcaggtcccggggaagctccggactcctagaggggcggccaggtgggggccctggtgaccaggacagactgtggtgttttttaacgtaaaggagatccgcggtgtgagggaccccctgggtcctgcacgccgcctggtggcaggccgggccatggtgggtgctcacgcccccggcatgtggccgccctcagtgggaggggctctgagaacgactttttaaaacgcagagaaaagctccattcttcccaggacctcagcgcagccctggcccaggaaggcaggagacagaggccaggacggtccagaggtgtcgaaatgtcctggggacctgagcagcagccaccagggaagaggcagggagggagctgaggaccaggcttggttgtgagaatccctgagcccaggcggtagatgccaggaggtgtctggactggctgggccatgcctgggctgacctgtccagccagggagagggtgtgagggcagatctgggggtgcccagatggaaggaggcaggcatgggggacacccaaggccccctggcagcaccatgaactaagcaggacacctggaggggaagaactgtggggacctggaggcctccaacgactccttcctgcttcctggacaggactatggctgtgcagggatcccagagaagacttctgggctccctcaactccacccccacagccatcccccagctggggctggctgccaaccagacaggagcccggtgcctggaggtgtccatctctgacgggctcttcctcagcctggggctggtgagcttggtggagaacgcgctggtggtggccaccatcgccaagaaccggaacctgcactcacccatgtactgcttcatctgctgcctggccttgtcggacctgctggtgagcgggagcaacgtgctggagacggccgtcatcctcctgctggaggccggtgcactggtggcccgggctgcggtgctgcagcagctggacaatgtcattgacgtgatcacctgcagctccatgctgtccagcctctgcttcctgggcgccatcgccgtggaccgctacatctccatcttctacgcactgcgctaccacagcatcgtgaccctgccgcgggcgcggcgagccgttgcggccatctgggtggccagtgtcgtcttcagcacgctcttcatcgcctactacgaccacgtggccgtcctgctgtgcctcgtggtcttcttcctggctatgctggtgctcatggccgtgctgtacgtccacatgctggcccgggcctgccagcacgcccagggcatcgcccggctccacaagaggcagcgcccggtccaccagggctttggccttaaaggcgctgtcaccctcaccatcctgctgggcattttcttcctctgctggggccccttcttcctgcatctcacactcatcgtcctctgccccgagcaccccacgtgcggctgcatcttcaagaacttcaacctctttctcgccctcatcatctgcaatgccatcatcgaccccctcatctacgccttccacagccaggagctccgcaggacgctcaaggaggtgctgacatgctcctggtgagcgcggtgcacgcggctttaagtgtgctgggcagagggaggtggtgatattgtgtggtctggttcctgtgtgaccctgggcagttccttacctccctggtccccgtttgtcaaagaggatggactaaatgatctctgaaagtgttgaagcgcggacccttctgggtccagggaggggtccctgcaaaactccaggcaggacttctcaccagcagtcgtggggaacggaggaggacatggggaggttgtggggcctcaggctccgggcaccaggggccaacctcaggctcctaaagagacattttccgcccactcctgggacactccgtctgctccaatgactgagcagcatccaccccaccccatctttgctgccagctctcaggaccgtgccctcgtcagctgggatgtgaagtctctgggtggaagtgtgtgccaagagctactcccacagcagccccaggagaaggggctttgtgaccagaaagcttcatccacagccttgcagcggctcctgcaaaaggaggtgaaatccctgcctcaggccaagggaccaggtttgcaggagcccccctagtggtatggggctgagccctcctgagggccggttctaaggctcagactgggcactggggcctcagcctgctttcctgcagcagtcgcccaagcagacagccctggcaaatgcctgactcagtgaccagtgcctgtgagcatggggccaggaaagtctggtaataaatgtgactcagcatcacccaccttagccccttcaaaaaagtgct

SEQ ID NO: 32410 - DNA, 2417 bp, Homo sapiens
  misc_feature (28)..(28): n is a, c, g, or t
gtcggcacgaggccctggtccagcccgncaaatctgccgagagggcaggtcccggggaagctccggactcctagaggggcggccaggtgggggccctggtgaccaggacagactgtggtgttttttaacgtaaaggagatccgcggtgtgagggaccccctgggtcctgcacgccgcctggtggcaggccgggccatggtgggtgctcacgcccccggcatgtggccgccctcagtgggaggggctctgagaacgactttttaaaacgcagagaaaagctccattcttcccaggacctcagcgcagccctggcccaggaaggcaggagacagaggccaggacggtccagaggtgtcgaaatgtcctggggacctgagcagcagccaccagggaagaggcagggagggagctgaggaccaggcttggttgtgagaatccctgagcccaggcggtagatgccaggaggtgtctggactggctgggccatgcctgggctgacctgtccagccagggagagggtgtgagggcagatctgggggtgcccagatggaaggaggcaggcatgggggacacccaaggccccctggcagcaccatgaactaagcaggacacctggaggggaagaactgtggggacctggaggcctccaacgactccttcctgcttcctggacaggactatggctgtgcagggatcccagagaagacttctgggctccctcaactccacccccacagccatcccccagctggggctggctgccaaccagacaggagcccggtgcctggaggtgtccatctctgacgggctcttcctcagcctggggctggtgagcttggtggagaacgcgctggtggtggccaccatcgccaagaaccggaacctgcactcacccatgtactgcttcatctgctgcctggccttgtcggacctgctggtgagcgggagcaacgtgctggagacggccgtcatcctcctgctggaggccggtgcactggtggcccgggctgcggtgctgcagcagctggacaatgtcattgacgtgatcacctgcagctccatgctgtccagcctctgcttcctgggcgccatcgccgtggaccgctacatctccatcttctacgcactgcgctaccacagcatcgtgaccctgccgcgggcgcggcgagccgttgcggccatctgggtggccagtgtcgtcttcagcacgctcttcatcgcctactacgaccacgtggccgtcctgctgtgcctcgtggtcttcttcctggctatgctggtgctcatggccgtgctgtacgtccacatgctggcccgggcctgccagcacgcccagggcatcgcccggctccacaagaggcagcgcccggtccaccagggctttggccttaaaggcgctgtcaccctcaccatcctgctgggcattttcttcctctgctggggccccttcttcctgcatctcacactcatcgtcctctgccccgagcaccccacgtgcggctgcatcttcaagaacttcaacctctttctcgccctcatcatctgcaatgccatcatcgaccccctcatctacgccttccacagccaggagctccgcaggacgctcaaggaggtgctgacatgctcctggtgagcgcggtgcacgcggctttaagtgtgctgggcagagggaggtggtgatattgtgtggtctggttcctgtgtgaccctgggcagttccttacctccctggtccccgtttgtcaaagaggatggactaaatgatctctgaaagtgttgaagcgcggacccttctgggtccagggaggggtccctgcaaaactccaggcaggacttctcaccagcagtcgtggggaacggaggaggacatggggaggttgtggggcctcaggctccgggcaccaggggccaacctcaggctcctaaagagacattttccgcccactcctgggacactccgtctgctccaatgactgagcagcatccaccccaccccatctttgctgccagctctcaggaccgtgccctcgtcagctgggatgtgaagtctctgggtggaagtgtgtgccaagagctactcccacagcagccccaggagaaggggctttgtgaccagaaagcttcatccacagccttgcagcggctcctgcaaaaggaggtgaaatccctgcctcaggccaagggaccaggtttgcaggagcccccctagtggtatggggctgagccctcctgagggccggttctaaggctcagactgggcactggggcctcagcctgctttcctgcagcagtcgcccaagcagacagccctggcaaatgcctgactcagtgaccagtgcctgtgagcatggggccaggaaagtctggtaataaatgtgactcagcatcacccaccttagccccttcaaaaaagtgct

SEQ ID NO: 32411 - DNA, 2738 bp, Homo sapiens
aagacgcagtcttcagcaaggaagtgctgggaacgccctggagtgaacccaggaagatgcctgcagtgggtgccagggcccctctccaccgtccctgctgggcttcggggccacgcccgactgctgtgaacggcctgcggagcaccacgtgcgacggctggaggcgagaggtctgcctttgatgtggctgttggtgcagggcctgtggtgccttccgcagcggaaatggcgcgccgcccggggagggcgggagcagcgtcccgggtgcccctgtgaggatgagcgacgagatgactggagggtccctgaagacctcactagggtgcccccagccggtccgctcccaggaagcgacacccccacagccccagggctgcagctgagggggtcgccactctggctgggcgaggctgggcccttgggggcaggcgccagagtggcctcaggctctacaagatgcctgaaaacaccaacctctccagggctcactagcattggacgctttcacgctctgccctggccggaagccccctcaccccgcgcgatgtgcaaactcctgcagggctcactcagtttccagaactttaattattggaaagttctccctggtccagcccccaaatctgccgtgaacgttgacagctgagttgctgctccatgcgtgctttggctgagagcagaggggacccctgtcctccctgagctgctgacgaggggaggggtgaagggtggggcctctggagagggcaggtcccggggaagctccggactcctagaggggcggccaggtgggggccctggtgaccaggacagactgtggtgttttttaacgtaaaggagatccgcggtgtgagggaccccctgggtcctgcacgccgcctggtggcaggccgggccatggtgggtgctcacgcccccggcatgtggccgccctcagtgggaggggctctgagaacgactttttaaaacgcagagaaaagctccattcttcccaggacctcagcgcagccctggcccaggaaggcaggagacagaggccaggacggtccagaggtgtcgaaatgtcctggggacctgagcagcagccaccagggaagaggcagggagggagctgaggaccaggcttggttgtgagaatccctgagcccaggcggtagatgccaggaggtgtctggactggctgggccatgcctgggctgacctgtccagccagggagagggtgtgagggcagatctgggggtgcccagatggaaggaggcaggcatgggggacacccaaggccccctggcagcaccatgaactaagcaggacacctggaggggaagaactgtggggacctggaggcctccaacgactccttcctgcttcctggacaggactatggctgtgcagggatcccagagaagacttctgggctccctcaactccacccccacagccatcccccagctggggctggctgccaaccagacaggagcccggtgcctggaggtgtccatctctgacgggctcttcctcagcctggggctggtgagcttggtggagaacgcgctggtggtggccaccatcgccaagaaccggaacctgcactcacccatgtactgcttcatctgctgcctggccttgtcggacctgctggtgagcgggagcaacgtgctggagacggccgtcatcctcctgctggaggccggtgcactggtggcccgggctgcggtgctgcagcagctggacaatgtcattgacgtgatcacctgcagctccatgctgtccagcctctgcttcctgggcgccatcgccgtggaccgctacatctccatcttctacgcactgcgctaccacagcatcgtgaccctgccgcgggcgcggcgagccgttgcggccatctgggtggccagtgtcgtcttcagcacgctcttcatcgcctactacgaccacgtggccgtcctgctgtgcctcgtggtcttcttcctggctatgctggtgctcatggccgtgctgtacgtccacatgctggcccgggcctgccagcacgcccagggcatcgcccggctccacaagaggcagcgcccggtccaccagggctttggccttaaaggcgctgtcaccctcaccatcctgctgggcattttcttcctctgctggggccccttcttcctgcatctcacactcatcgtcctctgccccgagcaccccacgtgcggctgcatcttcaagaacttcaacctctttctcgccctcatcatctgcaatgccatcatcgaccccctcatctacgccttccacagccaggagctccgcaggacgctcaaggaggtgctgacatgctcctgctctcaggaccgtgccctcgtcagctgggatgtgaagtctctgggtggaagtgtgtgccaagagctactcccacagcagccccaggagaaggggctttgtgaccagaaagcttcatccacagccttgcagcggctcctgcaaaaggaggtgaaatccctgcctcaggccaagggaccaggtttgcaggagcccccctagtggtatggggctgagccctcctgagggccggttctaaggctcagactgggcactggggcctcagcctgctttcctgcagcagtcgcccaagcagacagccctggcaaatgcctgactcagtgaccagtgcctgtgagcatggggccaggaaagtctggtaataaatgtgactcagcatcacccaccttagccccttcaaaaaagtgct

SEQ ID NO: 32412 - DNA, 1038 bp, Homo sapiens
acccacgcgtcgcggacgcgtgggcgaaccacgcgtccggcggacgcgtagggtcctgctggggccccttcttcctgcatctcacactcatcgtcctctgccccgagcaccccacgtgcggctgcatcttcaagaacttcaacctctttctcgccctcatcatctgcaatgccatcatcgaccccctcatctacgccttccacagccaggagctccgcaggacgctcaaggaggtgctgacatgctcctggtgagcgcggtgcacgcggctttaagtgtgctgggcagagggaggtggtgatattgtgtggtctggttcctgtgtgaccctgggcagttccttacctccctggtccccgtttgtcaaagaggatggactaaatgatctctgaaagtgttgaagcgcggacccttctgggtccagggaggggtccctgcaaaactccaggcaggacttctcaccagcagtcgtggggaacggaggaggacatggggaggttgtggggcctcaggctccgggcaccaggggccaacctcaggctcctaaagagacattttccgcccactcctgggacactccgtctgctccaatgactgagcagcatccaccccaccccatctttgctgccagctctcaggaccgtgccctcgtcagctgggatgtgaagtctctgggtggaagtgtgtgccaagagctactcccacagcagccccaggagaaggggctttgtgaccagaaagcttcatccacagccttgcagcggctcctgcaaaaggaggtgaaatccctgcctcaggccaagggaccaggtttgcaggagcccccctagtggtatggggctgagccctcctgagggccggttctaaggctcagactgggcactggggcctcagcctgctttcctgcagcagtcgcccaagcagacagccctggcaaatgcctgactcagtgaccagtgcctgtgagcatggggccaggaaagtctggtaataaatgtgactcagcatcacccaccttagccccttcaaaaaagtgct

SEQ ID NO: 32413 - DNA, 351 bp, Homo sapiens
tggctgggactttccagagactagatacccttcactcttagggttgaagaaaatcagtttaaaagtggaaaaatgatgagaaattataaatgctgccgcataagggctcaataagtgattacgtaaatttgaattttcccaacacgttcctttgcaaacacataaacatcagtatttgcttcctgtcttcgaagattatatttcttcatggcagggtttcaaaatgttacataattgggggactggtggaactgaagaggggaaagagccagaaaacgtgttcaggcttcagctccaccttttctactcttgcgtctgttgacaagttaataaacccttttcagactttta

SEQ ID NO: 32414 - DNA, 2625 bp, Homo sapiens
gtgttcaatatggactttattcaactctcgactatacaatgaatgactgagattcagccactacgtactaccctaacatactcataacagttaatccacataaggtgtatgatgacaatagcataacagataatcaagatgagaattcaaaaaaaactgatcaaaattacgaggtatcaggggtaggttttctaggaagaccatcactgaaagatgtaagataaaagctgaccctcatgtttctctgttgccactaaaggtgggcaagaattggacaaaactgccagtgttttatgttggatagaaagaagacatagagttgtagcatctctgttccaaggaataatgaaccagagagatttacagtacagtgagatctgaagtcaagaggatggaaaatatagcctttcaagaatttttttccagtcgttggtcctctaagtgaccaggcctccttcttaaagttctttagtcttgttctaggatgacatcacagttaggcattttatgtcatgccctacatgtatatacggtagtcctcccttatttctgggggatacattccaagacccccagtggatgcctaaaaactctgatagtaccaaaccctatatatactatgtttttttttctatacttacatatctatgataaaatttaatttgtaaattaggcacagcactcttgccctttggggctattattaattaaataggggtacttgaacacaagcactgcgatacagtcatctgataaccgagacagtcgatctgatcaccgagactgctactaagtgactaatgggtgagcagcatgaatatgctggacagagggaggatcacctccagggcagcaaggggcaagatctcatcatgctcctcagaatgctgtgcaattaaaatttatgaattgtttatttctggaatgttccatcaaatatttttggactgctgttgagcgtaactgaaaccatgaaaatgaagccatgggtaagaggggactactgtataccatttctttttttagtctccctgctactctccactaggagaataaaggtgggagaacaaaggggtctggcaggaaggagattgcaaactatgttgtcaattcttgaaacgaatccatgagccctgtgcggaaaccctctaggtctgttcctctcaggacattaaatcattctctttttatttctaatatagtcccatgaatttatttcctaagaaactttagaaagtttacagctttttaactatatgtccatccactatttgacatcctgggggtcatcggcccacccaggagctttcatgatcaagtcaaaatcacaatgtatccattgggcttcagggcagaacatgcgtcctcagatgattgttgtacacagaaaattagggaacacagctaagatcaataccagggagctcccaaatgggaattccattttcattccttcattaaaatcataaaatccataataattcctggttagcaataaacacaaccattgtgccacatcataaatcacaccttctgatcgacagaaaatgagaatgataatattataaaataaaataacaatgataataatgccataacttaagatctttcatgtagtccagctacagaatttttacaaaatggaataaattaatgcaaacaatactgctctttgtataaattaaacattttccttcatcctaagagctataaatcacagacactacattttaaatcaatgtatcaacataaagtgtaaacaaatggatcaaacaagcaaaaggaactctaaattccctcctgcctttcctttttggctgatgcaatcagtaaaacccagaggagcggcaacattttcatgtgcattggaaatggtttaacagctgtctgtgcaagtatttcctaacgtccaacatgatgcagtgtcaaagagtccagtgaatctagagaggttgtttgacggtaatctgtcttggagacagggacaggtactaggtcaacacctatttgtacataaaattctaaaaaaatttttccttaaggccaaggcaccatgaagtaccttggaatgcttttcagagcccatgaccctggagacaggcaggacctcatgcttttggcaatgtaaaaatccttcctatccctgctcagcatcccttgttctttccacaaatgttcaaatccagttatttaaaactgcattgatttggagtgaagtaaaagatattttacaagtagcattgaacaaaaatgctattgtgctgggagaggagttgccttttgcaagctgcttgtttttgcttttattctgacagtggtagccagtcattaagacttctaagataggccgggcacagtggctgatgcctgtaatcccagcactttgggaggctgaggcaggcggatcacctgaggtcaggagtttgagacaagcctggccaacatggtgaaaccccgtgtctactaaaaatacaaaattagccagacgtggttgcgggcgcctgtaatcccagctactcgggaggctgaggcaggagaatcgcttgaacctgggagatggaggttgcagtgaactgagattgtgccattgcactctagcctgggcagaaagagcaaaactctgtc

SEQ ID NO: 32415 - DNA, 771 bp, Homo sapiens
gtgattgaaggattgtgatgacaatctctttgcagcagctatgtatggtttatgtgaagtatccccacttattcttgtggagcaggtttggtgagacagcagtaaccaaatgacatgccaatattactggtgcaactggtattctacaaatgcataaggaacacatagacgacttccttttaggataaaatgatgcttctttcactaccttttgtggtagctgtggcttccaatagcaactgtttgacagttatataaatcttgcatgtgtattcttagtttgtgtcccttaagtactacttaattctcaagtagtaatgttattcttatacccttcagcgttctattttgattcaaaacaattgattcaaaacaattttgaatcaattttctattttgattcaaaacaattgataattctgtaaaaaaacataaacactgaattcttcagtgaaccaaagcaacaaataatagagaaaacttcttgaaactggagtgtgggaaaacttcttaacagaactaagagttaaaggtagtgagaagtgtgtggtgtgtgaattctttagtggtaaggggaaatgtgggctaaatccttttctttcatgaaactctcattctattttatatttctggtttgttcttgttcccatgtgagaaaacatacagtttctgaaaattcaaaatggtcatcaatgctttggactttacataattatgtattagagaaggtgcaactgtacattacttaatatactatgaacataatagaat

SEQ ID NO: 32416 - DNA, 327 bp, Homo sapiens
tttggtagaaattgagatgttggttctaaaatgaaataaaatgcagaggacctagaatatataatttccctttaatttgacaaagaagaaaaacatgttgggaagctcacctaatttcagtgtaatatttacatacgaatcaacaaatggatcagtggtatagaatagagaatcctgaaatagatctacatatatatggccaacagatttttaataatggtgccaagtctattcaggggaaagaaaattcttttttaaaaatgggattggaaaaactggataagggaaataagtgaacctcgacccctaccttataccgtgctcaaa

SEQ ID NO: 32417 - DNA, 408 bp, Homo sapiens
tttgttttgagacagagtcttgctctgtcgcccaggctggagtagtgcagaggtgcgatcttggctcactgcaacctctgcctcccagtttcaagtgattctccgacttcagcctcctgattagctgggaccacaggcacgcgccaccaagccccgctaatttttgtagtttcagtaaagacgggttttcaccatgttggccaggctcatcttgaactcctgccctcaagtgatccacctgcctcggcctcccaaagtgctgggattacagacatgagccaccacacctggccaagattatttttaatgttaattttttagagtagtgatgagagttctgtgttaaagttagtgttctaggaagactcttctccttataaacactttcttaggacagatacacttttt

SEQ ID NO: 32418 - DNA, 312 bp, Homo sapiens
ccaatgtatgaatcctatgagattatcatccagtttcagagcaggggcaggaattgtttgggggagtaaaaatacatggattaaatgcctagctcttggtcagtatggtacatatatttccaagctttgtttggtgagagagcttgaaattaatgacaacccagtagcaatgagcacacctaggactcatatcttggtatttaaatatcagttcttcaaatgctctttgaagtagctgatttcaaatctggggtagctatagtacaagatgagcctggagcaactttggcactaaaaagttagaaagtcctc

SEQ ID NO: 32419 - DNA, 575 bp, Homo sapiens
cttgtgtgctcatatgttgactgatggctgtcagcccctaggtagcttcaggacggggctgggcaccagaaggacacagcgggattggagggttcggactttctcctacgtgtgttcagggaaactaagtagcatggcagcagcccagagcccccgggtcagtggctacacagcagcagtgagcagcctcctgggaggagcgaagggctgaaggttaagttggccaatgatttagtcattccttcctgtgtgatgaagcctccataaaaacaccaaaggggtgggcgtggtggttcatccctgtcttcccagtactttgggaggctgaggagggtggatcacgaggtcaggagctcgagaccaacttgaccaacgtgatgaaaccctgtctctcctaagaatgcaaaaattagccaggcatggtggcgtgaacctgtgatcccagctactcgggaggctgaggcaggagaattgcttgaaccctggaggcagaggttgcaatgagccaaggttgcgcccttgcaccccagcctgggcaacagagtgacactctgtctcagaaaaaacaaaacaaa

SEQ ID NO: 32420 - DNA, 456 bp, Homo sapiens
ctgggcactcgtcagggtctgccctggagagctgacgcaagaggcacatttgcccctgaggaaggctgtgtgtcaggagtgaagaggggcgtgcaggcaacccctcctcaccccaggtgcatggaagccatcctggtacccacctctgggatggaggtaggacaattaattacatgttctgtctttgggtagaaatgctactgagccataggggctggatcaccactgctgcccagtatggcccaccagaccaccttccaccatcctgcaaagccctgcagaattgccagtgcgccctgcagtttttgtgaccaccagcccagtcccattcgattttcatagcccttgagtgacagcccatctgggacaagactcaaatgattgtcacatcttttcttctaactctttagccagctgggggatttaaaaataatgaattggaaccgttcgtggtat

SEQ ID NO: 32421 - DNA, 368 bp, Homo sapiens
acggtcggtttatttttttcaattttcaattagtttttgacaagttaataaaacagaaaaatgaaaagacatacaaagtccaagtcaaaactttttatcgttagagttaacagccataaaattacctgcaaaattgacatagagttttctactctctctctgtgaaccatttgcaaacagttctcagaagagcccaggtctatagaccatggttagagtactcaaggtaaactactcaaattagaccatactcagctgtagagtttcaaccaaatgagatttgtttggagaacatcatagtctctctcagttgggcgtgctggctcatgactgtaatcccagcactttgagaggccgagtcggtagat

SEQ ID NO: 32422 - DNA, 505 bp, Homo sapiens
cttttaaacaaatgagaatttacaagatgtgtgactttctaactctatcatacgtcggcaacctctttccatctagaagggctagatgtgacaaatgttttctattaaaaggttggggtggagttgagagcagctttttcatattatatacacaggccttccgtaaacggcctgtgaatcttcccagaggatggagggcatttccaacgggccaaacgtggcctgtcattctaccatttgtctcttccgacagcaaggtctggtagtacggagaccaaccgcccgatcgccgctaaccgttccacccgtcgtcgttcgggacttcgctcacctcccaggcccgttaaggcctttgtccgttgtcgttaggactaggtaggtctcgcccaatggcgacagagtggtcacccgggacccagatctggcggctccgtggcctgaagaggcggccgagcctgcctgcgtccctaggccgccttcccgggccctccatgccctaacgccc

SEQ ID NO: 32423 - DNA, 362 bp, Homo sapiens
acaccactgctgtcaagcccaaatgacagaccaagaccctgtctccaaaggaaaaaaaagaagagttgggagtggaactgtacatggttaataaccctggactttgctctttgtggaagcattggccttcaggaatttggtgagactcccaaatgtatcagtgcagttagtctccctaagggatggttgttaggtgcttcctatgccatttgatgctgaggaagactaattctgtgtttttgttttgttttttgtttttcttctgagacggagtttcgctcttgttgcccaggctggaatgcagtggcacgatttcaggtcaatggcacaatctcggctcagtgcaacctctgcctcctggg

SEQ ID NO: 32424 - DNA, 447 bp, Homo sapiens
cggccgccacttggaagggacccacctacagtggcggaagtggagtaagacatcatgttgcctcaagtttaattggaaatcgcgtgccttgtgaagaatggacactcagtagatgcttattgatgaacctgttggttgaggataactcgctaacttttctgagctttgttggaaaaactagcaagtgtgtatcattggccccaagcaccttctgtctgttgacctggctcaaacttcaatctgaccatcagtgaagaaggctgatgccgcagatggagagagacacaggatgtatgaatgtagcataactcaggattcacctcgtgtggtccttcccacttgaaccctatcctaagtgtgaaagttaccccatcgctttcctcttgcttcagattatgtgctttaaagtgatttaataaactatgcgattcaaacatcttaatttga

SEQ ID NO: 32425 - DNA, 433 bp, Homo sapiens
aaagggatggaaagaaccagccacttataccagccacttatggtcctactctgggcccacatgtgctctacctaagaaatccttatagtacccatagctttttgcaggctgattgacaagttatggctgtggccaggcgtacttgtcactgtctctctttaatagagcaagtgtgtatcattggccccaagcaccttctgtctgttgacctggctcaaacttcaatctgaccatcagtgaagaaggctgatgccgcagatggagagagacacaggatgtatgaatgtagcataactcaggattcacctcgtgtggtccttcccacttgaaccctatcctaagtgtgaaagttaccccatcgctttcctcttgcttcagattatgtgctttaaagtgatttaataaactatgcgattcaaacatcttaatttga

SEQ ID NO: 32426 - DNA, 889 bp, Homo sapiens
cggcacgagggttgcgccacaggggtctccagggccctcgcaggttggggtggtctgagctagtctgaaggaggacagtcagctgacttctcctttatctctctttcccaggatagcaggttcccttggtgtattacagtttctgaagtgttgattcccttttcaattgattccacagatgacagtcctgacgtttaaaaaattgccagataacctttaattttttttttttttaacagaacacaaacttaagccagattgcctaggattgaaccttggcctctcacttcctagacgagtggccttggctagttaaccaccttcgtgagcctcagttttgtcatctgtaaaatgggagtcataagtgtctacctcacagagctgtgattgaaaggataaatagcaccttgcacatagcggtgtagaagtgcttgttattgttaatattttatttaccttcacgcagcctacagtggcggaagtggagtaagacatcatgttgcctcaagtttaattggaaatcgcgtgccttgtgaagaatggacactcagtagatgcttattgatgaacctgttggttgaggataactcgctaacttttctgagctttgttggaaaaactagcaagtgtgtatcattggccccaagcaccttctgtctgttgacctggctcaaacttcaatctgaccatcagtgaagaaggctgatgccgcagatggagagagacacaggatgtatgaatgtagcataactcaggattcacctcgtgtggtccttcccacttgaaccctatcctaagtgtgaaagttaccccatcgctttcctcttgcttcagattatgtgctttaaagtgatttaataaactatgcgattcaaacatcttaatttga

SEQ ID NO: 32427 - DNA, 364 bp, Homo sapiens
tctttaatttgccagacagagaacttgagaatcaaccctatttctttacagttaaaaataaaaataacatgtggctatatgaggtatgctagcatatcaaagattgctgagaattagatgatcataggaaagaaccatagaatttaacttctagtatataagttactattaatgaaaatagtatttaaaactggaaaaactgaacataaatgcttaagaaggaaattgatgtttaggaaaggtaaaggccaggcacagtggttcacgcttgtaatcccagcacttttggaggttgaggcaggaggatagatggagcccaggagtttgagaccagcctgggtagcatagcaagacatcatctcta

SEQ ID NO: 32428 - DNA, 221 bp, Homo sapiens
ttgtatttgctataggtttttttctttgtggttaccatgatgttagcataacatttcttgtagttctaatagcctatttgagctgatagcctcaattgcataaagaaaaccctctatacttttacttccttctcaacactatattattgatgtcagaacttgcttcttttacactatgtatctattaaccaatttttgtggttatagttatcttttatact

SEQ ID NO: 32429 - DNA, 547 bp, Homo sapiens
cgaccctgtcatggaggaacctctctctgcctcccgcctggaagatcccttgggtccttgatctccgcaggagctaagttgggcctgaaggtcaggagggtttggtaacaaggccctgcagccaggaggctggatcactgacaagtgaccctgggcaaggtcactcttgacaagggctctcccctctccagacctcagtttcctcgtctgtcatcaagggggtgctgggttagtgctgcttggagtcaggccccccccaagaatctaataaaagctgccgaccttcctcctgtaaaacagttatgcacccacattccttgtgaatgtctgtgggaggttcagggaccctccccaaccagagcctccaccctcccctgcccctcggctagatgctctccagcatcactccagccctcagtgaggacccggcgctgagggaggaggaaatcacaacagaaaagtggctgcggtgctcatggctcctcagcatcatccagggccccccacagaccaggtagtttaggagctttacatggacgaaccactt

SEQ ID NO: 32430 - DNA, 248 bp, Homo sapiens
cctctcccccgtcccgcgcgcccccccggcccatttcgggccttcatgacagggccagagccagccagctttgaagacgcggccctgccccgacacaggcagcctggagaagctgggcaggacaagtaggacatccctgagaagacgacagaagggactggcctctgcccacaccttgacttcagtatttctgacctcctaaactctaataaagtcatgcttacagccactaaaaaaatgcagaagag

SEQ ID NO: 32431 - DNA, 2051 bp, Homo sapiens
ttccgcagcatggacaccatcgtgggcatgctccacaaccgctccgagacgcccacctttgccaaggtccagcggggcgtccaggacatgatgcgtaggcgttttgaggagcgcaatgttggccagatcaaaaccgtgtacccggcctcctaccgcttccgccaggagcgcagtgtccccaccttcaaggatggcaccaggaggtcagattaccagctcaccatcgagccactgctggagcaggaggctgacggagcagccccccagctcacggcctcgcgcctcctgcagcgacggcagatcttcagccagaagctggtggagcatgtcaaggagcaccacaaggccttcctggcctccctgagccccgccatggtggtgccggaggaccagctgacccgctggcacccgcgcttcaacgtggatgaagtacccgacatcgagccggccgcgctgccccagccacccgccacggagaagctcaccactgctcaggaggtgctggcccgggcccgcaacctgatttcacccaggatggagaaggccttgagtcaattggccctgcgctctgctgcgcccagcagccccgggtctcccaggccagcactgccggctaccccaccagccaccccgcctgcagcctctcccagtgctctgaagggggtgtcccaggatctgctggagcggatccgagccaaggaggcacagaagcagctggcacagatgacgcggtgcccggagcaggagcagcggctgcagcgcttagaacggctgcctgagctggcccgcgtgctgcggagcgtctttgtgtccgaacgcaagcctgcgctcagcatggaggtggcctgtgccaggatggtgggcagctgttgtactatcatgagccctggggaaatggagaagcacctgctgctcctctccgagctgctgccggactggctcagcctccaccgcatccgcaccgacacctacgtcaagctggacaaggccgcggacctcgcccacatcactgcacgcctggcccaccagacacgtgctgaggaggggctgtgagcctgggggccactgtggacagacgtgggcttcagaagctcgctggcctgggcccaccagcattttcttttatgaacatgatacactttggccttcctttccccagcgcccctgagggccagaggcagatgtgggctgcaggctgcacagcccgagggtctctggctgcgggcggtgggccccttcatggggctcacctggtggattcacattaaaccggtttctgtgggcacctctgtccttgctgctggtggggaagggaagccagatccagcaccccctggggggccatcgggagtgtggctgggggtgaagggggctctgtggcaatatggggttgggtagtgtgggtggcaggccatcccctctaatcttggaacctctgaatatgggacctcccacagcaaagggtgacttttgtcattaagaaagactggggtgggtgtggtggctcacgcctgtaaccccagcactttgggaggccaaggtgggcagatcacgaggtcaagagatcgagaccatcctggcgaacatggtgaaaccccatctctactaaaaatacaaaaaattagccgggtgtggtggtgggcacctgtcgtcccagctactagggaggctgaggcaggagaatggtgtgaacccaggaggcacagcttgcagtgagcgaagatcgcaccactgcacgcactccagcctgggtgacagagcgagactccgtctcaaaaaaaaaaatttcaagactggagaggtgatcctgaattgtccagctacgccccatgtcatcacagggccttcatgacagggccagagccagccagctttgaagacgcggccctgccccgacacaggcagcctggagaagctgggcaggacaagtaggacatccctgagaagacgacagaagggactggcctctgcccacaccttgacttcagtatttctgacctcctaaactctaataaagtcatgcttacagccactaaaaaaatgcagaagag

SEQ ID NO: 32432 - DNA, 1543 bp, Homo sapiens
ttccgcagcatggacaccatcgtgggcatgctccacaaccgctccgagacgcccacctttgccaaggtccagcggggcgtccaggacatgatgcgtaggcgttttgaggagcgcaatgttggccagatcaaaaccgtgtacccggcctcctaccgcttccgccaggagcgcagtgtccccaccttcaaggatggcaccaggaggtcagattaccagctcaccatcgagccactgctggagcaggaggctgacggagcagccccccagctcacggcctcgcgcctcctgcagcgacggcagatcttcagccagaagctggtggagcatgtcaaggagcaccacaaggccttcctggcctccctgagccccgccatggtggtgccggaggaccagctgacccgctggcacccgcgcttcaacgtggatgaagtacccgacatcgagccggccgcgctgccccagccacccgccacggagaagctcaccactgctcaggaggtgctggcccgggcccgcaacctgatttcacccaggatggagaaggccttgagtcaattggccctgcgctctgctgcgcccagcagccccgggtctcccaggccagcactgccggctaccccaccagccaccccgcctgcagcctctcccagtgctctgaagggggtgtcccaggatctgctggagcggatccgagccaaggaggcacagaagcagctggcacagatgacgcggtgcccggagcaggagcagcggctgcagcgcttagaacggctgcctgagctggcccgcgtgctgcggagcgtctttgtgtccgaacgcaagcctgcgctcagcatggaggtggcctgtgccaggatggtgggcagctgttgtactatcatgagccctggggaaatggagaagcacctgctgctcctctccgagctgctgccggactggctcagcctccaccgcatccgcaccgacacctacgtcaagctggacaaggccgcggacctcgcccacatcactgcacgcctggcccaccagacacgtgctgaggaggggctgtgagcctgggggccactgtggacagacgtgggcttcagaagctcgctggcctgggcccaccagcattttcttttatgaacatgatacactttggccttcctttccccagcgcccctgagggccagaggcagatgtgggctgcaggctgcacagcccgagggtctctggctgcgggcggtgggccccttcatggggctcacctggtggattcacattaaaccggtttctgtgggcaaaaaaaaaaaaaaaaaaaaaaaaaaaaaaaaaaaaaaaaaaaccggggggacttttgggggggggggaaaaaggggtgtataagaaagggggacatgggggacaataaggttgttctcatggagcccagagtttttctgtcgcaacaaggggggggaaaaattcggggggggtcctccatatatagaggaggagggcggatataattttcggaataaagacaggggtaaccggggttttatgagactcggagaagtgt

SEQ ID NO: 32433 - DNA, 2015 bp, Homo sapiens
ttccgcagcatggacaccatcgtgggcatgctccacaaccgctccgagacgcccacctttgccaaggtccagcggggcgtccaggacatgatgcgtaggcgttttgaggagcgcaatgttggccagatcaaaaccgtgtacccggcctcctaccgcttccgccaggagcgcagtgtccccaccttcaaggatggcaccaggaggtcagattaccagctcaccatcgagccactgctggagcaggaggctgacggagcagccccccagctcacggcctcgcgcctcctgcagcgacggcagatcttcagccagaagctggtggagcatgtcaaggagcaccacaaggccttcctggcctccctgagccccgccatggtggtgccggaggaccagctgacccgctggcacccgcgcttcaacgtggatgaagtacccgacatcgagccggccgcgctgccccagccacccgccacggagaagctcaccactgctcaggagatggagaaggccttgagtcaattggccctgcgctctgctgcgcccagcagccccgggtctcccaggccagcactgccggctaccccaccagccaccccgcctgcagcctctcccagtgctctgaagggggtgtcccaggatctgctggagcggatccgagccaaggaggcacagaagcagctggcacagatgacgcggtgcccggagcaggagcagcggctgcagcgcttagaacggctgcctgagctggcccgcgtgctgcggagcgtctttgtgtccgaacgcaagcctgcgctcagcatggaggtggcctgtgccaggatggtgggcagctgttgtactatcatgagccctggggaaatggagaagcacctgctgctcctctccgagctgctgccggactggctcagcctccaccgcatccgcaccgacacctacgtcaagctggacaaggccgcggacctcgcccacatcactgcacgcctggcccaccagacacgtgctgaggaggggctgtgagcctgggggccactgtggacagacgtgggcttcagaagctcgctggcctgggcccaccagcattttcttttatgaacatgatacactttggccttcctttccccagcgcccctgagggccagaggcagatgtgggctgcaggctgcacagcccgagggtctctggctgcgggcggtgggccccttcatggggctcacctggtggattcacattaaaccggtttctgtgggcacctctgtccttgctgctggtggggaagggaagccagatccagcaccccctggggggccatcgggagtgtggctgggggtgaagggggctctgtggcaatatggggttgggtagtgtgggtggcaggccatcccctctaatcttggaacctctgaatatgggacctcccacagcaaagggtgacttttgtcattaagaaagactggggtgggtgtggtggctcacgcctgtaaccccagcactttgggaggccaaggtgggcagatcacgaggtcaagagatcgagaccatcctggcgaacatggtgaaaccccatctctactaaaaatacaaaaaattagccgggtgtggtggtgggcacctgtcgtcccagctactagggaggctgaggcaggagaatggtgtgaacccaggaggcacagcttgcagtgagcgaagatcgcaccactgcacgcactccagcctgggtgacagagcgagactccgtctcaaaaaaaaaaatttcaagactggagaggtgatcctgaattgtccagctacgccccatgtcatcacagggccttcatgacagggccagagccagccagctttgaagacgcggccctgccccgacacaggcagcctggagaagctgggcaggacaagtaggacatccctgagaagacgacagaagggactggcctctgcccacaccttgacttcagtatttctgacctcctaaactctaataaagtcatgcttacagccactaaaaaaatgcagaagag

SEQ ID NO: 32434 - DNA, 379 bp, Homo sapiens
cttctacctggaatgttctccacattccctcctttccagctgccacctgctttctctagctaacacctactcaaacgtaaaggttcagttcagatgttactacctccataaaacccttggattctctcatcccttttccccttccctgtctggcctggcacagggccccatctgcatgctaccctagcaccaaggcatatacctaccacaacattaggctacaagacagtgaacccaactgtttcacccatcagttctcccctgaaaggtactaatggaaatttcacatcggctagggccatgttccttgtgtcagtaggcctaagggcttaggcacaaggcaggacctgggggtacagagtaggaactcagtaagggc

SEQ ID NO: 32435 - DNA, 381 bp, Homo sapiens
attgaaaacttcctgaggcctcctcagaagcagatgctgctatgcttcccgtacagcctgaagaaccaaacatttctatacatttatgagacccaactccaaaagcatactggaatggaattaaagaccgaactacagaagctaaagagagctgatcaaactaaaaaaaaaagttaaaggtgaggaggccaaggctcagaagagtcacttgcccatgatcactgctcttatagcgccaactcagagctcaggcaatgctcatgttctttccactgtgcctcatcgctcatgtctgactcttctagaaatgtgggcaaatcccctgccttctgtgggtctcagatttccataaaaaataaaatcaatggatcaacttaatta

SEQ ID NO: 32436 - DNA, 795 bp, Homo sapiens
ggcacaatcagagctcactgtaaccttgaactcctgggctcaggcaagcctcctgcctcagccttccgagtagctgggactataggcccacgccaccatgcccagctttttaaaatattttgtagagacgaggtctctctctgttgcccaggctagtcttgaactcctggcttcaagcaatcctcctgctttggcctcccaaagtgctaggattacaggcatgagccactgctcctggccttttttttaataaggcaatcctaagtagcctcaggctgctgaggttgagtctcttcaacccagaagggcttggctgggattggccaaaaggcctcccagagaatcccaaaccattagagtctaacttcccaaatgtgaccggcaggcactgcatgctcaggtcccacccactgcctctccccacactcttcacctctgtgctgcagccacgccaatttttcagttcctccaacactgtcaggcaggccaggcaccctcccatccctaagctttgcacatttggaactccaagaggggaggactgttttgttcctctctggatgtccagaacaagaactacctggcacatattaggtgctccataaatatatgttgaatgcctcttcctttcttccgtgaacactcttcctcctcccctcaacggccactgtgtacttcagcccaaagtttaaacttcgtttcttcagagaagttgacaccctaaatagtgcaggtcccctcaaatgtgtccttaagctatcctccactgcttcctgcccttcaccccagctatga

SEQ ID NO: 32437 - DNA, 211 bp, Homo sapiens
aaggtgactcggggctgaggacaggatggtctggagtccagtttggagacaaattctagaaaataaggcgatgccatcatgaggatgctgcacactctccaggcccagcccttgagcacgggccccgcccgccctgtctgcgggccgactccgcgacgccgaccggctcgcgcctccgcccccgagcgccccggcgggcggagttgcgggt

SEQ ID NO: 32438 - DNA, 1726 bp, Homo sapiens
tgtcttcctgagagacagtagatttagaaagtgaggatcagagggtggaaaataaaagctgtggtccccaggagtcctgaacatctggggacagcgggaaaacatgagtgactccaaggaaccaagggtgcagcagctgggcctcctggggtgtcttggccatggcgccctggtgctgcaactcctctccttcatgctcttggctggggtcctggtggccatccttgtccaagtgtccaaggtccccagctccctaagtcaggaacaatccgagcaagacgcaatctaccagaacctgacccagcttaaagctgcagtgggtgagctctcagagaaatccaagctgcaggagatctaccaggagctgacccagctgaaggctgcagtgggtgagttgccagagaaatccaagctgcaggagatctaccaggagctgacccggctgaaggctgcagtgggtgagttgccagagaaatccaagctgcaggagatctaccaggagctgacccggctgaaggctgcagtgggtgagttgccagagaaatccaagctgcaggagatctaccaggagctgacccggctgaaggctgcagtgggtgagttgccagagaaatccaagctgcaggagatctaccaggagctgacggagctgaaggctgcagtgggtgagttgccagagaaatccaagctgcaggagatctaccaggagctgacccagctgaaggctgcagtgggtgagttgccagaccagtccaagcagcagcaaatctatcaagaactgaccgatttgaagactgcatttgaacgcctgtgccgccactgtcccaaggactggacattcttccaaggaaactgttacttcatgtctaactcccagcggaactggcacgactccgtcaccgcctgccaggaagtgagggcccagctcgtcgtaatcaaaactgctgaggagcagcttccagcggtactggaacagtggagaacccaacaatagcgggaatgaagactgtgcggaatttagtggcagtggctggaacgacaatcgatgtgacgttgacaattactggatctgcaaaaagcccgcagcctgcttcagagacgaatagttgtttccctgctagcctcagcctccattgtggtatagcagaacttcacccacttgtaagccagcgcttcttctctccatccttggaccttcacaaatgccctgagacggttctctgttcgatttttcatcccctatgaacctgggtcttattctgtccttctgatgcctccaagtttccctggtgtagagcttgtgttcttggcccatccttggagctttataagtgacctgagtgggatgcatttagggggcgggcttggtatgttgtatgaatccactctctgttccttttggagattagactatttggattcatgtgtagctgccctgtcccctggggctttatctcatccatgcaaactaccatctgctcaacttccagctacaccccgtgcacccttttgactggggacttgctggttgaaggagctcatcttgcaggctggaagcaccagggaattaattcccccagtcaaccaatggcatccagagagggcatggaggctccatacaacctcttccacccccacatctttctttgtcctatacatgtcttccatttggctgtttctgagttgtagcctttataataaagtggtaaatgttgtaactgcaaaa

SEQ ID NO: 32439 - DNA, 1594 bp, Homo sapiens
tgtcttcctgagagacagtagatttagaaagtgaggatcagagggtggaaaataaaagctgtggtccccaggagtcctgaacatctggggacagcgggaaaacatgagtgactccaaggaaccaagggtgcagcagctgggcctcctggaagaagatccaacaaccagtggcatcagactttttccaagagactttcaattccagcagatacatggccacaagagctctacagggtgtcttggccatggcgccctggtgctgcaactcctctccttcatgctcttggctggggtcctggtggccatccttgtccaagtgtccaaggtccccagctccctaagtcaggaacaatccgagcaagacgcaatctaccagaacctgacccagcttaaagctgcagtgggtgagctctcagagaaatccaagctgcaggagatctaccaggagctgacccagctgaaggctgcagtgggtgagttgccagagaaatccaagctgcaggagatctaccaggagctgacccggctgaaggctgcagtgggtgagttgccagagaaatccaagctgcaggagatctaccaggagctgacccggctgaaggctgcagtgggtgagttgccagagaaatccaagctgcaggagatctaccaggagctgacccggctgaaggctgcagtgggtgagttgccagagaaatccaagctgcaggagatctaccaggagctgacggagctgaaggctgcagtgggtgagttgccagagaaatccaagctgcaggagatctaccaggagctgacccagctgaaggctgcagtgggtgagttgccagaccagtccaagcagcagcaaatctatcaagaactgaccgatttgaagactgcatttgaacgcctgtgccgccactgtcccaaggactggacattcttccaaggaaactgttacttcatgtctaactcccagcggaactggcacgactccgtcaccgcctgccaggaagtgagggcccagctcgtcgtaatcaaaactgctgaggagcagaacttcctacagctgcagacttccaggagtaaccgcttctcctggatgggactttcagacctaaatcaggaaggcacgtggcaatgggtggacggctcacctctgtcacccagcttccagcggtactggaacagtggagaacccaacaatagcgggaatgaagactgtgcggaatttagtggcagtggctggaacgacaatcgatgtgacgttgacaattactggatctgcaaaaagcccgcagcctgcttcagagacgaatagttgtttccctgctagcctcagcctccattgtggtatagcagaacttcacccacttctacaccccgtgcacccttttgactggggacttgctggttgaaggagctcatcttgcaggctggaagcaccagggaattaattcccccagtcaaccaatggcatccagagagggcatggaggctccatacaacctcttccacccccacatctttctttgtcctatacatgtcttccatttggctgtttctgagttgtagcctttataataaagtggtaaatgttgtaactgcaaaa

SEQ ID NO: 32440 - DNA, 1854 bp, Homo sapiens
tgtcttcctgagagacagtagatttagaaagtgaggatcagagggtggaaaataaaagctgtggtccccaggagtcctgaacatctggggacagcgggaaaacatgagtgactccaaggaaccaagggtgcagcagctgggcctcctggaagaagatccaacaaccagtggcatcagactttttccaagagactttcaattccagcagatacatggccacaagagctctacagggtgtcttggccatggcgccctggtgctgcaactcctctccttcatgctcttggctggggtcctggtggccatccttgtccaagtgtccaaggtccccagctccctaagtcaggaacaatccgagcaagacgcaatctaccagaacctgacccagcttaaagctgcagtgggtgagctctcagagaaatccaagctgcaggagatctaccaggagctgacccagctgaaggctgcagtgggtgagttgccagagaaatccaagctgcaggagatctaccaggagctgacccggctgaaggctgcagtgggtgagttgccagagaaatccaagctgcaggagatctaccaggagctgacccggctgaaggctgcagtgggtgagttgccagagaaatccaagctgcaggagatctaccaggagctgacggagctgaaggctgcagtgggtgagttgccagagaaatccaagctgcaggagatctaccaggagctgacccagctgaaggctgcagtgggtgagttgccagaccagtccaagcagcagcaaatctatcaagaactgaccgatttgaagactgcatttgaacgcctgtgccgccactgtcccaaggactggacattcttccaaggaaactgttacttcatgtctaactcccagcggaactggcacgactccgtcaccgcctgccaggaagtgagggcccagctcgtcgtaatcaaaactgctgaggagcagaacttcctacagctgcagacttccaggagtaaccgcttctcctggatgggactttcagacctaaatcaggaaggcacgtggcaatgggtggacggctcacctctgtcacccagcttccagcggtactggaacagtggagaacccaacaatagcgggaatgaagactgtgcggaatttagtggcagtggctggaacgacaatcgatgtgacgttgacaattactggatctgcaaaaagcccgcagcctgcttcagagacgaatagttgtttccctgctagcctcagcctccattgtggtatagcagaacttcacccacttgtaagccagcgcttcttctctccatccttggaccttcacaaatgccctgagacggttctctgttcgatttttcatcccctatgaacctgggtcttattctgtccttctgatgcctccaagtttccctggtgtagagcttgtgttcttggcccatccttggagctttataagtgacctgagtgggatgcatttagggggcgggcttggtatgttgtatgaatccactctctgttccttttggagattagactatttggattcatgtgtagctgccctgtcccctggggctttatctcatccatgcaaactaccatctgctcaacttccagctacaccccgtgcacccttttgactggggacttgctggttgaaggagctcatcttgcaggctggaagcaccagggaattaattcccccagtcaaccaatggcatccagagagggcatggaggctccatacaacctcttccacccccacatctttctttgtcctatacatgtcttccatttggctgtttctgagttgtagcctttataataaagtggtaaatgttgtaactgcaaaa

SEQ ID NO: 32441 - DNA, 3087 bp, Homo sapiens
  misc_feature (1326)..(1326): n is a, c, g, or t
  misc_feature (1430)..(1430): n is a, c, g, or t
  misc_feature (1460)..(1460): n is a, c, g, or t
  misc_feature (1809)..(1809): n is a, c, g, or t
  misc_feature (2290)..(2290): n is a, c, g, or t
  misc_feature (2585)..(2585): n is a, c, g, or t
tgtcttcctgagagacagtagatttagaaagtgaggatcagagggtggaaaataaaagctgtggtccccaggagtcctgaacatctggggacagcgggaaaacatgagtgactccaaggaaccaagggtgcagcagctgggcctcctggtgtccaaggtccccagctccctaagtcaggaacaatccgagcaagacgcaatctaccagaacctgacccagcttaaagctgcagtgggtgagctctcagagaaatccaagctgcaggagatctaccaggagctgacccagctgaaggctgcagtgggtgagttgccagagaaatccaagctgcaggagatctaccaggagctgacccggctgaaggctgcagtgggtgagttgccagagaaatccaagctgcaggagatctaccaggagctgacccggctgaaggctgcagtgggtgagttgccagagaaatccaagctgcaggagatctaccaggagctgacccggctgaaggctgcagtgggtgagttgccagagaaatccaagctgcaggagatctaccaggagctgacggagctgaaggctgcagtgggtgagttgccagagaaatccaagctgcaggagatctaccaggagctgacccagctgaaggctgcagtgggtgagttgccagaccagtccaagcagcagcaaatctatcaagaactgaccgatttgaagactgcatttggtgagttcctgcacatcaagggtccttgggcctgagatggtctctgtgtgatgtgactttacttgagttaccaaccctgcctgagcctcagtttcctcccctgtgaaatgagaacacggggtaactgcgatcattgcacttggtgttcacagtgggccaggcacacagtagacactcagttcaaccaatccgctgccttctgttctgagctctaaagctgctaattctcccagtctggaagagatggagccaggactcctgggttctcctggggatcagggagagtcttgggaagtagggagaggaatggtctctccccattccaagcggtccacccaacatggacagtcaaggaagggccctgattttcaagggcttgaaggctgggcagatatgggaatatggacaacctaatctgagcccagccctgaccagcctcccccaacagaacgcctgtgccgccactgtcccaaggactggacattcttccaaggaaactgttacttcatgtctaactcccagcggaactggcacgactccgtcaccgcctgccaggaagtgagggcccagctcgtcgtaatcaaaactgctgaggagcaggtacacntggtgggggtcctcgtcctggcctggggcatggcttctggccaactggggaggaggtgctcagagaggattttgcagaagaggggctttgctctatttggaaanatgggaagagaaggatatgaatgaaggggncccaggtacccttcaagcaaatacaaaccagatctgaacacatgtgaatatttgggggaaacgtcaaatgtaagcaaaccaccacagcatgctgcaggtgtttaacggccagctctccggagagaaaattcctgatgtgttgtgtttgccaatttccccagtgtaaatatttccactgcggctgatttcaagctgtgatgtgctgtcactcagtgcagagctgaaaggagatgtgctggaccagcaattagtagtgggtccaatgtggctccagtacatgaaacccagtcaggagtaaattcatgtggacatgcaaaatagataaacatgcagcattcacaggagcacntgaggagaggccagctgtgcatgcgtgcctgcatgtcaggacacacatgccatggggatacagatgtgagaggggctcagacatgaggaggctcaggacctgctatatcagaaaactgcaggttaacttgaaagcagaactttctgccaagagacggggaggtggaacctggaaaatgggaagcagagctccctcctgactcctcctctaccctccagaacttcctacagctgcagacttccaggagtaaccgcttctcctggatgggactttcagacctaaatcaggaaggcacgtggcaatgggtggacggctcacctctgtcacccaggtagattctgggagaaagggacactgtatccagtcgggctgggttcctgcaactctgacttgagctttccctgggggtcccccccaacctccctgaccccataggactaagagtctggggttttactgagttgaggaaggtggtcttcanacccacctccagacaggatgaaaggtgccaagaattccaccagcagagctgcaggaggagcttgccctgtgggtaggtgtgttaaaatacagtgtattaataggaagtctgaagtctagtaaggccaccagctcaggagacaattgccatttacacaaagtgagtagcttatcctacccacaggttcctagagggcgcacatttcacagcagggggccgctggggaagcagcagggtctgtcgtgagggaaagtcatggaggggactgtgggccagagcttttattatggtttgnatggggagaaaagggcaaggccaggcaagcaggcttcagatgggcagatatgaagcattttgtgggctctggggcatagaggctgcctagcggcctgacacctggccttggggtgattagggcagaaagatagtggcttggagtgcaagagcccaataaggcaggtggttggcagtacagaccccagactggttggtttgtattttaaaatcacactctcggccaggcgcggtggctcacgcctgtaattccgtcactttgggaggtcaaggcgggtagatcacgaggtcaagagatcaaaaccatgctggccaacacggtgaaaccccgtctttactacaaatacaaaaattagctgggtgtggtggcgtgcacctgtagtcccagctactcaggaggctgaggcaggagaatcacttgagcccaggaggcagaggttgcagtgagccgccaagatcatgccactgcactccagcctggcaacagagcgagaatccgtctc

SEQ ID NO: 32442 - DNA, 2371 bp, Homo sapiens
tgtcttcctgagagacagtagatttagaaagtgaggatcagagggtggaaaataaaagctgtggtccccaggagtcctgaacatctggggacagcgggaaaacatgagtgactccaaggaaccaagggtgcagcagctgggcctcctggaagaagatccaacaaccagtggcatcagactttttccaagagactttcaattccagcagatacatggccacaagagctctacagggtgtcttggccatggcgccctggtgctgcaactcctctccttcatgctcttggctggggtcctggtggccatccttgtccaagtgtccaaggtccccagctccctaagtcaggaacaatccgagcaagacgcaatctaccagaacctgacccagcttaaagctgcagtgggtgagctctcagagaaatccaagctgcaggagatctaccaggagctgacccagctgaaggctgcagtgggtgagttgccagagaaatccaagctgcaggagatctaccaggagctgacccggctgaaggctgcagtgggtgagttgccagagaaatccaagctgcaggagatctaccaggagctgacccggctgaaggctgcagtgggtgagttgccagagaaatccaagctgcaggagatctaccaggagctgacccggctgaaggctgcagtgggtgagttgccagagaaatccaagctgcaggagatctaccaggagctgacggagctgaaggctgcagtgggtgagttgccagagaaatccaagctgcaggagatctaccaggagctgacccagctgaaggctgcagtgggtgagttgccagaccagtccaagcagcagcaaatctatcaagaactgaccgatttgaagactgcatttggtgagttcctgcacatcaagggtccttgggcctgagatggtctctgtgtgatgtgactttacttgagttaccaaccctgcctgagcctcagtttcctcccctgtgaaatgagaacacggggtaactgcgatcattgcacttggtgttcacagtgggccaggcacacagtagacactcagttcaaccaatccgctgccttctgttctgagctctaaagctgctaattctcccagtctggaagagatggagccaggactcctgggttctcctggggatcagggagagtcttgggaagtagggagaggaatggtctctccccattccaagcggtccacccaacatggacagtcaaggaagggccctgattttcaagggcttgaaggctgggcagatatgggaatatggacaacctaatctgagcccagccctgaccagcctcccccaacagaacgcctgtgccgccactgtcccaaggactggacattcttccaaggaaactgttacttcatgtctaactcccagcggaactggcacgactccgtcaccgcctgccaggaagtgagggcccagctcgtcgtaatcaaaactgctgaggagcagaacttcctacagctgcagacttccaggagtaaccgcttctcctggatgggactttcagacctaaatcaggaaggcacgtggcaatgggtggacggctcacctctgtcacccagcttccagcggtactggaacagtggagaacccaacaatagcgggaatgaagactgtgcggaatttagtggcagtggctggaacgacaatcgatgtgacgttgacaattactggatctgcaaaaagcccgcagcctgcttcagagacgaatagttgtttccctgctagcctcagcctccattgtggtatagcagaacttcacccacttgtaagccagcgcttcttctctccatccttggaccttcacaaatgccctgagacggttctctgttcgatttttcatcccctatgaacctgggtcttattctgtccttctgatgcctccaagtttccctggtgtagagcttgtgttcttggcccatccttggagctttataagtgacctgagtgggatgcatttagggggcgggcttggtatgttgtatgaatccactctctgttccttttggagattagactatttggattcatgtgtagctgccctgtcccctggggctttatctcatccatgcaaactaccatctgctcaacttccagctacaccccgtgcacccttttgactggggacttgctggttgaaggagctcatcttgcaggctggaagcaccagggaattaattcccccagtcaaccaatggcatccagagagggcatggaggctccatacaacctcttccacccccacatctttctttgtcctatacatgtcttccatttggctgtttctgagttgtagcctttataataaagtggtaaatgttgtaactgcaaaa

SEQ ID NO: 32443 - DNA, 2258 bp, Homo sapiens
tgtcttcctgagagacagtagatttagaaagtgaggatcagagggtggaaaataaaagctgtggtccccaggagtcctgaacatctggggacagcgggaaaacatgagtgactccaaggaaccaagggtgcagcagctgggcctcctggaagaagatccaacaaccagtggcatcagactttttccaagagactttcaattccagcagatacatggccacaagagctctacagggtgtcttggccatggcgccctggtgctgcaactcctctccttcatgctcttggctggggtcctggtggccatccttgtccaagtgtccaaggtccccagctccctaagtcaggaacaatccgagcaagacgcaatctaccagaacctgacccagcttaaagctgcagtgggtgagctctcagagaaatccaagctgcaggagatctaccaggagctgacccagctgaaggctgcagtgggtgagttgccagagaaatccaagctgcaggagatctaccaggagctgacccggctgaaggctgcagtgggtgagttgccagagaaatccaagctgcaggagatctaccaggagctgacccggctgaaggctgcagtgggtgagttgccagagaaatccaagctgcaggagatctaccaggagctgacccggctgaaggctgcagtgggtgagttgccagagaaatccaagctgcaggagatctaccaggagctgacggagctgaaggctgcagtgggtgagttgccagagaaatccaagctgcaggagatctaccaggagctgacccagctgaaggctgcagtgggtgagttgccagaccagtccaagcagcagcaaatctatcaagaactgaccgatttgaagactgcatttggtgagttcctgcacatcaagggtccttgggcctgagatggtctctgtgtgatgtgactttacttgagttaccaaccctgcctgagcctcagtttcctcccctgtgaaatgagaacacggggtaactgcgatcattgcacttggtgttcacagtgggccaggcacacagtagacactcagttcaaccaatccgctgccttctgttctgagctctaaagctgctaattctcccagtctggaagagatggagccaggactcctgggttctcctggggatcagggagagtcttgggaagtagggagaggaatggtctctccccattccaagcggtccacccaacatggacagtcaaggaagggccctgattttcaagggcttgaaggctgggcagatatgggaatatggacaacctaatctgagcccagccctgaccagcctcccccaacagaacgcctgtgccgccactgtcccaaggactggacattcttccaaggaaactgttacttcatgtctaactcccagcggaactggcacgactccgtcaccgcctgccaggaagtgagggcccagctcgtcgtaatcaaaactgctgaggagcagcttccagcggtactggaacagtggagaacccaacaatagcgggaatgaagactgtgcggaatttagtggcagtggctggaacgacaatcgatgtgacgttgacaattactggatctgcaaaaagcccgcagcctgcttcagagacgaatagttgtttccctgctagcctcagcctccattgtggtatagcagaacttcacccacttgtaagccagcgcttcttctctccatccttggaccttcacaaatgccctgagacggttctctgttcgatttttcatcccctatgaacctgggtcttattctgtccttctgatgcctccaagtttccctggtgtagagcttgtgttcttggcccatccttggagctttataagtgacctgagtgggatgcatttagggggcgggcttggtatgttgtatgaatccactctctgttccttttggagattagactatttggattcatgtgtagctgccctgtcccctggggctttatctcatccatgcaaactaccatctgctcaacttccagctacaccccgtgcacccttttgactggggacttgctggttgaaggagctcatcttgcaggctggaagcaccagggaattaattcccccagtcaaccaatggcatccagagagggcatggaggctccatacaacctcttccacccccacatctttctttgtcctatacatgtcttccatttggctgtttctgagttgtagcctttataataaagtggtaaatgttgtaactgcaaaa

SEQ ID NO: 32444 - DNA, 2195 bp, Homo sapiens
tgtcttcctgagagacagtagatttagaaagtgaggatcagagggtggaaaataaaagctgtggtccccaggagtcctgaacatctggggacagcgggaaaacatgagtgactccaaggaaccaagggtgcagcagctgggcctcctggaagaagatccaacaaccagtggcatcagactttttccaagagactttcaattccagcagatacatggccacaagagctctacagttccttttcttcttggcccagtgtccaaggtccccagctccctaagtcaggaacaatccgagcaagacgcaatctaccagaacctgacccagcttaaagctgcagtgggtgagctctcagagaaatccaagctgcaggagatctaccaggagctgacccagctgaaggctgcagtgggtgagttgccagagaaatccaagctgcaggagatctaccaggagctgacccggctgaaggctgcagtgggtgagttgccagagaaatccaagctgcaggagatctaccaggagctgacccggctgaaggctgcagtgggtgagttgccagagaaatccaagctgcaggagatctaccaggagctgacccggctgaaggctgcagtgggtgagttgccagagaaatccaagctgcaggagatctaccaggagctgacggagctgaaggctgcagtgggtgagttgccagagaaatccaagctgcaggagatctaccaggagctgacccagctgaaggctgcagtgggtgagttgccagaccagtccaagcagcagcaaatctatcaagaactgaccgatttgaagactgcatttggtgagttcctgcacatcaagggtccttgggcctgagatggtctctgtgtgatgtgactttacttgagttaccaaccctgcctgagcctcagtttcctcccctgtgaaatgagaacacggggtaactgcgatcattgcacttggtgttcacagtgggccaggcacacagtagacactcagttcaaccaatccgctgccttctgttctgagctctaaagctgctaattctcccagtctggaagagatggagccaggactcctgggttctcctggggatcagggagagtcttgggaagtagggagaggaatggtctctccccattccaagcggtccacccaacatggacagtcaaggaagggccctgattttcaagggcttgaaggctgggcagatatgggaatatggacaacctaatctgagcccagccctgaccagcctcccccaacagaacgcctgtgccgccactgtcccaaggactggacattcttccaaggaaactgttacttcatgtctaactcccagcggaactggcacgactccgtcaccgcctgccaggaagtgagggcccagctcgtcgtaatcaaaactgctgaggagcagcttccagcggtactggaacagtggagaacccaacaatagcgggaatgaagactgtgcggaatttagtggcagtggctggaacgacaatcgatgtgacgttgacaattactggatctgcaaaaagcccgcagcctgcttcagagacgaatagttgtttccctgctagcctcagcctccattgtggtatagcagaacttcacccacttgtaagccagcgcttcttctctccatccttggaccttcacaaatgccctgagacggttctctgttcgatttttcatcccctatgaacctgggtcttattctgtccttctgatgcctccaagtttccctggtgtagagcttgtgttcttggcccatccttggagctttataagtgacctgagtgggatgcatttagggggcgggcttggtatgttgtatgaatccactctctgttccttttggagattagactatttggattcatgtgtagctgccctgtcccctggggctttatctcatccatgcaaactaccatctgctcaacttccagctacaccccgtgcacccttttgactggggacttgctggttgaaggagctcatcttgcaggctggaagcaccagggaattaattcccccagtcaaccaatggcatccagagagggcatggaggctccatacaacctcttccacccccacatctttctttgtcctatacatgtcttccatttggctgtttctgagttgtagcctttataataaagtggtaaatgttgtaactgcaaaa

SEQ ID NO: 32445 - DNA, 1722 bp, Homo sapiens
tgtcttcctgagagacagtagatttagaaagtgaggatcagagggtggaaaataaaagctgtggtccccaggagtcctgaacatctggggacagcgggaaaacatgagtgactccaaggaaccaagggtgcagcagctgggcctcctggaagaagatccaacaaccagtggcatcagactttttccaagagactttcaattccagcagatacatggccacaagagctctacagttccttttcttcttggcccagtgtccaaggtccccagctccctaagtcaggaacaatccgagcaagacgcaatctaccagaacctgacccagcttaaagctgcagtgggtgagctctcagagaaatccaagctgcaggagatctaccaggagctgacccagctgaaggctgcagtgggtgagttgccagagaaatccaagctgcaggagatctaccaggagctgacccggctgaaggctgcagtgggtgagttgccagagaaatccaagctgcaggagatctaccaggagctgacccggctgaaggctgcagtgggtgagttgccagagaaatccaagctgcaggagatctaccaggagctgacccggctgaaggctgcagtgggtgagttgccagagaaatccaagctgcaggagatctaccaggagctgacggagctgaaggctgcagtggaacgcctgtgccgccactgtcccaaggactggacattcttccaaggaaactgttacttcatgtctaactcccagcggaactggcacgactccgtcaccgcctgccaggaagtgagggcccagctcgtcgtaatcaaaactgctgaggagcagaacttcctacagctgcagacttccaggagtaaccgcttctcctggatgggactttcagacctaaatcaggaaggcacgtggcaatgggtggacggctcacctctgtcacccagcttccagcggtactggaacagtggagaacccaacaatagcgggaatgaagactgtgcggaatttagtggcagtggctggaacgacaatcgatgtgacgttgacaattactggatctgcaaaaagcccgcagcctgcttcagagacgaatagttgtttccctgctagcctcagcctccattgtggtatagcagaacttcacccacttgtaagccagcgcttcttctctccatccttggaccttcacaaatgccctgagacggttctctgttcgatttttcatcccctatgaacctgggtcttattctgtccttctgatgcctccaagtttccctggtgtagagcttgtgttcttggcccatccttggagctttataagtgacctgagtgggatgcatttagggggcgggcttggtatgttgtatgaatccactctctgttccttttggagattagactatttggattcatgtgtagctgccctgtcccctggggctttatctcatccatgcaaactaccatctgctcaacttccagctacaccccgtgcacccttttgactggggacttgctggttgaaggagctcatcttgcaggctggaagcaccagggaattaattcccccagtcaaccaatggcatccagagagggcatggaggctccatacaacctcttccacccccacatctttctttgtcctatacatgtcttccatttggctgtttctgagttgtagcctttataataaagtggtaaatgttgtaactgcaaaa

SEQ ID NO: 32446 - DNA, 1515 bp, Homo sapiens
tgtcttcctgagagacagtagatttagaaagtgaggatcagagggtggaaaataaaagctgtggtccccaggagtcctgaacatctggggacagcgggaaaacatgagtgactccaaggaaccaagggtgcagcagctgggcctcctggaagaagatccaacaaccagtggcatcagactttttccaagagactttcaattccagcagatacatggccacaagagctctacagttccttttcttcttggcccagtgtccaaggtccccagctccctaagtcaggaacaatccgagcaagacgcaatctaccagaacctgacccagcttaaagctgcagtgggtgagctctcagagaaatccaagctgcaggagatctaccaggagctgacccagctgaaggctgcagtgggtgagttgccagagaaatccaagctgcaggagatctaccaggagctgacccggctgaaggctgcagtggaacgcctgtgccgccactgtcccaaggactggacattcttccaaggaaactgttacttcatgtctaactcccagcggaactggcacgactccgtcaccgcctgccaggaagtgagggcccagctcgtcgtaatcaaaactgctgaggagcagaacttcctacagctgcagacttccaggagtaaccgcttctcctggatgggactttcagacctaaatcaggaaggcacgtggcaatgggtggacggctcacctctgtcacccagcttccagcggtactggaacagtggagaacccaacaatagcgggaatgaagactgtgcggaatttagtggcagtggctggaacgacaatcgatgtgacgttgacaattactggatctgcaaaaagcccgcagcctgcttcagagacgaatagttgtttccctgctagcctcagcctccattgtggtatagcagaacttcacccacttgtaagccagcgcttcttctctccatccttggaccttcacaaatgccctgagacggttctctgttcgatttttcatcccctatgaacctgggtcttattctgtccttctgatgcctccaagtttccctggtgtagagcttgtgttcttggcccatccttggagctttataagtgacctgagtgggatgcatttagggggcgggcttggtatgttgtatgaatccactctctgttccttttggagattagactatttggattcatgtgtagctgccctgtcccctggggctttatctcatccatgcaaactaccatctgctcaacttccagctacaccccgtgcacccttttgactggggacttgctggttgaaggagctcatcttgcaggctggaagcaccagggaattaattcccccagtcaaccaatggcatccagagagggcatggaggctccatacaacctcttccacccccacatctttctttgtcctatacatgtcttccatttggctgtttctgagttgtagcctttataataaagtggtaaatgttgtaactgcaaaa

SEQ ID NO: 32447 - DNA, 1534 bp, Homo sapiens
tgtcttcctgagagacagtagatttagaaagtgaggatcagagggtggaaaataaaagctgtggtccccaggagtcctgaacatctggggacagcgggaaaacatgagtgactccaaggaaccaagggtgcagcagctgggcctcctggaagaagatccaacaaccagtggcatcagactttttccaagagactttcaattccagcagatacatggccacaagagctctacagggtgtcttggccatggcgccctggtgctgcaactcctctccttcatgctcttggctggggtcctggtggccatccttgtccaagtgtccaaggtccccagctccctaagtcaggaacaatccgagcaagacgcaatctaccagaacctgacccagcttaaagctgcagtgggtgagctctcagagaaatccaagctgcaggagatctaccaggagctgacccagctgaaggctgcagtgggtgagttgccagagaaatccaagctgcaggagatctaccaggagctgacccggctgaaggctgcagtgggtgagttgccagagaaatccaagctgcaggagatctaccaggagctgacccggctgaaggctgcagtggaacgcctgtgccgccactgtcccaaggactggacattcttccaaggaaactgttacttcatgtctaactcccagcggaactggcacgactccgtcaccgcctgccaggaagtgagggcccagctcgtcgtaatcaaaactgctgaggagcagcttccagcggtactggaacagtggagaacccaacaatagcgggaatgaagactgtgcggaatttagtggcagtggctggaacgacaatcgatgtgacgttgacaattactggatctgcaaaaagcccgcagcctgcttcagagacgaatagttgtttccctgctagcctcagcctccattgtggtatagcagaacttcacccacttgtaagccagcgcttcttctctccatccttggaccttcacaaatgccctgagacggttctctgttcgatttttcatcccctatgaacctgggtcttattctgtccttctgatgcctccaagtttccctggtgtagagcttgtgttcttggcccatccttggagctttataagtgacctgagtgggatgcatttagggggcgggcttggtatgttgtatgaatccactctctgttccttttggagattagactatttggattcatgtgtagctgccctgtcccctggggctttatctcatccatgcaaactaccatctgctcaacttccagctacaccccgtgcacccttttgactggggacttgctggttgaaggagctcatcttgcaggctggaagcaccagggaattaattcccccagtcaaccaatggcatccagagagggcatggaggctccatacaacctcttccacccccacatctttctttgtcctatacatgtcttccatttggctgtttctgagttgtagcctttataataaagtggtaaatgttgtaactgcaaaa

SEQ ID NO: 32448 - DNA, 2317 bp, Homo sapiens
tgtcttcctgagagacagtagatttagaaagtgaggatcagagggtggaaaataaaagctgtggtccccaggagtcctgaacatctggggacagcgggaaaacatgagtgactccaaggaaccaagggtgcagcagctgggcctcctggaagaagatccaacaaccagtggcatcagactttttccaagagactttcaattccagcagatacatggccacaagagctctacagggtgtcttggccatggcgccctggtgctgcaactcctctccttcatgctcttggctggggtcctggtggccatccttgtccaagtgtccaaggtccccagctccctaagtcaggaacaatccgagcaagacgcaatctaccagaacctgacccagcttaaagctgcagtgggtgagctctcagagaaatccaagctgcaggagatctaccaggagctgacccagctgaaggctgcagtgggtgagttgccagagaaatccaagctgcaggagatctaccaggagctgacccggctgaaggctgcagtgggtgagttgccagagaaatccaagctgcaggagatctaccaggagctgacccggctgaaggctgcagtgggtgagttgccagagaaatccaagctgcaggagatctaccaggagctgacccggctgaaggctgcagtgggtgagttgccagagaaatccaagctgcaggagatctaccaggagctgacggagctgaaggctgcagtgggtgagttgccagagaaatccaagctgcaggagatctaccaggagctgacccagctgaaggctgcagtgggtgagttgccagaccagtccaagcagcagcaaatctatcaagaactgaccgatttgaagactgcatttggtgagttcctgcacatcaagggtccttgggcctgagatggtctctgtgtgatgtgactttacttgagttaccaaccctgcctgagcctcagtttcctcccctgtgaaatgagaacacggggtaactgcgatcattgcacttggtgttcacagtgggccaggcacacagtagacactcagttcaaccaatccgctgccttctgttctgagctctaaagctgctaattctcccagtctggaagagatggagccaggactcctgggttctcctggggatcagggagagtcttgggaagtagggagaggaatggtctctccccattccaagcggtccacccaacatggacagtcaaggaagggccctgattttcaagggcttgaaggctgggcagatatgggaatatggacaacctaatctgagcccagccctgaccagcctcccccaacagaacgcctgtgccgccactgtcccaaggactggacattcttccaaggaaactgttacttcatgtctaactcccagcggaactggcacgactccgtcaccgcctgccaggaagtgagggcccagctcgtcgtaatcttctcctggatgggactttcagacctaaatcaggaaggcacgtggcaatgggtggacggctcacctctgtcacccagcttccagcggtactggaacagtggagaacccaacaatagcgggaatgaagactgtgcggaatttagtggcagtggctggaacgacaatcgatgtgacgttgacaattactggatctgcaaaaagcccgcagcctgcttcagagacgaatagttgtttccctgctagcctcagcctccattgtggtatagcagaacttcacccacttgtaagccagcgcttcttctctccatccttggaccttcacaaatgccctgagacggttctctgttcgatttttcatcccctatgaacctgggtcttattctgtccttctgatgcctccaagtttccctggtgtagagcttgtgttcttggcccatccttggagctttataagtgacctgagtgggatgcatttagggggcgggcttggtatgttgtatgaatccactctctgttccttttggagattagactatttggattcatgtgtagctgccctgtcccctggggctttatctcatccatgcaaactaccatctgctcaacttccagctacaccccgtgcacccttttgactggggacttgctggttgaaggagctcatcttgcaggctggaagcaccagggaattaattcccccagtcaaccaatggcatccagagagggcatggaggctccatacaacctcttccacccccacatctttctttgtcctatacatgtcttccatttggctgtttctgagttgtagcctttataataaagtggtaaatgttgtaactgcaaaa

SEQ ID NO: 32449 - DNA, 2317 bp, Homo sapiens
tgtcttcctgagagacagtagatttagaaagtgaggatcagagggtggaaaataaaagctgtggtccccaggagtcctgaacatctggggacagcgggaaaacatgagtgactccaaggaaccaagggtgcagcagctgggcctcctggaagaagatccaacaaccagtggcatcagactttttccaagagactttcaattccagcagatacatggccacaagagctctacagggtgtcttggccatggcgccctggtgctgcaactcctctccttcatgctcttggctggggtcctggtggccatccttgtccaagtgtccaaggtccccagctccctaagtcaggaacaatccgagcaagacgcaatctaccagaacctgacccagcttaaagctgcagtgggtgagctctcagagaaatccaagctgcaggagatctaccaggagctgacccagctgaaggctgcagtgggtgagttgccagagaaatccaagctgcaggagatctaccaggagctgacccggctgaaggctgcagtgggtgagttgccagagaaatccaagctgcaggagatctaccaggagctgacccggctgaaggctgcagtgggtgagttgccagagaaatccaagctgcaggagatctaccaggagctgacccggctgaaggctgcagtgggtgagttgccagagaaatccaagctgcaggagatctaccaggagctgacggagctgaaggctgcagtgggtgagttgccagagaaatccaagctgcaggagatctaccaggagctgacccagctgaaggctgcagtgggtgagttgccagaccagtccaagcagcagcaaatctatcaagaactgaccgatttgaagactgcatttggtgagttcctgcacatcaagggtccttgggcctgagatggtctctgtgtgatgtgactttacttgagttaccaaccctgcctgagcctcagtttcctcccctgtgaaatgagaacacggggtaactgcgatcattgcacttggtgttcacagtgggccaggcacacagtagacactcagttcaaccaatccgctgccttctgttctgagctctaaagctgctaattctcccagtctggaagagatggagccaggactcctgggttctcctggggatcagggagagtcttgggaagtagggagaggaatggtctctccccattccaagcggtccacccaacatggacagtcaaggaagggccctgattttcaagggcttgaaggctgggcagatatgggaatatggacaacctaatctgagcccagccctgaccagcctcccccaacagaacgcctgtgccgccactgtcccaaggactggacattcttccaaggaaactgttacttcatgtctaactcccagcggaactggcacgactccgtcaccgcctgccaggaagtgagggcccagctcgtcgtaatcaaaactgctgaggagcagaacttcctacagctgcagacttccaggagtaaccgcttctcctggatgggactttcagacctaaatcaggaaggcacgtggcaatgggtggacggctcacctctgtcacccagcttccagcggtactggaacagtggagaacccaacaatagcgggaatgaagactgtgcggaatttagtggcagtggctggaacgacaatcgatgtgacgttgacaattactggatctgcactccattgtggtatagcagaacttcacccacttgtaagccagcgcttcttctctccatccttggaccttcacaaatgccctgagacggttctctgttcgatttttcatcccctatgaacctgggtcttattctgtccttctgatgcctccaagtttccctggtgtagagcttgtgttcttggcccatccttggagctttataagtgacctgagtgggatgcatttagggggcgggcttggtatgttgtatgaatccactctctgttccttttggagattagactatttggattcatgtgtagctgccctgtcccctggggctttatctcatccatgcaaactaccatctgctcaacttccagctacaccccgtgcacccttttgactggggacttgctggttgaaggagctcatcttgcaggctggaagcaccagggaattaattcccccagtcaaccaatggcatccagagagggcatggaggctccatacaacctcttccacccccacatctttctttgtcctatacatgtcttccatttggctgtttctgagttgtagcctttataataaagtggtaaatgttgtaactgcaaaa

SEQ ID NO: 32450 - DNA, 1839 bp, Homo sapiens
tgtcttcctgagagacagtagatttagaaagtgaggatcagagggtggaaaataaaagctgtggtccccaggagtcctgaacatctggggacagcgggaaaacatgagtgactccaaggaaccaagggtgcagcagctgggcctcctggaagaagatccaacaaccagtggcatcagactttttccaagagactttcaattccagcagatacatggccacaagagctctacagtgtccaaggtccccagctccctaagtcaggaacaatccgagcaagacgcaatctaccagaacctgacccagcttaaagctgcagtgggtgagctctcagagaaatccaagctgcaggagatctaccaggagctgacccagctgaaggctgcagtgggtgagttgccagagaaatccaagctgcaggagatctaccaggagctgacccggctgaaggctgcagtgggtgagttgccagagaaatccaagctgcaggagatctaccaggagctgacccggctgaaggctgcagtgggtgagttgccagagaaatccaagctgcaggagatctaccaggagctgacccggctgaaggctgcagtgggtgagttgccagagaaatccaagctgcaggagatctaccaggagctgacggagctgaaggctgcagtgggtgagttgccagagaaatccaagctgcaggagatctaccaggagctgacccagctgaaggctgcagtgggtgagttgccagaccagtccaagcagcagcaaatctatcaagaactgaccgatttgaagactgcatttgaacgcctgtgccgccactgtcccaaggactggacattcttccaaggaaactgttacttcatgtctaactcccagcggaactggcacgactccgtcaccgcctgccaggaagtgagggcccagctcgtcgtaatcaaaactgctgaggagcagaacttcctacagctgcagacttccaggagtaaccgcttctcctggatgggactttcagacctaaatcaggaaggcacgtggcaatgggtggacggctcacctctgtcacccagcttccagcggtactggaacagtggagaacccaacaatagcgggaatgaagactgtgcggaatttagtggcagtggctggaacgacaatcgatgtgacgttgacaattactggatctgcaaaaagcccgcagcctgcttcagagacgaatagttgtttccctgctagcctcagcctccattgtggtatagcagaacttcacccacttgtaagccagcgcttcttctctccatccttggaccttcacaaatgccctgagacggttctctgttcgatttttcatcccctatgaacctgggtcttattctgtccttctgatgcctccaagtttccctggtgtagagcttgtgttcttggcccatccttggagctttataagtgacctgagtgggatgcatttagggggcgggcttggtatgttgtatgaatccactctctgttccttttggagattagactatttggattcatgtgtagctgccctgtcccctggggctttatctcatccatgcaaactaccatctgctcaacttccagctacaccccgtgcacccttttgactggggacttgctggttgaaggagctcatcttgcaggctggaagcaccagggaattaattcccccagtcaaccaatggcatccagagagggcatggaggctccatacaacctcttccacccccacatctttctttgtcctatacatgtcttccatttggctgtttctgagttgtagcctttataataaagtggtaaatgttgtaactgcaaaa

SEQ ID NO: 32451 - DNA, 4947 bp, Homo sapiens
cccgggggggagagagccggcaggcggcggcggtggtggcgggggcgatgcgccgcgcccggccgcgctaggtgagccggcaccgggagcgcgggccgcggccatgggcaccctgggcaaggcgagagaggctccgcggaaaccttcccatggctgcagagctgcctctaaagcaagactagaggcaaagccagccaacagccccttcccctcccatcccagcttggcccacatcacccagttccgaatgatggtgtctctgggacatttagccaaaggagccagcctggacgatctcattgacagctgcattcaatcttttgatgcagatggaaacctgtgtcgaagtaaccaactgttgcaagtcatgctgaccatgcaccgaattgtcatctcctctgcagaactgctccaaaaagttatcaccctctataaggatgctttggcaaagaattcaccaggactttgcctgaagatctgttattttgtaaggtattggataacagaattctgggtcatgtttaaaatggacgccagcttgacagacactatggaggagtttcaggaactggtgaaagctaagggtgaggagttacattgccgcctgattgacacaactcaaatcaatgcccgtgactggtccaggaaacttactcaaaggataaaatcaaataccagcaagaaacggaaagtctccctgctctttgaccatctggaaccagaagagctatccgagcacctcacctaccttgagttcaagtctttccggaggatatcgttctctgattatcagaattaccttgtaaatagctgtgtgaaggaaaaccccaccatggagcgatctattgctctgtgcaacggcatctcccagtgggtacaactgatggttctcagccgccccacgccgcagctccgagcagaagtcttcatcaagttcatccaggtggctcagaagctccaccaactacagaacttcaatacactgatggctgtgataggtgggctgtgtcacagctcaatctcgaggctcaaggagacaagttcgcatgtcccacatgaaatcaataaggttctcggtgagatgactgagctgctgtcctcctccagaaactacgacaattaccggcgagcctatggagagtgcaccgacttcaagatccccattctgggtgtgcatctcaaggacctcatctccctgtatgaagccatgcctgactatctgggggacgggaaagtgaacgtccataagctactggccctatacaatcatatcagtgaattggtccagctgcaagaggtggccccacccttggaggctaacaaggacttggtacacttgctgacgttatccctggatctttactacactgaggatgaaatctatgagctttcctatgcccgggaaccaaggaaccacagagctccaccactaacaccttcaaagccaccagtagtagtggactgggcttctggagtgtctcccaaacctgatccaaaaaccattagcaaacacgtccagaggatggtggattctgtcttcaagaactatgatcacgaccaggatggatacatttctcaggaagaatttgaaaagattgctgcgagttttccattttccttctgtgtgatggacaaagacagggaaggcctcatcagcagggatgagatcacagcctacttcatgagagccagctcaatctattccaagctgggcctgggctttcctcacaacttccaagagaccacctacctgaagcccactttttgtgacaactgtgctggatttctctggggagtgatcaaacaaggatatcgatgtaaagactgcgggatgaactgtcacaaacaatgcaaagatctggttgtgtttgagtgtaagaagcgagccaagaacccagtagctcccacagagaacaacacttctgtggggccagtgtccaacctttgctcattgggagccaaagatctgctccatgcacctgaggaaggaccttttacattccctaatggggaggctgtggaacatggtgaggagagtaaggatcggaccatcatgctgatgggagtgtcctcacagaagatttctcttcggctgaagagggctgttgcccacaaggccacccagactgaatcacagccttggattggcagtgagggcccttcaggtccctttgtgctgtcttccccaaggaagacagcccaggatactctatatgtgcttcccagtcccacctctccatgtcctagcccagtcttggtcagaaagcgggcttttgtcaagtgggagaataaagactccctcataaaatcaaaggaggagctccgtcacctcagactgcctacctaccaagaactggaacaggaaataaatactctgaaagcagataatgatgccctaaagatccaactgaaatatgcacagaagaaaatagaatccctccagcttgaaaaaagcaatcatgtcttagctcaaatggagcagggtgactgttcttagcccagaaactaagtagcacaatctgtagatgagtatagtgatctcatttcctaaactgtaatgcacagacctgaggaactttacactgaccagctttaaaacagtactttaaaaggaaaagcctgttactgtttatttacctaaaagattcctaatgtgcagcactgttttctctttcagttagttgactcaaagggggaaaactaaagaatgcaaaacttttgctattcataccactgatgttcatcaaaagtatgcgatctaaaacatgactatcatttcctgacaatggggcatctcggtggcctgcctggctgattcttccttaaaactaaaatctctggaaaatggatttgcttcttaccctgtgttttctgcaaactgacttactttgttccagccaaagcttgctaataatagaaaactacccatattccaaaagtagatttcctctgtatcccagcatactttgtgaacctggctccttcttcactacctcagatctaatcaattagtccatgtaccctccttcctcactacagtcataacacatgagcatatctacctagaagccaatttctactgatgtagccacaactttttagaggcctattaaacatgacgttatccaattgcaggtcaacttatagttgtagccttacaacttacaggcatcagaaaataagtaatcaaattaggtacctggaaacatagctattaccatctcatattactgtctaattaaaataaacataacgcaaacatgtttgtccttatatattctacagtggatagaattaggaattgatggcttaaaaaaaaaagtctatgaagagtctgtttaactcttcatgttccatctttctcttctgaagtaaactattttgaaagttctctttttgaaatgaatttgtgcttaactgtcttcactattaatactatttagaaataagctaattggatcagtggcttaaataatagctgactgtgtgtacatatgtatataatatgtatatacaatatcaggcatgcatgtggcttggaattttgtttcctccataaaatgtggaagtgaattaaacaagttttagtcatttatacaaagtcacaaatataaagttcagtttgtcacaagattaaattgctcacaaggtaaaattgtattgtttggcaaaatcacaagtaacaatcctgtgagttttctattatgaaggttaataataaatgggctcatttagttgcctgggcacctattcacaaattcatttgtcagcctctttttagttctcttaaaaaaaaaaaaatcatatgatcattttcctttttgggggtacttagcttccatgcctataaagtctggtaccagactgacttgaaattcataaacaagttgtccaattgccaagaatatgttaacaattaaaagttccaaactaaagccaatagcaccaagtcttcataagaatacaaagtatacatacagtattgcttacctggaggattcagatcatttaggaattctctttgatgaaagatcagttcccatttgagttcctccttgcactgagttttagtgatatagaactagcttgtagttagtgtttcattacattataaagaatagttttacacacgtatttaccgttttccaaatttaaactcagaaatacccaaagcaggcctgcttaagcccactacctggcatataaacttatagtaacactttgttactttctttttaataggacaagcatgagttaggacaaactctaaaaattcatattcttcactattcttgttttcctttgattgatatagaccaaagatggtgtactctaattttttaaaacagtaatggaacacaatttttttcattcttcctcctctccattcgaagtaaagatccccagttagtttttatataaataatctatagggattcaaaaggtgtcacagtccacttaattagtcaaattagcaatggctaaacagtatcaagtactgcagaatttatcactgaaatggataagaggaaatagtttagtcacaggtttttacagtccagcaagggccaaagaggtatagtatacaagttaatagtatttgtgttgagcaacatggggctagtgggatcacagaaatctggaaaaaaaaaaaaaaaggctttggcttatcaagcctagtgtaaatttctgcatctcacacgactttagtttggccaggtatttatctgccaaaacaaggacaaatcttgttgtattaacagcagggtcacttctcattttctttgctgacttacctttttactgaccgttgtgaatttctgtctcaaaatgtataatatagaaatgcaagaaaaaaacaaatgtacagattgtaaagttttttgatacctaatgtaagttttctttgtgtaatatttatatgataaaagacattaggatccctac

SEQ ID NO: 32452 - DNA, 301 bp, Homo sapiens
ggcgtggaagctgcgggtcggctgcgggaaagggggtcccatgggagccgctagcgcagcccgtttcccgagctgaggtggaggtcgacacgcacaggaaaccttcccatggctgcagagctgcctctaaagcaagactagaggcaaagccagccaacagccccttcccctcccatcccagcttggcccacatcacccagttccgaatgatggtgtctctgggacatttagccaaaggagccagcctggacgatctcattgacagctgcattcaatcttttggtaagttggctaactgccc

SEQ ID NO: 32453 - DNA, 5090 bp, Homo sapiens
atcattagctattgagattatcagcactatcacctggacaagcagcggatgggccgccctcttggccaggtcttctgtgcgcactgacgttgtatgaaagttgtccccacatctcctacacccaccgacgccaggcggccgcgtctgggccagatatggatcacgcctgtggagcgcacctccacacaggcagccctcgtccaaggtgcagggcgcagggcacagggcacatgtctacggcccagtcctgcagacggctacctagagaccccagggcacaggaaaccttcccatggctgcagagctgcctctaaagcaagactagaggcaaagccagccaacagccccttcccctcccatcccagcttggcccacatcacccagttccgaatgatggtgtctctgggacatttagccaaaggagccagcctggacgatctcattgacagctgcattcaatcttttgatgcagatggaaacctgtgtcgaagtaaccaactgttgcaagtcatgctgaccatgcaccgaattgtcatctcctctgcagaactgctccaaaaagttatcaccctctataaggatgctttggcaaagaattcaccaggactttgcctgaagatctgttattttgtaaggtattggataacagaattctgggtcatgtttaaaatggacgccagcttgacagacactatggaggagtttcaggaactggtgaaagctaagggtgaggagttacattgccgcctgattgacacaactcaaatcaatgcccgtgactggtccaggaaacttactcaaaggataaaatcaaataccagcaagaaacggaaagtctccctgctctttgaccatctggaaccagaagagctatccgagcacctcacctaccttgagttcaagtctttccggaggatatcgttctctgattatcagaattaccttgtaaatagctgtgtgaaggaaaaccccaccatggagcgatctattgctctgtgcaacggcatctcccagtgggtacaactgatggttctcagccgccccacgccgcagctccgagcagaagtcttcatcaagttcatccaggtggctcagaagctccaccaactacagaacttcaatacactgatggctgtgataggtgggctgtgtcacagctcaatctcgaggctcaaggagacaagttcgcatgtcccacatgaaatcaataaggttctcggtgagatgactgagctgctgtcctcctccagaaactacgacaattaccggcgagcctatggagagtgcaccgacttcaagatccccattctgggtgtgcatctcaaggacctcatctccctgtatgaagccatgcctgactatctgggggacgggaaagtgaacgtccataagctactggccctatacaatcatatcagtgaattggtccagctgcaagaggtggccccacccttggaggctaacaaggacttggtacacttgctgacgttatccctggatctttactacactgaggatgaaatctatgagctttcctatgcccgggaaccaaggaaccacagagctccaccactaacaccttcaaagccaccagtagtagtggactgggcttctggagtgtctcccaaacctgatccaaaaaccattagcaaacacgtccagaggatggtggattctgtcttcaagaactatgatcacgaccaggatggatacatttctcaggaagaatttgaaaagattgctgcgagttttccattttccttctgtgtgatggacaaagacagggaaggcctcatcagcagggatgagatcacagcctacttcatgagagccagctcaatctattccaagctgggcctgggctttcctcacaacttccaagagaccacctacctgaagcccactttttgtgacaactgtgctggatttctctggggagtgatcaaacaaggatatcgatgtaaagactgcgggatgaactgtcacaaacaatgcaaagatctggttgtgtttgagtgtaagaagcgagccaagaacccagtagctcccacagagaacaacacttctgtggggccagtgtccaacctttgctcattgggagccaaagatctgctccatgcacctgaggaaggaccttttacattccctaatggggaggctgtggaacatggtgaggagagtaaggatcggaccatcatgctgatgggagtgtcctcacagaagatttctcttcggctgaagagggctgttgcccacaaggccacccagactgaatcacagccttggattggcagtgagggcccttcaggtccctttgtgctgtcttccccaaggaagacagcccaggatactctatatgtgcttcccagtcccacctctccatgtcctagcccagtcttggtcagaaagcgggcttttgtcaagtgggagaataaagactccctcataaaatcaaaggaggagctccgtcacctcagactgcctacctaccaagaactggaacaggaaataaatactctgaaagcagataatgatgccctaaagatccaactgaaatatgcacagaagaaaatagaatccctccagcttgaaaaaagcaatcatgtcttagctcaaatggagcagggtgactgttcttagcccagaaactaagtagcacaatctgtagatgagtatagtgatctcatttcctaaactgtaatgcacagacctgaggaactttacactgaccagctttaaaacagtactttaaaaggaaaagcctgttactgtttatttacctaaaagattcctaatgtgcagcactgttttctctttcagttagttgactcaaagggggaaaactaaagaatgcaaaacttttgctattcataccactgatgttcatcaaaagtatgcgatctaaaacatgactatcatttcctgacaatggggcatctcggtggcctgcctggctgattcttccttaaaactaaaatctctggaaaatggatttgcttcttaccctgtgttttctgcaaactgacttactttgttccagccaaagcttgctaataatagaaaactacccatattccaaaagtagatttcctctgtatcccagcatactttgtgaacctggctccttcttcactacctcagatctaatcaattagtccatgtaccctccttcctcactacagtcataacacatgagcatatctacctagaagccaatttctactgatgtagccacaactttttagaggcctattaaacatgacgttatccaattgcaggtcaacttatagttgtagccttacaacttacaggcatcagaaaataagtaatcaaattaggtacctggaaacatagctattaccatctcatattactgtctaattaaaataaacataacgcaaacatgtttgtccttatatattctacagtggatagaattaggaattgatggcttaaaaaaaaaagtctatgaagagtctgtttaactcttcatgttccatctttctcttctgaagtaaactattttgaaagttctctttttgaaatgaatttgtgcttaactgtcttcactattaatactatttagaaataagctaattggatcagtggcttaaataatagctgactgtgtgtacatatgtatataatatgtatatacaatatcaggcatgcatgtggcttggaattttgtttcctccataaaatgtggaagtgaattaaacaagttttagtcatttatacaaagtcacaaatataaagttcagtttgtcacaagattaaattgctcacaaggtaaaattgtattgtttggcaaaatcacaagtaacaatcctgtgagttttctattatgaaggttaataataaatgggctcatttagttgcctgggcacctattcacaaattcatttgtcagcctctttttagttctcttaaaaaaaaaaaaatcatatgatcattttcctttttgggggtacttagcttccatgcctataaagtctggtaccagactgacttgaaattcataaacaagttgtccaattgccaagaatatgttaacaattaaaagttccaaactaaagccaatagcaccaagtcttcataagaatacaaagtatacatacagtattgcttacctggaggattcagatcatttaggaattctctttgatgaaagatcagttcccatttgagttcctccttgcactgagttttagtgatatagaactagcttgtagttagtgtttcattacattataaagaatagttttacacacgtatttaccgttttccaaatttaaactcagaaatacccaaagcaggcctgcttaagcccactacctggcatataaacttatagtaacactttgttactttctttttaataggacaagcatgagttaggacaaactctaaaaattcatattcttcactattcttgttttcctttgattgatatagaccaaagatggtgtactctaattttttaaaacagtaatggaacacaatttttttcattcttcctcctctccattcgaagtaaagatccccagttagtttttatataaataatctatagggattcaaaaggtgtcacagtccacttaattagtcaaattagcaatggctaaacagtatcaagtactgcagaatttatcactgaaatggataagaggaaatagtttagtcacaggtttttacagtccagcaagggccaaagaggtatagtatacaagttaatagtatttgtgttgagcaacatggggctagtgggatcacagaaatctggaaaaaaaaaaaaaaaggctttggcttatcaagcctagtgtaaatttctgcatctcacacgactttagtttggccaggtatttatctgccaaaacaaggacaaatcttgttgtattaacagcagggtcacttctcattttctttgctgacttacctttttactgaccgttgtgaatttctgtctcaaaatgtataatatagaaatgcaagaaaaaaacaaatgtacagattgtaaagttttttgatacctaatgtaagttttctttgtgtaatatttatatgataaaagacattaggatccctac

SEQ ID NO: 32454 - DNA, 410 bp, Homo sapiens
atcatgccactgcactccagcctgggtgacatagtgggaccctgtctaaaaaaaaacaaaaagaaaaattaagtaaaagaatccttctataaaccagctctaagagaaggttgtagttcagtcttactgaagataaggcaaacccatctttattcctagatgacctgcaaagtaggtagctcttggaccttacctaccacacaaatgagctaacctggtctttcacaagactctctttaggctgaaattcatactatgtctcttcttgccttaagttttctttttatttttggtccagccacttaactgcctactataacagctgtcatggctttgttagatttgcaagtgaagataatggatcaatgtaatttcatacccgaaaacttggatattgttttgttttttga

SEQ ID NO: 32455 - DNA, 493 bp, Homo sapiens
cacaaagcgttgggtgagactcctcttgctcgtcatgtctggccgcggcaaaggcgggaagggtcttggcaaaggcggcgctaagcgccaccgtaaagtactgcgcgacaatatccagggcatcaccaagccggccatccggcgccttgctcgccgcggcggcgtgaagcgcatctccggcctcatctacgaggagactcgcggggtgctgaaggtgttcctggagaacgtgatccgggacgccgtgacctatacagagcacgccaagcgcaagacggtcaccgccatggatgtggtctacgcgctcaagcgccagggccgcaccctctacggtttcggtggttgagcgtccctttctatcaacaaaaggccctttttagggcccccactttctcagctgaggagccgtgatgcttgtttgcccagtttctctttaccatttgttcgcgcctgctgagtttgtgctgctatcggagcatgcgtctctagtcgc

SEQ ID NO: 32456 - DNA, 1023 bp, Homo sapiens
aaaggtcggttggtttgcactggcggacaaatggtccaattaccgcggaaaagggacctctgaatccagattggcgtcctctctacctatagggtaggctcaggggcggtgagaaccagccccggatgtgggcgcggcactgaggtagaactgagagatcctctaccgcagtcgtttgaggaggcggaactgaagttttttcttaattatcatgtgacgggttctggatttaatggggggaaaagggcggaaaaggacaaggatccaaactggcgaatttgctgatcttcgcgtccctctccgctttccggccggcagcgctgccagggtatatttccttttttccgatcctgcaacagcctctttaaactgtttaaatgagaatgtccttggctcagagagtactactcacctggcttttcacactactcttcttgatcatgttggtgttgaaactggatgagaaagcaccttggaactggttcctcatattcattccagtctggatatttgatactatccttcttgtcctgctgattgtgaaaatggctgggcggtgtaagtctggctttgaccctcgacatggatcacacaatattaaaaaaaaagcctggtacctcattgcaatgttacttaaattagccttctgcctcgcactctgtgctaaactggaacagtttactaccatgaatctatcctatgtcttcattcctttatgggccttgctggctggggctttaacagaactcggatataatgtcttttttgtgagagactgacttctaagtacatcatctcctttctattgctgttcaacaagttaccattaaagtgttctgaatctgtcaagcttcaagaataccagagaactgagggaaaataccaaatgtagttttatactacttccataaaacaggattggtgaatcacggacttctagtcaacctacagcttaattattcagcatttgagttattgagatccttattatctctatgtaaataaagtttgttttggacctca

SEQ ID NO: 32457 - DNA, 411 bp, Homo sapiens
aaaggtcggttggtttgcactggcggacaaatggtccaattaccgcggaaaagggacctctgaatccagattggcgtcctctctacctatagggtaggctcaggggcggtgagaaccagccccggatgtgggcgcggcactgaggtagaactgagagatcctctaccgcagtcgtttgaggaggcggaactgaagttttttcttaattatcatgtgacgggttctggatttaatggggggaaaagggcggaaaaggacaaggatccaaactggcgaatttgctgatcttcgcgtccctctccgctttccggccggcagcgctgccaggtgagtctggggctctgccctagcccgcaccgtacgccggcgctggtctcctgatgcttccgtgggctgtgcggccgaccctca

SEQ ID NO: 32458 - DNA, 1261 bp, Homo sapiens
agaggcagggtttcactcttgccctggctggtctggagctcttgggctcaaatgatatgcctgccttctcctccccaaatactgggattactggcatgagccacgcacccttcccattcccttcttttaaaactctctctcttctcagcttgatacccacctttcactttttcactactttgaatgcttttttctttgtaccccttgaaattgaattaaaaattagatttgcaaatgtataggaagattaagaacatctttgaggtgcaggaataaagttgtaagtgcctggactcgagtgatagcactgaaaaggaatcacctgacattttgaatagagcttatacagtagatataataaaaattgtattttgtcatgggctgtaaggaatggtggatataatgtcaatgatcactaagttttagaggatttgaaaggaagaatagtagaatgttttcaaaattaggaagtcagttgggaaagaaccagttttgttcattaggaatggaagtgatactttttttctggtatcaaaacaatcttgactttttctccttctcttagggtatatttccttttttccgatcctgcaacagcctctttaaactgtttaaatgagaatgtccttggctcagagagtactactcacctggcttttcacactactcttcttgatcatgttggtgttgaaactggatgagaaagcaccttggaactggttcctcatattcattccagtctggatatttgatactatccttcttgtcctgctgattgtgaaaatggctgggcggtgtaagtctggctttgaccctcgacatggatcacacaatattaaaaaaaaagcctggtacctcattgcaatgttacttaaattagccttctgcctcgcactctgtgctaaactggaacagtttactaccatgaatctatcctatgtcttcattcctttatgggccttgctggctggggctttaacagaactcggatataatgtcttttttgtgagagactgacttctaagtacatcatctcctttctattgctgttcaacaagttaccattaaagtgttctgaatctgtcaagcttcaagaataccagagaactgagggaaaataccaaatgtagttttatactacttccataaaacaggattggtgaatcacggacttctagtcaacctacagcttaattattcagcatttgagttattgagatccttattatctctatgtaaataaagtttgttttggacctca

SEQ ID NO: 32459 - DNA, 1332 bp, Homo sapiens
aaaggtcggttggtttgcactggcggacaaatggtccaattaccgcggaaaagggacctctgaatccagattggcgtcctctctacctatagggtaggctcaggggcggtgagaaccagccccggatgtgggcgcggcactgaggtagaactgagagatcctctaccgcagtcgtttgaggaggcggaactgaagttttttcttaattatcatgtgacgggttctggatttaatggggggaaaagggcggaaaaggacaaggatccaaactggcgaatttgctgatcttcgcgtccctctccgctttccggccggcagcgctgccagggtatatttccttttttccgatcctgcaacagcctctttaaactgtttaaatgagaatgtccttggctcagagagtactactcacctggcttttcacactactcttcttgatcatgttggtgttgaaactggatgagaaagcaccttggaactggttcctcatattcattccagtctggatatttgatactatccttcttgtcctgctgattgtgaaaatggctgggcggtgtaagtctggctttgaccctcgacatggatcacacaatattaaaaaaaaagcctggtacctcattgcaatgttacttaaattagccttctgcctcgcactctgtgctaaactggaacagtttactaccatgaatctatcctatgtcttcattcctttatgggccttgctggctggggctttaacagaactcggatataatgtcttttttgtgagagactgacttctaagtacatcatctcctttctattgctgttcaacaagttaccattaaagtgttctgaatctgtcaagcttcaagaataccagagaactgagggaaaataccaaatgtagttttatactacttccataaaacaggattggtgaatcacggacttctagtcaacctacagcttaattattcagcatttgagttattgagatccttattatctctatgtaaataaagtttgttttggacctcaaaaaaaaaaaaaaaaaaaaaaaacaaaaagggaacaacaaaaaaaaccaaaaaaaacacaacgggggggggccaaggcggacacgagagaagacgagcaaagacaaacggagggggagagagggagccaacagggaaaggagcaaggggacaaaggggaacgtaggaacacacgggagcaacaaaaaggggggaagaaacaccaaataaaaagacgcagagggcaaacaggagagaagaaaggaaacacagtggggacagcgagggaaaaaaggggcatacacaaagggagccaaaggagggagaaata

SEQ ID NO: 32460 - DNA, 1207 bp, Homo sapiens
agaggcagggtttcactcttgccctggctggtctggagctcttgggctcaaatgatatgcctgccttctcctccccaaatactgggattactggcatgagccacgcacccttcccattcccttcttttaaaactctctctcttctcagcttgatacccacctttcactttttcactactttgaatgcttttttctttgtaccccttgaaattgaattaaaaattagatttgcaaatgtataggaagattaagaacatctttgaggtgcaggaataaagttgtaagtgcctggactcgagtgatagcactgaaaaggaatcacctgacattttgaatagagcttatacagtagatataataaaaattgtattttgtcatgggctgtaaggaatggtggatataatgtcaatgatcactaagttttagaggatttgaaaggaagaatagtagaatgttttcaaaattaggaagtcagttgggaaagaaccagttttgttcattaggaatggaagtgatactttttttctggtatcaaaacaatcttgactttttctccttctcttagggtatatttccttttttccgatcctgcaacagcctctttaaactgtttaaatgagaatgtccttggctcagagagtactactcacctggcttttcacactactcttcttgatcatgttggtgttgaaactggatgagaaagcaccttggaactggttcctcatattcattccagtctggatatttgatactatccttcttgtcctgctgattgtgaaaatggctgggcggtgtaagtctggctttgaccctcgacatggatcacacaatattaaaaactgtgctaaactggaacagtttactaccatgaatctatcctatgtcttcattcctttatgggccttgctggctggggctttaacagaactcggatataatgtcttttttgtgagagactgacttctaagtacatcatctcctttctattgctgttcaacaagttaccattaaagtgttctgaatctgtcaagcttcaagaataccagagaactgagggaaaataccaaatgtagttttatactacttccataaaacaggattggtgaatcacggacttctagtcaacctacagcttaattattcagcatttgagttattgagatccttattatctctatgtaaataaagtttgttttggacctca

SEQ ID NO: 32461 - DNA, 1052 bp, Homo sapiens
aaaggtcggttggtttgcactggcggacaaatggtccaattaccgcggaaaagggacctctgaatccagattggcgtcctctctacctatagggtaggctcaggggcggtgagaaccagccccggatgtgggcgcggcactgaggtagaactgagagatcctctaccgcagtcgtttgaggaggcggaactgaagttttttcttaattatcatgtgacgggttctggatttaatggggggaaaagggcggaaaaggacaaggatccaaactggcgaatttgctgatcttcgcgtccctctccgctttccggccggcagcgctgccagggtatatttccttttttccgatcctgcaacagcctctttaaactgtttaaatgagaatgtccttggctcagagagtactactcacctggcttttcacactactcttcttgatcatgttggtgttgaaactggatgagaaagcaccttggaactggttcctcatattcattccagtctggatatttgatactatccttcttgtcctgctgattgtgaaaatggctgggcggtgtaagtctggctttgaccctcgacatggatcacacaatattaaaaaaaaagcctggtacctcattgcaatgttacttaaattagccttctgcctcgcactctgtgctaaactggaacagtttactaccatgaatctatcctatgtcttcattcctttatgggccttgctggctggggctttaacagaactcggatataatgtcttttttgtgagagactgacttctaagtacatcatctcctttctattgctgttcaacaagttaccattaaagtgttctgaatctgtcaagcttcaagaataccagagaactgagggaaaataccaaatgtagttttatactacttccataaaacaggattggtgaatcacggacttctagtcaacctacagcttaattattcagcatttgagttattgagatccttattatctctatgtaaataaagtttgttttggacctcatttttctacatgaaaaaaaaaaaatctgt

SEQ ID NO: 32462 - DNA, 969 bp, Homo sapiens
aaaggtcggttggtttgcactggcggacaaatggtccaattaccgcggaaaagggacctctgaatccagattggcgtcctctctacctatagggtaggctcaggggcggtgagaaccagccccggatgtgggcgcggcactgaggtagaactgagagatcctctaccgcagtcgtttgaggaggcggaactgaagttttttcttaattatcatgtgacgggttctggatttaatggggggaaaagggcggaaaaggacaaggatccaaactggcgaatttgctgatcttcgcgtccctctccgctttccggccggcagcgctgccagggtatatttccttttttccgatcctgcaacagcctctttaaactgtttaaatgagaatgtccttggctcagagagtactactcacctggcttttcacactactcttcttgatcatgttggtgttgaaactggatgagaaagcaccttggaactggttcctcatattcattccagtctggatatttgatactatccttcttgtcctgctgattgtgaaaatggctgggcggtgtaagtctggctttgaccctcgacatggatcacacaatattaaaaactgtgctaaactggaacagtttactaccatgaatctatcctatgtcttcattcctttatgggccttgctggctggggctttaacagaactcggatataatgtcttttttgtgagagactgacttctaagtacatcatctcctttctattgctgttcaacaagttaccattaaagtgttctgaatctgtcaagcttcaagaataccagagaactgagggaaaataccaaatgtagttttatactacttccataaaacaggattggtgaatcacggacttctagtcaacctacagcttaattattcagcatttgagttattgagatccttattatctctatgtaaataaagtttgttttggacctca

SEQ ID NO: 32463 - DNA, 374 bp, Homo sapiens
atgtggctcccaagtctctgtgtctgcagggcacttaggtaccctgcgggggttcagatctccttacagcccagcctgggaaatatgcagtgtcacctccaccacaatccagccagctcggattcaagcaaagggcactcatgggaagatgaccactggccagtgtgtttcatcaggctggcatctttgaagaccagataccacaccgacctccagtgatccaaagtgctgggattacaggcatgataccacaccacagtcatttgaatttgtcattacttggtactcttatttttttccctgctgctctttttgcattgaagtccttttgggatgacgtcaataaaactctttcatgtttttaagattgtatt

SEQ ID NO: 32464 - DNA, 842 bp, Homo sapiens
gccaccacatctggttaatttttgtatttttagtagagacagggtttcaccatgttggccaggctggtcttgaactcctggcctcaagtgatccacctgccttggcctcctaaagtgctgggattataggcatgagcctctgtctacggaatcttgtagcctacaaaatcttctggcctctgtctgcagaatcttgtctgtaccccgtgctagcctctcctctgacccactgggagtgttaagtccattcttctggacttttgctccagctgtgatgaacactatgcttctacctcagtcctgagcctggacccagctgtgcaagcctggccagacccctctcccagggctgaacaccaatttcaagtcttcaggtcctactgcaatctaaacaggctatccagaagagaatcctgcaccagtccaagtgtgagcaggcctggagactctgctgctgaactgcaccccctgatggccagcctggatgtcacttctatcctgcttgagccaggctccccggatccctggaccacctccactccagaccagacaatggggaagctgctggtcccacaccatttctgagttttctcctctatccttctgcttaaagttccctccaaggacttaagtgcaagtcatcccagaaacccaggtaggggagtagagaggccagatatggacaggaaggctgccaagaaaggggtgttaggcacaatggctcaggtctgtaagcccagaactttgggaggctgaggccggaagattgcttgaacctaggaggactgcttgagaccagcctgggcaacacggcgaaaccctatctctacaaaaaacaaaaa

SEQ ID NO: 32465 - DNA, 622 bp, Homo sapiens
attgacctccttcactgtgggcaggcatggtcccaccttctggaactcctcctggaatgggacatcaggggaagcaccttagcttagacagagtggctttgtgattaaaagcctggctcttgaatgaactgaaatccaaaggacctttggggacacgagaaggagaaaacaacatcattcctttcctttatttttggaaggctttgaagtccaacaggccctcttccttagctgtgtgcccttaaggcaaatcacttaacttttgtgaagactctgtttttctcttataacatgatgatgtgactatattaacaacaacaataatagtaataatatttcgagccgggcatggtggctcgtgcctgtaattccagcactttgggaggccgaggctggtggatcacctaaggtcaggagttcgagaccagcctccatctctactaaaaatacaaaaaattagctgagcatggtggcaggcacctgtaatcccagctactagggaggctgaggcaggagaattgcttgaacccgggaggcagaggttgcagtgagctgagatcgtgccattgcactcctgcctgggcaacatgagtgaaactccgtctcaaaaaaaaaaaaaaaa

SEQ ID NO: 32466 - DNA, 670 bp, Homo sapiens
gcggccgcctactactactactactgctcgaattcaagcttctaacgatgtacggggacatgggcccagagccgggacccccccagcccagccccgccctccccagactccgcgcaatcacatactgtatatagacgtgaatcgattttatttttattctttaaattaaggtcgtgataaagtgttgccaaagatacctgctgaattctcgcgtttcaggaaacaaacaaacaaaaaaaaatgatatttgaggagggtcgtgttgactccatatgaaaggacacagctcaaagcttttttgtttggttgtttggggttttttgtgttttctttttttggggtgttttttttttaactgcctggtacaaaaaaaaaaagagaaaaaaaaaaaaaagaaaaacaatgcgaaattgttatttccattctcatggtgaagttgcgtggacgcgtgtgtgcgtgtgtgcaagagagcgggagtgaggtccaggctggggttggggggcttcaggcgggggcgcccgggggccggggaggtggccgggccggagcccccgtctgcagtgccccccagcctgccgggcccaggagagagagagaagcatctttgctactagctgttgctgctacctgcctctgcccgccgacgccccccgccttttgagattaagga

SEQ ID NO: 32467 - DNA, 279 bp, Homo sapiens
ctatgaggatccccagcacagaggaggtggacagcactggacagcacagatggaggaagccatcgcaggggacctgggagacgccccgaggtgtttgtgcttcacccccagacgtcagcctcgaaggcaggactgtggggtgttcgtgctgtgttccccccgctccccctttctgtcccctttttgggttctgacgtgaagaggtcttagcgcccgcttctgtccacggggtctctccttcctctgatgatgtccagtgctgtccacctcctctgtgct

SEQ ID NO: 32468 - DNA, 5270 bp, Homo sapiens
gacgcgcgccgcagcgcgagggagcgaccagggcagcgcgacgcgggcagagcgagcgccgcggaccccggaggcgagcggccgagggagcccagtcccaacttcgggccccggccccgcgcgccccggcccggccccgcgaggtctcggcgcggaagatggccggcggcgtggacggccccatcgggatcccgttccccgaccacagcagcgacatcctgagtgggctgaacgagcagcggacgcagggcctgctgtgcgacgtggtgatcctggtggagggccgcgagttccccacgcaccgctcggtgctggccgcctgcagccagtacttcaagaagctgttcacgtcgggcgccgtggtggaccagcagaacgtgtacgagatcgacttcgtcagcgccgaggcgctcaccgcgctcatggacttcgcctacacggccacgctcaccgtcagcacagccaacgtgggtgacatcctcagcgccgcccgcctgctggagatccccgccgtgagccacgtgtgcgccgacctcctggaccggcagatcctggcggccgacgcgggcgccgacgccgggcagctggaccttgtagatcaaattgatcagcgcaacctcctccgcgccaaggagtacctcgagttcttccagagcaaccccatgaacagcctgccccccgcggccgccgccgccgctgccagcttcccgtggtccgcctttggggcgtccgatgatgacctggatgccaccaaggaggccgtggccgccgctgtggccgccgtggccgcgggcgactgcaacggcttagacttctatgggccgggccccccggccgagcggcccccgacgggggacggggacgagggcgacagcaacccgggtctgtggccagagcgggatgaggacgcccccaccgggggtctctttccgccgccggtggccccgccggccgccacgcagaacggccactacggccgcggcggagaggaggaggccgcctcgctgtcggaggcggcccccgagccgggcgactctccgggcttcctgtcgggagcggccgagggcgaggacggggacgggcccgacgtggacgggctggcggccagcacgctgctgcagcagatgatgtcatcggtgggccgggcgggggccgcggcgggggacagcgacgaggagtcgcgggccgacgacaagggcgtcatggactactacctgaagtacttcagcggcgcccacgacggcgacgtctacccggcctggtcgcagaaggtggagaagaagatccgagccaaggccttccagaagtgccccatctgcgagaaggtcatccagggcgccggcaagctgccgcgacacatccgcacccacacgggcgagaagccctacgagtgcaacatctgcaaggtccgcttcaccaggcaggacaagctgaaggtgcacatgcggaagcacacgggcgagaagccgtacctgtgccagcagtgcggcgccgcctttgcccacaactacgacctgaagaaccacatgcgcgtgcacacgggcctgcgcccctaccagtgcgacagctgctgcaagaccttcgtccgctccgaccacctgcacagacacctcaagaaagacggctgcaacggcgtcccctcgcgccgcggccgcaagccccgcgtccggggcggggcgcccgaccccagcccgggggccaccgcgacccccggcgcccccgcccagcccagctcccccgacgcccggcgcaacggccaggagaagcactttaaggacgaggacgaggacgaggacgtggccagccccgacggcttgggccggttgaatgtagcgggcgccggtggaggaggtgacagcggaggtggccccggggccgccaccgacggtaacttcacagccggactcgcctaaaaaccaaaaagagaaaacagaaacccgagaaagagagagacagagagagagaaaaaaaatcacccaccacccccccaaaaacacaaaaaaagaaaatctatctatatacagatatctatatctatatatatatatacagatatatatatatgacgcgtcacagaatctagggtagcgctttctcagatttccctcctttctgacgtttttctccctccgcaggggccccggccctccctggctccccttccccccaccaccccatcgctgggtttcggggcttggtttggggttttttgtaggacacaaggaatccgagaccccgcacagccccctgggcacccggcatggggcctggggcccgatccgaggccctgggctggggggagggtagacgtgggggcgctggggggggactggggtgggcttttaatttcctcccctcgctggtttctatgagtctttcagacaagaccttaaatgatttctgtctgctctgagcggacgttaaaatgggcccccgtcccccgacccgcaccctccttcctcagggcacttactaagggaggggtctccctctccatctccccagtggcctccccgcctccaaccctgcctgcggcctccccccgtcgcccaccccacgtctcctggccactgagacacaaacctatttatttctaggcctggagaaaggagatcggactggggttcccggtggggcgccaggatggctcctgggggtgctcctgccgccttccttcacggcacttacaaccggcgggacccccagggaccacccctcagggcgcccccccacccccgcccggtccacctagacccccacgtttggagattcaaaacttctgtcttcgtcctctcccccgagccccctctcccaaatttttaaagcactttttagatttttttttctctttcctccttaaaaacaaaatttatatatagatatatatatatatataaataatatacttttcctcagaggagcaggcaacagtgtgggataaacagagtcacgatcagaggaaccccagggtctggtgatggcagggatggggggagagagagaaaatccacaaattccaatgtcacaaaagcaataaaacaaactagaaaaaaaaaaggttttacaaaatgaaaggaaggaaaaaaaaaaaggcaaccaaccacattagaagtcttggcactttgtaacggaacgggtactacactttatcttaattcttaatttaaaaacatgtttacaagttacaaccaacttctatgaaaagttgaaaagacaaaaaaaaaaaaaaaagcgagcgagagagagagcgagagagagagcgagagcagaagaaattcctaaaagtcgatttatttttgtacaaaataataaaaaaaaaaacccaccacaaacgtagaatccacttctgttccccaaaaagcgagaaggggggttcaggaggaagccatcgcaggggacctgggagacgccccgaggtgtttgtgcttcacccccagacgtcagcctcgaaggcaggactgtggggtgttcgtgctgtgttccccccgctccccctttctgtcccctttttgggttctgacgtgaagaggtcttagcgcccgcttctgtccacggggtctctccttcctcctccctagctcagggatgggccttccagccggagcaccccgatccccatccggcaccccccaatcccccaacacgcctgtccctcccgcatggccaccaaggagctggaccttggatgcgcctaccctgctgaggtgggtgacaggggccccccacctccagggccttagaaccaccgcccctctccccaccccaggcacccctctttttactcaaaggcactgactgtaatccagggggactgggacctgcctccccccaacctctggctcccacaaggcccggtgttgaccgagccacaggccacggacaggggccggggttggggagactatgtcgccagatgccaggacgccctcaccccgtttgcatatgcaatgctagcatgggaccccgaaaatagacgctctgctgcactgagacttcttgtcaatgcccaaccggcgggggggtgtctccctgcccccgacccccccatacccccttctctgtgacacacacatcttctcgtctctttttctttcattgttaaagggaagctttttaagaaggcaattttcatattgtttctaccggatggttttggttcccttcccttcccacccccccttaagcctgtcagccccctccaaatgtctcaggatcccccctctcccctggggctgggtgacagcaccccggctgcgttcacaccccagtgtcacagggcgagctgttctggagagaaaaccatctgtcgtggctgagcggggagcttgaacacccaggccagggacacccctccccagctcccagagaggccccctgaggggtgagccctctttccaccttcccctatccatgcaccccctcgcaataaaaccaactctaaaatcacagctgtcgtcctagccagtgggggcgaccggacttggggggtggagccctctgggacttccgtaggaacaagggctgcggcccaccgcgacacttacacagacctcggggattgcactaaaccctcgttcctagctccgcactcagcttcgcctgtcctgcccgcccactttgccttaactacccgcccgtcctgggggccacagcctctgcatgggcccagagccgggacccccccagcccagccccgccctccccagactccgcgcaatcacatactgtatatagacgtgaatcgattttatttttattctttaaattaaggtcgtgataaagtgttgccaaagatacctgctgaattctcgcgtttcaggaaacaaacaaacaaaaaaaaatgatatttgaggagggtcgtgttgactccatatgaaaggacacagctcaaagcttttttgtttggttgtttggggttttttgtgttttctttttttggggtgttttttttttaactgcctggtacaaaaaaaaaaagagaaaaaaaaaaaaaagaaaaacaatgcgaaattgttatttccattctcatggtgaagttgcgtggacgcgtgtgtgcgtgtgtgcaagagagcgggagtgaggtccaggctggggttggggggcttcaggcgggggcgcccgggggccggggaggtggccgggccggagcccccgtctgcagtgccccccagcctgccgggcccaggagagagagagaagcatctttgctactagctgttgctgctacctgcctctgcccgccgacgccccccgccttttgagattaagga

SEQ ID NO: 32469 - DNA, 4994 bp, Homo sapiens
gacgcgcgccgcagcgcgagggagcgaccagggcagcgcgacgcgggcagagcgagcgccgcggaccccggaggcgagcggccgagggagcccagtcccaacttcgggccccggccccgcgcgccccggcccggccccgcgaggtctcggcgcggaagatggccggcggcgtggacggccccatcgggatcccgttccccgaccacagcagcgacatcctgagtgggctgaacgagcagcggacgcagggcctgctgtgcgacgtggtgatcctggtggagggccgcgagttccccacgcaccgctcggtgctggccgcctgcagccagtacttcaagaagctgttcacgtcgggcgccgtggtggaccagcagaacgtgtacgagatcgacttcgtcagcgccgaggcgctcaccgcgctcatggacttcgcctacacggccacgctcaccgtcagcacagccaacgtgggtgacatcctcagcgccgcccgcctgctggagatccccgccgtgagccacgtgtgcgccgacctcctggaccggcagatcctggcggccgacgcgggcgccgacgccgggcagctggaccttgtagatcaaattgatcagcgcaacctcctccgcgccaaggagtacctcgagttcttccagagcaaccccatgaacagcctgccccccgcggccgccgccgccgctgccagcttcccgtggtccgcctttggggcgtccgatgatgacctggatgccaccaaggaggccgtggccgccgctgtggccgccgtggccgcgggcgactgcaacggcttagacttctatgggccgggccccccggccgagcggcccccgacgggggacggggacgagggcgacagcaacccgggtctgtggccagagcgggatgaggacgcccccaccgggggtctctttccgccgccggtggccccgccggccgccacgcagaacggccactacggccgcggcggagaggaggaggccgcctcgctgtcggaggcggcccccgagccgggcgactctccgggcttcctgtcgggagcggccgagggcgaggacggggacgggcccgacgtggacgggctggcggccagcacgctgctgcagcagatgatgtcatcggtgggccgggcgggggccgcggcgggggacagcgacgaggagtcgcgggccgacgacaagggcgtcatggactactacctgaagtacttcagcggcgcccacgacggcgacgtctacccggcctggtcgcagaaggtggagaagaagatccgagccaaggccttccagaagtgccccatctgcgagaaggtcatccagggcgccggcaagctgccgcgacacatccgcacccacacgggcgagaagccctacgagtgcaacatctgcaaggtccgcttcaccaggcaggacaagctgaaggtgcacatgcggaagcacacgggcgagaagccgtacctgtgccagcagtgcggcgccgcctttgcccacaactacgacctgaagaaccacatgcgcgtgcacacgggcctgcgcccctaccagtgcgacagctgctgcaagaccttcgtccgctccgaccacctgcacagacacctcaagaaagacggctgcaacggcgtcccctcgcgccgcggccgcaagccccgcgtccggggcggggcgcccgaccccagcccgggggccaccgcgacccccggcgcccccgcccagcccagctcccccgacgcccggcgcaacggccaggagaagcactttaaggacgaggacgaggacgaggacgtggccagccccgacggcttgggccggttgaatgtagcgggcgccggtggaggaggtgacagcggaggtggccccggggccgccaccgacggtaacttcacagccggactcgcctaaaaaccaaaaagagaaaacagaaacccgagaaagagagagacagagagagagaaaaaaaatcacccaccacccccccaaaaacacaaaaaaagaaaatctatctatatacagatatctatatctatatatatatatacagatatatatatatgacgcgtcacagaatctagggtagcgctttctcagatttccctcctttctgacgtttttctccctccgcaggggccccggccctccctggctccccttccccccaccaccccatcgctgggtttcggggcttggtttggggttttttgtaggacacaaggaatccgagaccccgcacagccccctgggcacccggcatggggcctggggcccgatccgaggccctgggctggggggagggtagacgtgggggcgctggggggggactggggtgggcttttaatttcctcccctcgctggtttctatgagtctttcagacaagaccttaaatgatttctgtctgctctgagcggacgttaaaatgggcccccgtcccccgacccgcaccctccttcctcagggcacttactaagggaggggtctccctctccatctccccagtggcctccccgcctccaaccctgcctgcggcctccccccgtcgcccaccccacgtctcctggccactgagacacaaacctatttatttctaggcctggagaaaggagatcggactggggttcccggtggggcgccaggatggctcctgggggtgctcctgccgccttccttcacggcacttacaaccggcgggacccccagggaccacccctcagggcgcccccccacccccgcccggtccacctagacccccacgtttggagattcaaaacttctgtcttcgtcctctcccccgagccccctctcccaaatttttaaagcactttttagatttttttttctctttcctccttaaaaacaaaatttatatatagatatatatatatatataaataatatacttttcctcagaggagcaggcaacagtgtgggataaacagagtcacgatcagaggaaccccagggtctggtgatggcagggatggggggagagagagaaaatccacaaattccaatgtcacaaaagcaataaaacaaactagaaaaaaaaaaggttttacaaaatgaaaggaaggaaaaaaaaaaaggcaaccaaccacattagaagtcttggcactttgtaacggaacgggtactacactttatcttaattcttaatttaaaaacatgtttacaagttacaaccaacttctatgaaaagttgaaaagacaaaaaaaaaaaaaaaagcgagcgagagagagagcgagagagagagcgagagcagaagaaattcctaaaagtcgatttatttttgtacaaaataataaaaaaaaaaacccaccacaaacgtagaatccacttctgttccccaatcccccaacacgcctgtccctcccgcatggccaccaaggagctggaccttggatgcgcctaccctgctgaggtgggtgacaggggccccccacctccagggccttagaaccaccgcccctctccccaccccaggcacccctctttttactcaaaggcactgactgtaatccagggggactgggacctgcctccccccaacctctggctcccacaaggcccggtgttgaccgagccacaggccacggacaggggccggggttggggagactatgtcgccagatgccaggacgccctcaccccgtttgcatatgcaatgctagcatgggaccccgaaaatagacgctctgctgcactgagacttcttgtcaatgcccaaccggcgggggggtgtctccctgcccccgacccccccatacccccttctctgtgacacacacatcttctcgtctctttttctttcattgttaaagggaagctttttaagaaggcaattttcatattgtttctaccggatggttttggttcccttcccttcccacccccccttaagcctgtcagccccctccaaatgtctcaggatcccccctctcccctggggctgggtgacagcaccccggctgcgttcacaccccagtgtcacagggcgagctgttctggagagaaaaccatctgtcgtggctgagcggggagcttgaacacccaggccagggacacccctccccagctcccagagaggccccctgaggggtgagccctctttccaccttcccctatccatgcaccccctcgcaataaaaccaactctaaaatcacagctgtcgtcctagccagtgggggcgaccggacttggggggtggagccctctgggacttccgtaggaacaagggctgcggcccaccgcgacacttacacagacctcggggattgcactaaaccctcgttcctagctccgcactcagcttcgcctgtcctgcccgcccactttgccttaactacccgcccgtcctgggggccacagcctctgcatgggcccagagccgggacccccccagcccagccccgccctccccagactccgcgcaatcacatactgtatatagacgtgaatcgattttatttttattctttaaattaaggtcgtgataaagtgttgccaaagatacctgctgaattctcgcgtttcaggaaacaaacaaacaaaaaaaaatgatatttgaggagggtcgtgttgactccatatgaaaggacacagctcaaagcttttttgtttggttgtttggggttttttgtgttttctttttttggggtgttttttttttaactgcctggtacaaaaaaaaaaagagaaaaaaaaaaaaaagaaaaacaatgcgaaattgttatttccattctcatggtgaagttgcgtggacgcgtgtgtgcgtgtgtgcaagagagcgggagtgaggtccaggctggggttggggggcttcaggcgggggcgcccgggggccggggaggtggccgggccggagcccccgtctgcagtgccccccagcctgccgggcccaggagagagagagaagcatctttgctactagctgttgctgctacctgcctctgcccgccgacgccccccgccttttgagattaagga

SEQ ID NO: 32470 - DNA, 4481 bp, Homo sapiens
gacgcgcgccgcagcgcgagggagcgaccagggcagcgcgacgcgggcagagcgagcgccgcggaccccggaggcgagcggccgagggagcccagtcccaacttcgggccccggccccgcgcgccccggcccggccccgcgaggtctcggcgcggaagatggccggcggcgtggacggccccatcgggatcccgttccccgaccacagcagcgacatcctgagtgggctgaacgagcagcggacgcagggcctgctgtgcgacgtggtgatcctggtggagggccgcgagttccccacgcaccgctcggtgctggccgcctgcagccagtacttcaagaagctgttcacgtcgggcgccgtggtggaccagcagaacgtgtacgagatcgacttcgtcagcgccgaggcgctcaccgcgctcatggacttcgcctacacggccacgctcaccgtcagcacagccaacgtgggtgacatcctcagcgccgcccgcctgctggagatccccgccgtgagccacgtgtgcgccgacctcctggaccggcagatcctggcggccgacgcgggcgccgacgccgggcagctggaccttgtagatcaaattgatcagcgcaacctcctccgcgccaaggagtacctcgagttcttccagagcaaccccatgaacagcctgccccccgcggccgccgccgccgctgccagcttcccgtggtccgcctttggggcgtccgatgatgacctggatgccaccaaggaggccgtggccgccgctgtggccgccgtggccgcgggcgactgcaacggcttagacttctatgggccgggccccccggccgagcggcccccgacgggggacggggacgagggcgacagcaacccgggtctgtggccagagcgggatgaggacgcccccaccgggggtctctttccgccgccggtggccccgccggccgccacgcagaacggccactacggccgcggcggagaggaggaggccgcctcgctgtcggaggcggcccccgagccgggcgactctccgggcttcctgtcgggagcggccgagggcgaggacggggacgggcccgacgtggacgggctggcggccagcacgctgctgcagcagatgatgtcatcggtgggccgggcgggggccgcggcgggggacagcgacgaggagtcgcgggccgacgacaagggcgtcatggactactacctgaagtacttcagcggcgcccacgacggcgacgtctacccggcctggtcgcagaaggtggagaagaagatccgagccaaggccttccagaagtgccccatctgcgagaaggtcatccagggcgccggcaagctgccgcgacacatccgcacccacacgggcgagaagccctacgagtgcaacatctgcaaggtccgcttcaccaggcaggacaagctgaaggtgcacatgcggaagcacacgggcgagaagccgtacctgtgccagcagtgcggcgccgcctttgcccacaactacgacctgaagaaccacatgcgcgtgcacacgggcctgcgcccctaccagtgcgacagctgctgcaagaccttcgtccgctccgaccacctgcacagacacctcaagaaagacggctgcaacggcgtcccctcgcgccgcggccgcaagccccgcgtccggggcggggcgcccgaccccagcccgggggccaccgcgacccccggcgcccccgcccagcccagctcccccgacgcccggcgcaacggccaggagaagcactttaaggacgaggacgaggacgaggacgtggccagccccgacggcttgggccggttgaatgtagcgggcgccggtggaggaggtgacagcggaggtggccccggggccgccaccgacggtaacttcacagccggactcgcctaaaaaccaaaaagagaaaacagaaacccgagaaagagagagacagagagagagaaaaaaaatcacccaccacccccccaaaaacacaaaaaaagaaaatctatctatatacagatatctatatctatatatatatatacagatatatatatatgacgcgtcacagaatctagggtagcgctttctcagatttccctcctttctgacgtttttctccctccgcaggggccccggccctccctggctccccttccccccaccaccccatcgctgggtttcggggcttggtttggggttttttgtaggacacaaggaatccgagaccccgcacagccccctgggcacccggcatggggcctggggcccgatccgaggccctgggctggggggagggtagacgtgggggcgctggggggggactggggtgggcttttaatttcctcccctcgctggtttctatgagtctttcagacaagaccttaaatgatttctgtctgctctgagcggacgttaaaatgggcccccgtcccccgacccgcaccctccttcctcagggcacttactaagggaggggtctccctctccatctccccagtggcctccccgcctccaaccctgcctgcggcctccccccgtcgcccaccccacgtctcctggccactgagacacaaacctatttatttctaggcctggagaaaggagatcggactggggttcccggtggggcgccaggatggctcctgggggtgctcctgccgccttccttcacggcacttacaaccggcgggacccccagggaccacccctcagggcgcccccccacccccgcccggtccacctagacccccacgtttggagattcaaaacttctgtcttcgtcctctcccccgagccccctctcccaaatttttaaagcactttttagatttttttttctctttcctccttaaaaacaaaatttatatatagatatatatatatatataaataatatacttttcctcagaggagcaggcaacagtgtgggataaacagagtcacgatcagaggaaccccagggtctggtgatggcagggatggggggagagagagaaaatccacaaattccaatgtcacaaaagcaataaaacaaactagaaaaaaaaaaggttttacaaaatgaaaggaaggaaaaaaaaaaaggcaaccaaccacattagaagtcttggcactttgtaacggaacgggtactacactttatcttaattcttaatttaaaaacatgtttacaagttacaaccaacttctatgaaaagttgaaaagacaaaaaaaaaaaaaaaagcgagcgagagagagagcgagagagagagcgagagcagaagaaattcctaaaagtcgatttatttttgtacaaaataataaaaaaaaaaacccaccacaaacgtagaatccacttctgttccccaaaaagcgagaaggggggttcaggaggaagccatcgcaggggacctgggagacgccccgaggtgtttgtgcttcacccccagacgtcagcctcgaaggcaggactgtggggtgttcgtgctgtgttccccccgctccccctttctgtcccctttttgggttctgacgtgaagaggtcttagcgcccgcttctgtccacggggtctctccttcctcctccctagctcagggatgggccttccagccggagcaccccgatccccatccggcaccccccaatcccccaacacgcctgtccctcccgcatggccaccaaggagctggaccttggatgcgcctaccctgctgaggtgggtgacaggggccccccacctccagggccttagaaccaccgcccctctccccaggagctacaacctcagagttaagactagctcgcattaaatacatagatttacgggggggggggggcggggccggcccagggggtggagggggccagggagacccccatccctcgccggggctgcctggaggctgtggaccaggatccgatgcccaggtcccgccccccaccccaccccaggcccagaatcgaggtgccttggactttggaggggccaggcctggtgaatggggggcggggcggcgccctcagggtacagagcacagacagatagacattccagagactgtattgagagtctttataaagtgtgggagatttaaaaaaaaaaaaaactgataaaaatgcactttttgggagtggggagggagaagctttaaaagtaataaaaaacaaacaaaaacacaaaagatgaaaaaacaaaaaaattcatttttcttgtacataaaaaaaaaaaaagaaccactaaacgcagcctgttacgaccgctgccgcctcagtcgcctcatttgatgttctctgtgttttgttcgggggaggctggggagcggggatggggggcttggggggggtcccccttttccccttttggccctgaagagactgggtgggttgagcacctcgtccacaccacacctttgggcccagggtgaccggatcctgggtcccaaggagagaagccccaggtccccgacccttcctgctcttcctgcccggcctt

SEQ ID NO: 32471 - DNA, 4183 bp, Homo sapiens
atttcaggcctgagcctccgcgcctggcctagactttgtctcttaaaaagttaaaaaaggaaaggaaacggggttcagagaggcatagcgttttcccaaggccacacagcactcagggtccgaggccctctttagatgttcagaatgcgaaatcgcccccactcgtctcgtttttcgagggaccgtccccatcggggcaccgaaacctctggtgcacggtccgtgttctgcaagggtgatgatccagggcctgccgtgtccgtgagggtccctgggcggggatcgggggtccccggccccactgaccgtgcccgccccgtgccccgtccacaggcaggacaagctgaaggtgcacatgcggaagcacacgggcgagaagccgtacctgtgccagcagtgcggcgccgcctttgcccacaactacgacctgaagaaccacatgcgcgtgcacacgggcctgcgcccctaccagtgcgacagctgctgcaagaccttcgtccgctccgaccacctgcacagacacctcaagaaagacggctgcaacggcgtcccctcgcgccgcggccgcaagccccgcgtccggggcggggcgcccgaccccagcccgggggccaccgcgacccccggcgcccccgcccagcccagctcccccgacgcccggcgcaacggccaggagaagcactttaaggacgaggacgaggacgaggacgtggccagccccgacggcttgggccggttgaatgtagcgggcgccggtggaggaggtgacagcggaggtggccccggggccgccaccgacggtaacttcacagccggactcgcctaaaaaccaaaaagagaaaacagaaacccgagaaagagagagacagagagagagaaaaaaaatcacccaccacccccccaaaaacacaaaaaaagaaaatctatctatatacagatatctatatctatatatatatatacagatatatatatatgacgcgtcacagaatctagggtagcgctttctcagatttccctcctttctgacgtttttctccctccgcaggggccccggccctccctggctccccttccccccaccaccccatcgctgggtttcggggcttggtttggggttttttgtaggacacaaggaatccgagaccccgcacagccccctgggcacccggcatggggcctggggcccgatccgaggccctgggctggggggagggtagacgtgggggcgctggggggggactggggtgggcttttaatttcctcccctcgctggtttctatgagtctttcagacaagaccttaaatgatttctgtctgctctgagcggacgttaaaatgggcccccgtcccccgacccgcaccctccttcctcagggcacttactaagggaggggtctccctctccatctccccagtggcctccccgcctccaaccctgcctgcggcctccccccgtcgcccaccccacgtctcctggccactgagacacaaacctatttatttctaggcctggagaaaggagatcggactggggttcccggtggggcgccaggatggctcctgggggtgctcctgccgccttccttcacggcacttacaaccggcgggacccccagggaccacccctcagggcgcccccccacccccgcccggtccacctagacccccacgtttggagattcaaaacttctgtcttcgtcctctcccccgagccccctctcccaaatttttaaagcactttttagatttttttttctctttcctccttaaaaacaaaatttatatatagatatatatatatatataaataatatacttttcctcagaggagcaggcaacagtgtgggataaacagagtcacgatcagaggaaccccagggtctggtgatggcagggatggggggagagagagaaaatccacaaattccaatgtcacaaaagcaataaaacaaactagaaaaaaaaaaggttttacaaaatgaaaggaaggaaaaaaaaaaaggcaaccaaccacattagaagtcttggcactttgtaacggaacgggtactacactttatcttaattcttaatttaaaaacatgtttacaagttacaaccaacttctatgaaaagttgaaaagacaaaaaaaaaaaaaaaagcgagcgagagagagagcgagagagagagcgagagcagaagaaattcctaaaagtcgatttatttttgtacaaaataataaaaaaaaaaacccaccacaaacgtagaatccacttctgttccccaaaaagcgagaaggggggttcaggaggaagccatcgcaggggacctgggagacgccccgaggtgtttgtgcttcacccccagacgtcagcctcgaaggcaggactgtggggtgttcgtgctgtgttccccccgctccccctttctgtcccctttttgggttctgacgtgaagaggtcttagcgcccgcttctgtccacggggtctctccttcctcctccctagctcagggatgggccttccagccggagcaccccgatccccatccggcaccccccaatcccccaacacgcctgtccctcccgcatggccaccaaggagctggaccttggatgcgcctaccctgctgaggtgggtgacaggggccccccacctccagggccttagaaccaccgcccctctccccaccccaggcacccctctttttactcaaaggcactgactgtaatccagggggactgggacctgcctccccccaacctctggctcccacaaggcccggtgttgaccgagccacaggccacggacaggggccggggttggggagactatgtcgccagatgccaggacgccctcaccccgtttgcatatgcaatgctagcatgggaccccgaaaatagacgctctgctgcactgagacttcttgtcaatgcccaaccggcgggggggtgtctccctgcccccgacccccccatacccccttctctgtgacacacacatcttctcgtctctttttctttcattgttaaagggaagctttttaagaaggcaattttcatattgtttctaccggatggttttggttcccttcccttcccacccccccttaagcctgtcagccccctccaaatgtctcaggatcccccctctcccctggggctgggtgacagcaccccggctgcgttcacaccccagtgtcacagggcgagctgttctggagagaaaaccatctgtcgtggctgagcggggagcttgaacacccaggccagggacacccctccccagctcccagagaggccccctgaggggtgagccctctttccaccttcccctatccatgcaccccctcgcaataaaaccaactctaaaatcacagctgtcgtcctagccagtgggggcgaccggacttggggggtggagccctctgggacttccgtaggaacaagggctgcggcccaccgcgacacttacacagacctcggggattgcactaaaccctcgttcctagctccgcactcagcttcgcctgtcctgcccgcccactttgccttaactacccgcccgtcctgggggccacagcctctgcatgggcccagagccgggacccccccagcccagccccgccctccccagactccgcgcaatcacatactgtatatagacgtgaatcgattttatttttattctttaaattaaggtcgtgataaagtgttgccaaagatacctgctgaattctcgcgtttcaggaaacaaacaaacaaaaaaaaatgatatttgaggagggtcgtgttgactccatatgaaaggacacagctcaaagcttttttgtttggttgtttggggttttttgtgttttctttttttggggtgttttttttttaactgcctggtacaaaaaaaaaaagagaaaaaaaaaaaaaagaaaaacaatgcgaaattgttatttccattctcatggtgaagttgcgtggacgcgtgtgtgcgtgtgtgcaagagagcgggagtgaggtccaggctggggttggggggcttcaggcgggggcgcccgggggccggggaggtggccgggccggagcccccgtctgcagtgccccccagcctgccgggcccaggagagagagagaagcatctttgctactagctgttgctgctacctgcctctgcccgccgacgccccccgccttttgagattaagga

SEQ ID NO: 32472 - DNA, 4062 bp, Homo sapiens
gactggggtgggcttttaatttcctcccacgacggcgacgtctacccggcctggtcgcagaaggtggagaagaagatccgagccaaggccttccagaagtgccccatctgcgagaaggtcatccagggcgccggcaagctgccgcgacacatccgcacccacacgggcgagaagccctacgagtgcaacatctgcaaggtccgcttcaccaggcaggacaagctgaaggtgcacatgcggaagcacacgggcgagaagccgtacctgtgccagcagtgcggcgccgcctttgcccacaactacgacctgaagaaccacatgcgcgtgcacacgggcctgcgcccctaccagtgcgacagctgctgcaagaccttcgtccgctccgaccacctgcacagacacctcaagaaagacggctgcaacggcgtcccctcgcgccgcggccgcaagccccgcgtccggggcggggcgcccgaccccagcccgggggccaccgcgacccccggcgcccccgcccagcccagctcccccgacgcccggcgcaacggccaggagaagcactttaaggacgaggacgaggacgaggacgtggccagccccgacggcttgggccggttgaatgtagcgggcgccggtggaggaggtgacagcggaggtggccccggggccgccaccgacggtaacttcacagccggactcgcctaaaaaccaaaaagagaaaacagaaacccgagaaagagagagacagagagagagaaaaaaaatcacccaccacccccccaaaaacacaaaaaaagaaaatctatctatatacagatatctatatctatatatatatatacagatatatatatatgacgcgtcacagaatctagggtagcgctttctcagatttccctcctttctgacgtttttctccctccgcaggggccccggccctccctggctccccttccccccaccaccccatcgctgggtttcggggcttggtttggggttttttgtaggacacaaggaatccgagaccccgcacagccccctgggcacccggcatggggcctggggcccgatccgaggccctgggctggggggagggtagacgtgggggcgctggggggggactggggtgggcttttaatttcctcccctcgctggtttctatgagtctttcagacaagaccttaaatgatttctgtctgctctgagcggacgttaaaatgggcccccgtcccccgacccgcaccctccttcctcagggcacttactaagggaggggtctccctctccatctccccagtggcctccccgcctccaaccctgcctgcggcctccccccgtcgcccaccccacgtctcctggccactgagacacaaacctatttatttctaggcctggagaaaggagatcggactggggttcccggtggggcgccaggatggctcctgggggtgctcctgccgccttccttcacggcacttacaaccggcgggacccccagggaccacccctcagggcgcccccccacccccgcccggtccacctagacccccacgtttggagattcaaaacttctgtcttcgtcctctcccccgagccccctctcccaaatttttaaagcactttttagatttttttttctctttcctccttaaaaacaaaatttatatatagatatatatatatatataaataatatacttttcctcagaggagcaggcaacagtgtgggataaacagagtcacgatcagaggaaccccagggtctggtgatggcagggatggggggagagagagaaaatccacaaattccaatgtcacaaaagcaataaaacaaactagaaaaaaaaaaggttttacaaaatgaaaggaaggaaaaaaaaaaaggcaaccaaccacattagaagtcttggcactttgtaacggaacgggtactacactttatcttaattcttaatttaaaaacatgtttacaagttacaaccaacttctatgaaaagttgaaaagacaaaaaaaaaaaaaaaagcgagcgagagagagagcgagagagagagcgagagcagaagaaattcctaaaagtcgatttatttttgtacaaaataataaaaaaaaaaacccaccacaaacgtagaatccacttctgttccccaaaaagcgagaaggggggttcaggaggaagccatcgcaggggacctgggagacgccccgaggtgtttgtgcttcacccccagacgtcagcctcgaaggcaggactgtggggtgttcgtgctgtgttccccccgctccccctttctgtcccctttttgggttctgacgtgaagaggtcttagcgcccgcttctgtccacggggtctctccttcctcctccctagctcagggatgggccttccagccggagcaccccgatccccatccggcaccccccaatcccccaacacgcctgtccctcccgcatggccaccaaggagctggaccttggatgcgcctaccctgctgaggtgggtgacaggggccccccacctccagggccttagaaccaccgcccctctccccaccccaggcacccctctttttactcaaaggcactgactgtaatccagggggactgggacctgcctccccccaacctctggctcccacaaggcccggtgttgaccgagccacaggccacggacaggggccggggttggggagactatgtcgccagatgccaggacgccctcaccccgtttgcatatgcaatgctagcatgggaccccgaaaatagacgctctgctgcactgagacttcttgtcaatgcccaaccggcgggggggtgtctccctgcccccgacccccccatacccccttctctgtgacacacacatcttctcgtctctttttctttcattgttaaagggaagctttttaagaaggcaattttcatattgtttctaccggatggttttggttcccttcccttcccacccccccttaagcctgtcagccccctccaaatgtctcaggatcccccctctcccctggggctgggtgacagcaccccggctgcgttcacaccccagtgtcacagggcgagctgttctggagagaaaaccatctgtcgtggctgagcggggagcttgaacacccaggccagggacacccctccccagctcccagagaggccccctgaggggtgagccctctttccaccttcccctatccatgcaccccctcgcaataaaaccaactctaaaatcacagctgtcgtcctagccagtgggggcgaccggacttggggggtggagccctctgggacttccgtaggaacaagggctgcggcccaccgcgacacttacacagacctcggggattgcactaaaccctcgttcctagctccgcactcagcttcgcctgtcctgcccgcccactttgccttaactacccgcccgtcctgggggccacagcctctgcatgggcccagagccgggacccccccagcccagccccgccctccccagactccgcgcaatcacatactgtatatagacgtgaatcgattttatttttattctttaaattaaggtcgtgataaagtgttgccaaagatacctgctgaattctcgcgtttcaggaaacaaacaaacaaaaaaaaatgatatttgaggagggtcgtgttgactccatatgaaaggacacagctcaaagcttttttgtttggttgtttggggttttttgtgttttctttttttggggtgttttttttttaactgcctggtacaaaaaaaaaaagagaaaaaaaaaaaaaagaaaaacaatgcgaaattgttatttccattctcatggtgaagttgcgtggacgcgtgtgtgcgtgtgtgcaagagagcgggagtgaggtccaggctggggttggggggcttcaggcgggggcgcccgggggccggggaggtggccgggccggagcccccgtctgcagtgccccccagcctgccgggcccaggagagagagagaagcatctttgctactagctgttgctgctacctgcctctgcccgccgacgccccccgccttttgagattaagga

SEQ ID NO: 32473 - DNA, 3058 bp, Homo sapiens
gacgcgcgccgcagcgcgagggagcgaccagggcagcgcgacgcgggcagagcgagcgccgcggaccccggaggcgagcggccgagggagcccagtcccaacttcgggccccggccccgcgcgccccggcccggccccgcgaggtctcggcgcggaagatggccggcggcgtggacggccccatcgggatcccgttccccgaccacagcagcgacatcctgagtgggctgaacgagcagcggacgcagggcctgctgtgcgacgtggtgatcctggtggagggccgcgagttccccacgcaccgctcggtgctggccgcctgcagccagtacttcaagaagctgttcacgtcgggcgccgtggtggaccagcagaacgtgtacgagatcgacttcgtcagcgccgaggcgctcaccgcgctcatggacttcgcctacacggccacgctcaccgtcagcacagccaacgtgggtgacatcctcagcgccgcccgcctgctggagatccccgccgtgagccacgtgtgcgccgacctcctggaccggcagatcctggcggccgacgcgggcgccgacgccgggcagctggaccttgtagatcaaattgatcagcgcaacctcctccgcgccaaggagtacctcgagttcttccagagcaaccccatgaacagcctgccccccgcggccgccgccgccgctgccagcttcccgtggtccgcctttggggcgtccgatgatgacctggatgccaccaaggaggccgtggccgccgctgtggccgccgtggccgcgggcgactgcaacggcttagacttctatgggccgggccccccggccgagcggcccccgacgggggacggggacgagggcgacagcaacccgggtctgtggccagagcgggatgaggacgcccccaccgggggtctctttccgccgccggtggccccgccggccgccacgcagaacggccactacggccgcggcggagaggaggaggccgcctcgctgtcggaggcggcccccgagccgggcgactctccgggcttcctgtcgggagcggccgagggcgaggacggggacgggcccgacgtggacgggctggcggccagcacgctgctgcagcagatgatgtcatcggtgggccgggcgggggccgcggcgggggacagcgacgaggagtcgcgggccgacgacaagggcgtcatggactactacctgaagtacttcagcggcgcccacgacggcgacgtctacccggcctggtcgcagaaggtggagaagaagatccgagccaaggccttccagaagtgccccatctgcgagaaggtcatccagggcgccggcaagctgccgcgacacatccgcacccacacgggcgagaagccctacgagtgcaacatctgcaaggtccgcttcaccaggcaggacaagctgaaggtgcacatgcggaagcacacgggcgagaagccgtacctgtgccagcagtgcggcgccgcctttgcccacaactacgacctgaagaaccacatgcgcgtgcacacgggcctgcgcccctaccagtgcgacagctgctgcaagaccttcgtccgctccgaccacctgcacagacacctcaagaaagacggctgcaacggcgtcccctcgcgccgcggccgcaagccccgcgtccggggcggggcgcccgaccccagcccgggggccaccgcgacccccggcgcccccgcccagcccagctcccccgacgcccggcgcaacggccaggagaagcactttaaggacgaggacgaggacgaggacgtggccagccccgacggcttgggccggttgaatgtagcgggcgccggtggaggaggtgacagcggaggtggccccggggccgccaccgacggtaacttcacagccggactcgcctaaaaaccaaaaagagaaaacagaaacccgagaaagagagagacagagagagagaaaaaaaatcacccaccacccccccaaaaacacaaaaaaagaaaatctatctatatacagatatctatatctatatatatatatacagatatatatatatgacgcgtcacagaatctagggtagcgctttctcagatttccctcctttctgacgtttttctccctccgcaggggccccggccctccctggctccccttccccccaccaccccatcgctgggtttcggggcttggtttggggttttttgtaggacacaaggaatccgagaccccgcacagccccctgggcacccggcatggggcctggggcccgatccgaggccctgggctggggggagggtagacgtgggggcgctggggggggactggggtgggcttttaatttcctcccctcgctggtttctatgagtctttcagacaagaccttaaatgatttctgtctgctctgagcggacgttaaaatgggcccccgtcccccgacccgcaccctccttcctcagggcacttactaagggaggggtctccctctccatctccccagtggcctccccgcgcccagaatcgaggtgccttggactttggaggggccaggcctggtgaatggggggcggggcggcgccctcagggtacagagcacagacagatagacattccagagactgtattgagagtctttataaagtgtgggagatttaaaaaaaaaaaaaactgataaaaatgcactttttgggagtggggagggagaagctttaaaagtaataaaaaacaaacaaaaacacaaaagatgaaaaaacaaaaaaattcatttttcttgtacataaaaaaaaaaaaagaaccactaaacgcagcctgttacgaccgctgccgcctcagtcgcctcatttgatgttctctgtgttttgttcgggggaggctggggagcggggatggggggcttggggggggtcccccttttccccttttggccctgaagagactgggtgggttgagcacctcgtccacaccacacctttgggcccagggtgaccggatcctgggtcccaaggagagaagccccaggtccccgacccttcctgctcttcctgcccggcctt

SEQ ID NO: 32474 - DNA, 2541 bp, Homo sapiens
tattactagtgaattcactagtaatccccacgtttggagattcaaaacttctgtcttcgtcctctcccccgagccccctctcccaaatttttaaagcactttttagatttttttttctctttcctccttaaaaacaaaatttatatatagatatatatatatatataaataatatacttttcctcagaggagcaggcaacagtgtgggataaacagagtcacgatcagaggaaccccagggtctggtgatggcagggatggggggagagagagaaaatccacaaattccaatgtcacaaaagcaataaaacaaactagaaaaaaaaaaggttttacaaaatgaaaggaaggaaaaaaaaaaaggcaaccaaccacattagaagtcttggcactttgtaacggaacgggtactacactttatcttaattcttaatttaaaaacatgtttacaagttacaaccaacttctatgaaaagttgaaaagacaaaaaaaaaaaaaaaagcgagcgagagagagagcgagagagagagcgagagcagaagaaattcctaaaagtcgatttatttttgtacaaaataataaaaaaaaaaacccaccacaaacgtagaatccacttctgttccccaaaaagcgagaaggggggttcaggaggaagccatcgcaggggacctgggagacgccccgaggtgtttgtgcttcacccccagacgtcagcctcgaaggcaggactgtggggtgttcgtgctgtgttccccccgctccccctttctgtcccctttttgggttctgacgtgaagaggtcttagcgcccgcttctgtccacggggtctctccttcctcctccctagctcagggatgggccttccagccggagcaccccgatccccatccggcaccccccaatcccccaacacgcctgtccctcccgcatggccaccaaggagctggaccttggatgcgcctaccctgctgaggtgggtgacaggggccccccacctccagggccttagaaccaccgcccctctccccaccccaggcacccctctttttactcaaaggcactgactgtaatccagggggactgggacctgcctccccccaacctctggctcccacaaggcccggtgttgaccgagccacaggccacggacaggggccggggttggggagactatgtcgccagatgccaggacgccctcaccccgtttgcatatgcaatgctagcatgggaccccgaaaatagacgctctgctgcactgagacttcttgtcaatgcccaaccggcgggggggtgtctccctgcccccgacccccccatacccccttctctgtgacacacacatcttctcgtctctttttctttcattgttaaagggaagctttttaagaaggcaattttcatattgtttctaccggatggttttggttcccttcccttcccacccccccttaagcctgtcagccccctccaaatgtctcaggatcccccctctcccctggggctgggtgacagcaccccggctgcgttcacaccccagtgtcacagggcgagctgttctggagagaaaaccatctgtcgtggctgagcggggagcttgaacacccaggccagggacacccctccccagctcccagagaggccccctgaggggtgagccctctttccaccttcccctatccatgcaccccctcgcaataaaaccaactctaaaatcacagctgtcgtcctagccagtgggggcgaccggacttggggggtggagccctctgggacttccgtaggaacaagggctgcggcccaccgcgacacttacacagacctcggggattgcactaaaccctcgttcctagctccgcactcagcttcgcctgtcctgcccgcccactttgccttaactacccgcccgtcctgggggccacagcctctgcatgggcccagagccgggacccccccagcccagccccgccctccccagactccgcgcaatcacatactgtatatagacgtgaatcgattttatttttattctttaaattaaggtcgtgataaagtgttgccaaagatacctgctgaattctcgcgtttcaggaaacaaacaaacaaaaaaaaatgatatttgaggagggtcgtgttgactccatatgaaaggacacagctcaaagcttttttgtttggttgtttggggttttttgtgttttctttttttggggtgttttttttttaactgcctggtacaaaaaaaaaaagagaaaaaaaaaaaaaagaaaaacaatgcgaaattgttatttccattctcatggtgaagttgcgtggacgcgtgtgtgcgtgtgtgcaagagagcgggagtgaggtccaggctggggttggggggcttcaggcgggggcgcccgggggccggggaggtggccgggccggagcccccgtctgcagtgccccccagcctgccgggcccaggagagagagagaagcatctttgctactagctgttgctgctacctgcctctgcccgccgacgccccccgccttttgagattaagga

SEQ ID NO: 32475 - DNA, 2344 bp, Homo sapiens
ccgggctcgcaggaattcggcacgagatcagaggaaccccagggtctggtgatggcagggatggggggagagagagaaaatccacaaattccaatgtcacaaaagcaataaaacaaactagaaaaaaaaaaggttttacaaaatgaaaggaaggaaaaaaaaaaaggcaaccaaccacattagaagtcttggcactttgtaacggaacgggtactacactttatcttaattcttaatttaaaaacatgtttacaagttacaaccaacttctatgaaaagttgaaaagacaaaaaaaaaaaaaaaagcgagcgagagagagagcgagagagagagcgagagcagaagaaattcctaaaagtcgatttatttttgtacaaaataataaaaaaaaaaacccaccacaaacgtagaatccacttctgttccccaaaaagcgagaaggggggttcaggaggaagccatcgcaggggacctgggagacgccccgaggtgtttgtgcttcacccccagacgtcagcctcgaaggcaggactgtggggtgttcgtgctgtgttccccccgctccccctttctgtcccctttttgggttctgacgtgaagaggtcttagcgcccgcttctgtccacggggtctctccttcctcctccctagctcagggatgggccttccagccggagcaccccgatccccatccggcaccccccaatcccccaacacgcctgtccctcccgcatggccaccaaggagctggaccttggatgcgcctaccctgctgaggtgggtgacaggggccccccacctccagggccttagaaccaccgcccctctccccaccccaggcacccctctttttactcaaaggcactgactgtaatccagggggactgggacctgcctccccccaacctctggctcccacaaggcccggtgttgaccgagccacaggccacggacaggggccggggttggggagactatgtcgccagatgccaggacgccctcaccccgtttgcatatgcaatgctagcatgggaccccgaaaatagacgctctgctgcactgagacttcttgtcaatgcccaaccggcgggggggtgtctccctgcccccgacccccccatacccccttctctgtgacacacacatcttctcgtctctttttctttcattgttaaagggaagctttttaagaaggcaattttcatattgtttctaccggatggttttggttcccttcccttcccacccccccttaagcctgtcagccccctccaaatgtctcaggatcccccctctcccctggggctgggtgacagcaccccggctgcgttcacaccccagtgtcacagggcgagctgttctggagagaaaaccatctgtcgtggctgagcggggagcttgaacacccaggccagggacacccctccccagctcccagagaggccccctgaggggtgagccctctttccaccttcccctatccatgcaccccctcgcaataaaaccaactctaaaatcacagctgtcgtcctagccagtgggggcgaccggacttggggggtggagccctctgggacttccgtaggaacaagggctgcggcccaccgcgacacttacacagacctcggggattgcactaaaccctcgttcctagctccgcactcagcttcgcctgtcctgcccgcccactttgccttaactacccgcccgtcctgggggccacagcctctgcatgggcccagagccgggacccccccagcccagccccgccctccccagactccgcgcaatcacatactgtatatagacgtgaatcgattttatttttattctttaaattaaggtcgtgataaagtgttgccaaagatacctgctgaattctcgcgtttcaggaaacaaacaaacaaaaaaaaatgatatttgaggagggtcgtgttgactccatatgaaaggacacagctcaaagcttttttgtttggttgtttggggttttttgtgttttctttttttggggtgttttttttttaactgcctggtacaaaaaaaaaaagagaaaaaaaaaaaaaagaaaaacaatgcgaaattgttatttccattctcatggtgaagttgcgtggacgcgtgtgtgcgtgtgtgcaagagagcgggagtgaggtccaggctggggttggggggcttcaggcgggggcgcccgggggccggggaggtggccgggccggagcccccgtctgcagtgccccccagcctgccgggcccaggagagagagagaagcatctttgctactagctgttgctgctacctgcctctgcccgccgacgccccccgccttttgagattaagga

SEQ ID NO: 32476 - DNA, 1584 bp, Homo sapiens
gacgcgcgccgcagcgcgagggagcgaccagggcagcgcgacgcgggcagagcgagcgccgcggaccccggaggcgagcggccgagggagcccagtcccaacttcgggccccggccccgcgcgccccggcccggccccgcgaggtctcggcgcggaagatggccggcggcgtggacggccccatcgggatcccgttccccgaccacagcagcgacatcctgagtgggctgaacgagcagcggacgcagggcctgctgtgcgacgtggtgatcctggtggagggccgcgagttccccacgcaccgctcggtgctggccgcctgcagccagtacttcaagaagctgttcacgtcgggcgccgtggtggaccagcagaacgtgtacgagatcgacttcgtcagcgccgaggcgctcaccgcgctcatggacttcgcctacacggccacgctcaccgtcagcacagccaacgtgggtgacatcctcagcgccgcccgcctgctggagatccccgccgtgagccacgtgtgcgccgacctcctggaccggcagatcctggcggccgacgcgggcgccgacgccgggcagctggaccttgtagatcaaattgatcagcgcaacctcctccgcgccaaggagtacctcgagttcttccagagcaaccccatgaacagcctgccccccgcggccgccgccgccgctgccagcttcccgtggtccgcctttggggcgtccgatgatgacctggatgccaccaaggaggccgtggccgccgctgtggccgccgtggccgcgggcgactgcaacggcttagacttctatgggccgggccccccggccgagcggcccccgacgggggacggggacgagggcgacagcaacccgggtctgtggccagagcgggatgaggacgcccccaccgggggtctctttccgccgccggtggccccgccggccgccacgcagaacggccactacggccgcggcggagaggaggaggccgcctcgctgtcggaggcggcccccgagccgggcgactctccgggcttcctgtcgggagcggccgagggcgaggacggggacgggcccgacgtggacgggctggcggccagcacgctgctgcagcagatgatgtcatcggtgggccgggcgggggccgcggcgggggacagcgacgaggagtcgcgggccgacgacaagggcgtcatggactactacctgaagtacttcagcggcgcccacgacggcgacgtctacccggcctggtcgcagaaggtggagaagaagatccgagccaaggccttccagaagtgccccatctgcgagaaggtcatccagggcgccggcaagctgccgcgacacatccgcacccacacgggcgagaagccctacgagtgcaacatctgcaaggtccgcttcaccaggtgagctgcccgccgcgggggaggcgccgtcctgctctctgccccagcatccgccgctcacgacccctcccgcctctctccctgcaccgcacgcacacatgcacgcagacgcacacatacacgcacgtgcacacagacacgtacacgcacagacacatgcacgt

SEQ ID NO: 32477 - DNA, 4232 bp, Homo sapiens
gacgcgcgccgcagcgcgagggagcgaccagggcagcgcgacgcgggcagagcgagcgccgcggaccccggaggcgagcggccgagggagcccagtcccaacttcgggccccggccccgcgcgccccggcccggccccgcgaggtctcggcgcggaagatggccggcggcgtggacggccccatcgggatcccgttccccgaccacagcagcgacatcctgagtgggctgaacgagcagcggacgcagggcctgctgtgcgacgtggtgatcctggtggagggccgcgagttccccacgcaccgctcggtgctggccgcctgcagccagtacttcaagaagctgttcacgtcgggcgccgtggtggaccagcagaacgtgtacgagatcgacttcgtcagcgccgaggcgctcaccgcgctcatggacttcgcctacacggccacgctcaccgtcagcacagccaacgtgggtgacatcctcagcgccgcccgcctgctggagatccccgccgtgagccacgtgtgcgccgacctcctggaccggcagatcctggcggccgacgcgggcgccgacgccgggcagctggaccttgtagatcaaattgatcagcgcaacctcctccgcgccaaggagtacctcgagttcttccagagcaaccccatgaacagcctgccccccgcggccgccgccgccgctgccagcttcccgtggtccgcctttggggcgtccgatgatgacctggatgccaccaaggaggccgtggccgccgctgtggccgccgtggccgcgggcgactgcaacggcttagacttctatgggccgggccccccggccgagcggcccccgacgggggacggggacgagggcgacagcaacccgggtctgtggccagagcgggatgaggacgcccccaccgggggtctctttccgccgccggtggccccgccggccgccacgcagaacggccactacggccgcggcggagaggaggaggccgcctcgctgtcggaggcggcccccgagccgggcgactctccgggcttcctgtcgggagcggccgagggcgaggacggggacgggcccgacgtggacgggctggcggccagcacgctgctgcagcagatgatgtcatcggtgggccgggcgggggccgcggcgggggacagcgacgaggagtcgcgggccgacgacaagggcgtcatggactactacctgaagtacttcagcggcgcccacgacggcgacgtctacccggcctggtcgcagaaggtggagaagaagatccgagccaaggccttccagaagtgccccatctgcgagaaggtcatccagggcgccggcaagctgccgcgacacatccgcacccacacgggcgagaagccctacgagtgcaacatctgcaaggtccgcttcaccaggcaggacaagctgaaggtgcacatgcggaagcacacgggcgagaagccgtacctgtgccagcagtgcggcgccgcctttgcccacaactacgacctgaagaaccacatgcgcgtgcacacgggcctgcgcccctaccagtgcgacagctgctgcaagaccttcgtccgctccgaccacctgcacagacacctcaagaaagacggctgcaacggcgtcccctcgcgccgcggccgcaagccccgcgtccggggcggggcgcccgaccccagcccgggggccaccgcgacccccggcgcccccgcccagcccagctcccccgacgcccggcgcaacggccaggagaagcactttaaggacgaggacgaggacgaggacgtggccagccccgacggcttgggccggttgaatgtagcgggcgccggtggaggaggtgacagcggaggtggccccggggccgccaccgacggtaacttcacagccggactcgcctaaaaaccaaaaagagaaaacagaaacccgagaaagagagagacagagagagagaaaatccacaaattccaatgtcacaaaagcaataaaacaaactagaaaaaaaaaaggttttacaaaatgaaaggaaggaaaaaaaaaaaggcaaccaaccacattagaagtcttggcactttgtaacggaacgggtactacactttatcttaattcttaatttaaaaacatgtttacaagttacaaccaacttctatgaaaagttgaaaagacaaaaaaaaaaaaaaaagcgagcgagagagagagcgagagagagagcgagagcagaagaaattcctaaaagtcgatttatttttgtacaaaataataaaaaaaaaaacccaccacaaacgtagaatccacttctgttccccaaaaagcgagaaggggggttcaggaggaagccatcgcaggggacctgggagacgccccgaggtgtttgtgcttcacccccagacgtcagcctcgaaggcaggactgtggggtgttcgtgctgtgttccccccgctccccctttctgtcccctttttgggttctgacgtgaagaggtcttagcgcccgcttctgtccacggggtctctccttcctcctccctagctcagggatgggccttccagccggagcaccccgatccccatccggcaccccccaatcccccaacacgcctgtccctcccgcatggccaccaaggagctggaccttggatgcgcctaccctgctgaggtgggtgacaggggccccccacctccagggccttagaaccaccgcccctctccccaccccaggcacccctctttttactcaaaggcactgactgtaatccagggggactgggacctgcctccccccaacctctggctcccacaaggcccggtgttgaccgagccacaggccacggacaggggccggggttggggagactatgtcgccagatgccaggacgccctcaccccgtttgcatatgcaatgctagcatgggaccccgaaaatagacgctctgctgcactgagacttcttgtcaatgcccaaccggcgggggggtgtctccctgcccccgacccccccatacccccttctctgtgacacacacatcttctcgtctctttttctttcattgttaaagggaagctttttaagaaggcaattttcatattgtttctaccggatggttttggttcccttcccttcccacccccccttaagcctgtcagccccctccaaatgtctcaggatcccccctctcccctggggctgggtgacagcaccccggctgcgttcacaccccagtgtcacagggcgagctgttctggagagaaaaccatctgtcgtggctgagcggggagcttgaacacccaggccagggacacccctccccagctcccagagaggccccctgaggggtgagccctctttccaccttcccctatccatgcaccccctcgcaataaaaccaactctaaaatcacagctgtcgtcctagccagtgggggcgaccggacttggggggtggagccctctgggacttccgtaggaacaagggctgcggcccaccgcgacacttacacagacctcggggattgcactaaaccctcgttcctagctccgcactcagcttcgcctgtcctgcccgcccactttgccttaactacccgcccgtcctgggggccacagcctctgcatgggcccagagccgggacccccccagcccagccccgccctccccagactccgcgcaatcacatactgtatatagacgtgaatcgattttatttttattctttaaattaaggtcgtgataaagtgttgccaaagatacctgctgaattctcgcgtttcaggaaacaaacaaacaaaaaaaaatgatatttgaggagggtcgtgttgactccatatgaaaggacacagctcaaagcttttttgtttggttgtttggggttttttgtgttttctttttttggggtgttttttttttaactgcctggtacaaaaaaaaaaagagaaaaaaaaaaaaaagaaaaacaatgcgaaattgttatttccattctcatggtgaagttgcgtggacgcgtgtgtgcgtgtgtgcaagagagcgggagtgaggtccaggctggggttggggggcttcaggcgggggcgcccgggggccggggaggtggccgggccggagcccccgtctgcagtgccccccagcctgccgggcccaggagagagagagaagcatctttgctactagctgttgctgctacctgcctctgcccgccgacgccccccgccttttgagattaagga

SEQ ID NO: 32478 - DNA, 5333 bp, Homo sapiens
gacgcgcgccgcagcgcgagggagcgaccagggcagcgcgacgcgggcagagcgagcgccgcggaccccggaggcgagcggccgagggagcccagtcccaacttcgggccccggccccgcgcgccccggcccggccccgcgaggtctcggcgcggaagatggccggcggcgtggacggccccatcgggatcccgttccccgaccacagcagcgacatcctgagtgggctgaacgagcagcggacgcagggcctgctgtgcgacgtggtgatcctggtggagggccgcgagttccccacgcaccgctcggtgctggccgcctgcagccagtacttcaagaagctgttcacgtcgggcgccgtggtggaccagcagaacgtgtacgagatcgacttcgtcagcgccgaggcgctcaccgcgctcatggacttcgcctacacggccacgctcaccgtcagcacagccaacgtgggtgacatcctcagcgccgcccgcctgctggagatccccgccgtgagccacgtgtgcgccgacctcctggaccggcagatcctggcggccgacgcgggcgccgacgccgggcagctggaccttgtagatcaaattgatcagcgcaacctcctccgcgccaaggagtacctcgagttcttccagagcaaccccatgaacagcctgccccccgcggccgccgccgccgctgccagcttcccgtggtccgcctttggggcgtccgatgatgacctggatgccaccaaggaggccgtggccgccgctgtggccgccgtggccgcgggcgactgcaacggcttagacttctatgggccgggccccccggccgagcggcccccgacgggggacggggacgagggcgacagcaacccgggtctgtggccagagcgggatgaggacgcccccaccgggggtctctttccgccgccggtggccccgccggccgccacgcagaacggccactacggccgcggcggagaggaggaggccgcctcgctgtcggaggcggcccccgagccgggcgactctccgggcttcctgtcgggagcggccgagggcgaggacggggacgggcccgacgtggacgggctggcggccagcacgctgctgcagcagatgatgtcatcggtgggccgggcgggggccgcggcgggggacagcgacgaggagtcgcgggccgacgacaagggcgtcatggactactacctgaagtacttcagcggcgcccacgacggcgacgtctacccggcctggtcgcagaaggtggagaagaagatccgagccaaggccttccagaagtgccccatctgcgagaaggtcatccagggcgccggcaagctgccgcgacacatccgcacccacacgggcgagaagccctacgagtgcaacatctgcaaggtccgcttcaccaggcaggacaagctgaaggtgcacatgcggaagcacacgggcgagaagccgtacctgtgccagcagtgcggcgccgcctttgcccacaactacgacctgaagaaccacatgcgcgtgcacacgggcctgcgcccctaccagtgcgacagctgctgcaagaccttcgtccgctccgaccacctgcacagacacctcaagaaagacggctgcaacggcgtcccctcgcgccgcggccgcaagccccgcgtccggggcggggcgcccgaccccagcccgggggccaccgcgacccccggcgcccccgcccagcccagctcccccgacgcccggcgcaacggccaggagaagcactttaaggacgaggacgaggacgaggacgtggccagccccgacggcttgggccggttgaatgtagcgggcgccggtggaggaggtgacagcggaggtggccccggggccgccaccgacggtaacttcacagccggactcgcctaaaaaccaaaaagagaaaacagaaacccgagaaagagagagacagagagagagaaaaaaaatcacccaccacccccccaaaaacacaaaaaaagaaaatctatctatatacagatatctatatctatatatatatatacagatatatatatatgacgcgtcacagaatctagggtagcgctttctcagatttccctcctttctgacgtttttctccctccgcaggggccccggccctccctggctccccttccccccaccaccccatcgctgggtttcggggcttggtttggggttttttgtaggacacaaggaatccgagaccccgcacagccccctgggcacccggcatggggcctggggcccgatccgaggccctgggctggggggagggtagacgtgggggcgctggggggggactggggtgggcttttaatttcctcccctcgctggtttctatgagtctttcagacaagaccttaaatgatttctgtctgctctgagcggacgttaaaatgggcccccgtcccccgacccgcaccctccttcctcagggcacttactaagggaggggtctccctctccatctccccagtggcctccccgcctccaaccctgcctgcggcctccccccgtcgcccaccccacgtctcctggccactgagacacaaacctatttatttctaggcctggagaaaggagatcggactggggttcccggtggggcgccaggatggctcctgggggtgctcctgccgccttccttcacggcacttacaaccggcgggacccccagggaccacccctcagggcgcccccccacccccgcccggtccacctagacccccacgtttggagattcaaaacttctgtcttcgtcctctcccccgagccccctctcccaaatttttaaagcactttttagatttttttttctctttcctccttaaaaacaaaatttatatatagatatatatatatatataaataatatacttttcctcagaggagcaggcaacagtgtgggataaacagagtcacgatcagaggaaccccagggtctggtgatggcagggatggggggagagagagaaaatccacaaattccaatgtcacaaaagcaataaaacaaactagaaaaaaaaaaggttttacaaaatgaaaggaaggaaaaaaaaaaaggcaaccaaccacattagaagtcttggcactttgtaacggaacgggtactacactttatcttaattcttaatttaaaaacatgtttacaagttacaaccaacttctatgaaaagttgaaaagacaaaaaaaaaaaaaaaagcgagcgagagagagagcgagagagagagcgagagcagaagaaattcctaaaagtcgatttatttttgtacaaaataataaaaaaaaaaacccaccacaaacgtagaatccacttctgttccccaaaaagcgagaaggggggttcaggaggaagccatcgcaggggacctgggagacgccccgaggtgtttgtgcttcacccccagacgtcagcctcgaaggcaggactgtggggtgttcgtgctgtgttccccccgctccccctttctgtcccctttttgggttctgacgtgaagaggtcttagcgcccgcttctgtccacggggtctctccttcctcctccctagctcagggatgggccttccagccggagcaccccgatccccatccggcaccccccaatcccccaacacgcctgtccctcccgcatggccaccaaggagctggaccttggatgcgcctaccctgctgaggtgggtgacaggggccccccacctccagggccttagaaccaccgcccctctccccaccccaggcacccctctttttactcaaaggcactgactgtaatccagggggactgggacctgcctccccccaacctctggctcccacaaggcccggtgttgaccgagccacaggccacggacaggggccggggttggggagactatgtcgccagatgccaggacgccctcaccccgtttgcatatgcaatgctagcatgggaccccgaaaatagacgctctgctgcactgagacttcttgtcaatgcccaaccggcgggggggtgtctccctgcccccgacccccccatacccccttctctgtgacacacacatcttctcgtctctttttctttcattgttaaagggaagctttttaagaaggcaattttcatattgtttctaccggatggttttggttcccttcccttcccacccccccttaagcctgtcagccccctccaaatgtctcaggatcccccctctcccctggggctgggtgacagcaccccggctgcgttcacaccccagtgtcacagggcgagctgttctggagagaaaaccatctgtcgtggctgagcggggagcttgaacacccaggccagggacacccctccccagctcccagagaggccccctgaggggtgagccctctttccaccttcccctatccatgcaccccctcgcaataaaaccaactctaaaatcacagctgtcgtcctagccagtgggggcgaccggacttggggggtggagccctctgggacttccgtaggaacaagggctgcggcccaccgcgacacttacacagacctcggggattgcactaaaccctcgttcctagctccgcactcagcttcgcctgtcctgcccgcccactttgccttaactacccaggagctacaacctcagagttaagactagctcgcattaaatacatagatttacgggggggggggggcgggggccagggagacccccatccctcgccggggctgcctggaggctgtggaccaggatccgatgcccaggtcccgccccccaccccaccccaggcccagaatcgaggtgccttggactttggaggggccaggcctggtgaatggggggcggggcggcgccctcagggtacagagcacagacagatagacattccagagactgtattgagagtctttataaagtgtgggagatttaaaaaaaaaaaaaactgataaaaatgcactttttgggagtggggagggagaagctttaaaagtaataaaaaacaaacaaaaacacaaaagatgaaaaaacaaaaaaattcatttttcttgtacataaaaaaaaaaaaagaaccactaaacgcagcctgttacgaccgctgccgcctcagtcgcctcatttgatgttctctgtgttttgttcgggggaggctggggagcggggatggggggcttggggggggtcccccttttccccttttggccctgaagagactgggtgggttgagcacctcgtccacaccacacctttgggcccagggtgaccggatcctgggtcccaaggagagaagccccaggtccccgacccttcctgctcttcctgcccggcctt

SEQ ID NO: 32479 - DNA, 4249 bp, Homo sapiens
gacgcgcgccgcagcgcgagggagcgaccagggcagcgcgacgcgggcagagcgagcgccgcggaccccggaggcgagcggccgagggagcccagtcccaacttcgggccccggccccgcgcgccccggcccggccccgcgaggtctcggcgcggaagatggccggcggcgtggacggccccatcgggatcccgttccccgaccacagcagcgacatcctgagtgggctgaacgagcagcggacgcagggcctgctgtgcgacgtggtgatcctggtggagggccgcgagttccccacgcaccgctcggtgctggccgcctgcagccagtacttcaagaagctgttcacgtcgggcgccgtggtggaccagcagaacgtgtacgagatcgacttcgtcagcgccgaggcgctcaccgcgctcatggacttcgcctacacggccacgctcaccgtcagcacagccaacgtgggtgacatcctcagcgccgcccgcctgctggagatccccgccgtgagccacgtgtgcgccgacctcctggaccggcagatcctggcggccgacgcgggcgccgacgccgggcagctggaccttgtagatcaaattgatcagcgcaacctcctccgcgccaaggagtacctcgagttcttccagagcaaccccatgaacagcctgccccccgcggccgccgccgccgctgccagcttcccgtggtccgcctttggggcgtccgatgatgacctggatgccaccaaggaggccgtggccgccgctgtggccgccgtggccgcgggcgactgcaacggcttagacttctatgggccgggccccccggccgagcggcccccgacgggggacggggacgagggcgacagcaacccgggtctgtggccagagcgggatgaggacgcccccaccgggggtctctttccgccgccggtggccccgccggccgccacgcagaacggccactacggccgcggcggagaggaggaggccgcctcgctgtcggaggcggcccccgagccgggcgactctccgggcttcctgtcgggagcggccgagggcgaggacggggacgggcccgacgtggacgggctggcggccagcacgctgctgcagcagatgatgtcatcggtgggccgggcgggggccgcggcgggggacagcgacgaggagtcgcgggccgacgacaagggcgtcatggactactacctgaagtacttcagcggcgcccacgacggcgacgtctacccggcctggtcgcagaaggtggagaagaagatccgagccaaggccttccagaagtgccccatctgcgagaaggtcatccagggcgccggcaagctgccgcgacacatccgcacccacacgggcgagaagccctacgagtgcaacatctgcaaggtccgcttcaccaggcaggacaagctgaaggtgcacatgcggaagcacacgggcgagaagccgtacctgtgccagcagtgcggcgccgcctttgcccacaactacgacctgaagaaccacatgcgcgtgcacacgggcctgcgcccctaccagtgcgacagctgctgcaagaccttcgtccgctccgaccacctgcacagacacctcaagaaagacggctgcaacggcgtcccctcgcgccgcggccgcaagccccgcgtccggggcggggcgcccgaccccagcccgggggccaccgcgacccccggcgcccccgcccagcccagctcccccgacgcccggcgcaacggccaggagaagcactttaaggacgaggacgaggacgaggacgtggccagccccgacggcttgggccggttgaatgtagcgggcgccggtggaggaggtgacagcggaggtggccccggggccgccaccgacggtaacttcacagccggactcgcctaaaaaccaaaaagagaaaacagaaacccgagaaagagagagacagagagagagaaaaaaaatcacccaccacccccccaaaaacacaaaaaaagaaaatctatctatatacagatatctatatctatatatatatatacagatatatatatatgacgcgtcacagaatctagggtagcgctttctcagatttccctcctttctgacgtttttctccctccgcaggggccccggccctccctggctccccttccccccaccaccccatcgctgggtttcggggcttggtttggggttttttgtaggacacaaggaatccgagaccccgcacagccccctgggcacccggcatggggcctggggcccgatccgaggccctgggctggggggagggtagacgtgggggcgctggggggggactggggtgggcttttaatttcctcccctcgctggtttctatgagtctttcagacaagaccttaaatgatttctgtctgctctgagcggacgttaaaatgggcccccgtcccccgacccgcaccctccttcctcagggcacttactaagggaggggtctccctctccatctccccagtggcctccccgcctccaaccctgcctgcggcctccccccgtcgcccaccccacgtctcctggccactgagacacaaacctatttatttctaggcctggagaaaggagatcggactggggttcccggtggggcgccaggatggctcctgggggtgctcctgccgccttccttcacggcacttacaaccggcgggacccccagggaccacccctcagggcgcccccccacccccgcccggtccacctagacccccacgtttggagattcaaaacttctgtcttcgtcctctcccccgagccccctctcccaaatttttaaagcactttttagatttttttttctctttcctccttaaaaacaaaatttatatatagatatatatatatatataaataatatacttttcctcagaggagcaggcaacagtgtgggataaacagagtcacgatcagaggaaccccagggtctggtgatggcagggatggggggagagagagaaaatccacaaattccaatgtcacaaaagcaataaaacaaactagaaaaaaaaaaggttttacaaaatgaaaggaaggaaaaaaaaaaaggcaaccaaccacattagaagtcttggcactttgtaacggaacgggtactacactttatcttaattcttaatttaaaaacatgtttacaagttacaaccaacttctatgaaaagttgaaaagacaaaaaaaaaaaaaaaagcgagcgagagagagagcgagagagagagcgagagcagaagaaattcctaaaagtcgatttatttttgtacaaaataataaaaaaaaaaacccaccacaaacgtagaatccacttctgttccccaaaaagcgagaaggggggttcaggaggaagccatcgcaggggacctgggagacgccccgaggtgtttgtgcttcacccccagacgtcagcctcgaaggcaggactgtggggtgttcgtgctgtgttccccccgctccccctttctgtcccctttttgggttctgacgtgaagaggtcttagcgcccgcttctgtccacggggtctctccttcctcctccctagctcagggatgggccttccagccggagcaccccgatccccatccggcaccccccaatcccccaacacgcctgtccctcccgcatggccaccaaggagctggaccttggatgcgcctaccctgctgaggtgggtgacaggggccccccacctccagggccttagaaccaccgcccctctccccaccccaggcacccctctttttactcaaaggcactgactgtaatccagggggactgggacctgcctccccccaacctctggctcccacaaggcccggtgttgaccgagccacaggccacggacaggggccggggttggggagactatgtcgccagatgccaggacgccctcaccccgtttgcatatgcaatgctagcatgggaccccgaaaatagacgctctgctgcactgagacttcttgtcaatgcccaaccggcgggggggcgtaaagatctttcactaaattccatatgcggtctgtctggatgtaaacctatatattttcttgtgaaacagaatcctatcctgctgactcttgggactcctgcatagctttgaccgaatgtcactctcatcgtgatggaagatttctatctatgccgctgatacatgtgcttaaatactgagatctgtttaaacctgaatcttgctcactcccattggggactgtg

SEQ ID NO: 32480 - DNA, 2059 bp, Homo sapiens
aacaacggctaggtgcaaggtctgggtggtgagagagcgagagagagagcgagagcagaagaaattcctaaaagtcgatttatttttgtacaaaataataaaaaaaaaaacccaccacaaacgtagaatccacttctgttccccaaaaagcgagaaggggggttcaggaggaagccatcgcaggggacctgggagacgccccgaggtgtttgtgcttcacccccagacgtcagcctcgaaggcaggactgtggggtgttcgtgctgtgttccccccgctccccctttctgtcccctttttgggttctgacgtgaagaggtcttagcgcccgcttctgtccacggggtctctccttcctcctccctagctcagggatgggccttccagccggagcaccccgatccccatccggcaccccccaatcccccaacacgcctgtccctcccgcatggccaccaaggagctggaccttggatgcgcctaccctgctgaggtgggtgacaggggccccccacctccagggccttagaaccaccgcccctctccccaccccaggcacccctctttttactcaaaggcactgactgtaatccagggggactgggacctgcctccccccaacctctggctcccacaaggcccggtgttgaccgagccacaggccacggacaggggccggggttggggagactatgtcgccagatgccaggacgccctcaccccgtttgcatatgcaatgctagcatgggaccccgaaaatagacgctctgctgcactgagacttcttgtcaatgcccaaccggcgggggggtgtctccctgcccccgacccccccatacccccttctctgtgacacacacatcttctcgtctctttttctttcattgttaaagggaagctttttaagaaggcaattttcatattgtttctaccggatggttttggttcccttcccttcccacccccccttaagcctgtcagccccctccaaatgtctcaggatcccccctctcccctggggctgggtgacagcaccccggctgcgttcacaccccagtgtcacagggcgagctgttctggagagaaaaccatctgtcgtggctgagcggggagcttgaacacccaggccagggacacccctccccagctcccagagaggccccctgaggggtgagccctctttccaccttcccctatccatgcaccccctcgcaataaaaccaactctaaaatcacagctgtcgtcctagccagtgggggcgaccggacttggggggtggagccctctgggacttccgtaggaacaagggctgcggcccaccgcgacacttacacagacctcggggattgcactaaaccctcgttcctagctccgcactcagcttcgcctgtcctgcccgcccactttgccttaactacccgcccgtcctgggggccacagcctctgcatgggcccagagccgggacccccccagcccagccccgccctccccagactccgcgcaatcacatactgtatatagacgtgaatcgattttatttttattctttaaattaaggtcgtgataaagtgttgccaaagatacctgctgaattctcgcgtttcaggaaacaaacaaacaaaaaaaaatgatatttgaggagggtcgtgttgactccatatgaaaggacacagctcaaagcttttttgtttggttgtttggggttttttgtgttttctttttttggggtgttttttttttaactgcctggtacaaaaaaaaaaagagaaaaaaaaaaaaaagaaaaacaatgcgaaattgttatttccattctcatggtgaagttgcgtggacgcgtgtgtgcgtgtgtgcaagagagcgggagtgaggtccaggctggggttggggggcttcaggcgggggcgcccgggggccggggaggtggccgggccggagcccccgtctgcagtgccccccagcctgccgggcccaggagagagagagaagcatctttgctactagctgttgctgctacctgcctctgcccgccgacgccccccgccttttgagattaagga

SEQ ID NO: 32481 - DNA, 1279 bp, Homo sapiens
ataaaccagtgaatgtaaaatgccggagcaggcccggcctggcatgggtgtggacctgcagccaggcaggctcgagcgggcgataccaaagtctgcccccccaccattgtggccatgcagtcctgtcactgtctttttgcttccttccgaggggggtcccccagcctcttccagggtcttcccctggaagtgggcggctgcagggaaggtgggggacaggggtctttgcacgattcagaccccggggccgtggcaggagcggtcacctcacaggtggtgacactgaggcaggggcctcggggtgccccctcccgcccggcaaccagaatggttggaggcaagacagagagaatgaaaggaaaaacagaagaaaaaaaaatattaaaaaccaacaaaaaaagcaaaaatcctattttttgagaaagaaagatatttatatttgcagttttattttaaaaagttatttaagttgaagcagccttcctggaggtgggggggggggggtggtgggtggctggcgcaggacgggtcaggggcctggaggctgggggtgccccaggagctacaacctcagagttaagactagctcgcattaaatacatagatttacgggggggggggggcggggccggcccagggggtggagggggccagggagacccccatccctcgccggggctgcctggaggctgtggaccaggatccgatgcccaggtcccgccccccaccccaccccaggcccagaatcgaggtgccttggactttggaggggccaggcctggtgaatggggggcggggcggcgccctcagggtacagagcacagacagatagacattccagagactgtattgagagtctttataaagtgtgggagatttaaaaaaaaaaaaaactgataaaaatgcactttttgggagtggggagggagaagctttaaaagtaataaaaaacaaacaaaaacacaaaagatgaaaaaacaaaaaaattcatttttcttgtacataaaaaaaaaaaaagaaccactaaacgcagcctgttacgaccgctgccgcctcagtcgcctcatttgatgttctctgtgttttgttcgggggaggctggggagcggggatggggggcttggggggggtcccccttttccccttttggccctgaagagactgggtgggttgagcacctcgtccacaccacacctttgggcccagggtgaccggatcctgggtcccaaggagagaagccccaggtccccgacccttcctgctcttcctgcccggcctt

SEQ ID NO: 32482 - DNA, 128 bp, Homo sapiens
ttctttttatacaatcaattttatcaatgtgttttatcaattttcaacatttggtaagtttatgggtatttcacattcaatctgcatgtaaaaataatattgcaacacaggaaaacacatttaaggca

SEQ ID NO: 32483 - DNA, 769 bp, Homo sapiens
tttaagctcctcactgcaaaagacaaaaaaatcacagctctgggcagtcattctctcctttggctccagacaggctggccaaccacaggtctttctccaagctttgccatctctttggaatgtccattcccctttgggaaagtcttttctaaacctagttcaatcctctgtcaagaagcctcactgatcgctgaagcccactggtccagccccttgctcaagcccaagcagtgactgggcacaatactgatgttataatgcctagcactgcttatttaacctttttagggcctggcttccatccctctctaacacttattgaatattgtctgtgtcagtttatgcttttttttgcaatctcttgtctaagtcatacaacagccctatgaggtcttccacacccattttacagaggggaacatggaggtccagagaggatatttgctctggattgtgtagttcaaatgcacagtcacgatttgaacccagctcttagccaaccccaaacccccaaatctgagcttgtcatcaccacactgcagtgcctggttgacagtggccttctttataggctacctgtcaactgaatgaattacttactggctcttccctggtgataaggaaagaaaatgagaccacctctacttcattgcctccattcccgcagctggggtaggagagtgtgtgcgtgtgccaggggatgaggcaaatggacacacaggccaccacagtttctgagcctcagttttctcatccgcaagacaggagc

SEQ ID NO: 32484 - DNA, 302 bp, Homo sapiens
aatagtttttgtattttctaaagcctagagatctgaaagattttttaaaagacccaaattaaaccactagagatgaaaaaaattatactacataagatgaaaatacatattagaccagactgatggattactcattgtagaaaaaagtcaccttgaagacatagcaatagaaactacccaaaattgaatacacagagaagagagactttaaaatcataagcagaccatacgtgagttgccttcaagcaaccaaatatatctgcaattaaagtcaccaaagcaaggcaagaagggcaaaacca

SEQ ID NO: 32485 - DNA, 1744 bp, Homo sapiens
  misc_feature (953)..(953): n is a, c, g, or t
catgggtcttctgggtctgttagaataattaccaagtatttggatagttaaaagttgcaacgctagggtcttttatacttgctctaggacatagttgtcaggtatgaaaaatttaccatggcaagatccatttgttgtattaatcactacctttcccttagagttgatttatggttcagagggatattctggaaaatgcttagatcaaacaagaccacattcattcatggagaaagagtggaatgcaggttcgtagtaaagaaaaataatttccagggctcctgggaaaaagctttggtcacttaaatgcccttgggctttctgtaagtaaacatctgcagtcctctctattggttttctagcatatttcacacaaaagcaggggagcagagtagtgttaattaccctgagccaagtcagtattaatctcaggtctccattgttgtttaagattgatggataaagatgtgactgcccagaactacctttgttctcttactggaaagatgtggacttggaggggcaatctggagttaatagtcagaactagattgtatcctccttactgggatgtgagctctgtcacctgagtaaccaatttctttgtaaagggatgtaatctcaaatcttagctttcaagctgccaggcttggtttgcttttatatccccaaatggaaccggaaccttctttattccaatggtacattgtggtagactgtattcggcaaccttttgtatgaaagggttaacatagatctgtctcatcagtgtctttctgtttaaggatagcataaaagtgctgattgttaacttcacttggtcctatgcttattctttatttttactgtaggatttactttttcttttcctgtgtctttctctctccaaaaaaaaaaaaaaaataaaatctaccttgatgtgtcaaagagataaagaagatgttataaacatnaaacaaaagttcacgtttctgtttctttgtgcccccggtcccccttttaaaaataggcctcacagcatcaggcatttgccagtgcagcagttttgaagcataggatttttccccttcctgatgtataaatgccagctctcttcccccctttgcagacacaggcattttcctcttttgagttttagttttatgatagcacattacaaagagtttgacagatcctttaagatgaagatctgttgatgtacttcctgtttatggtggctcccagcttcactggtgatgaggacacaggcgcctgaaacccagaggcagggtggatctgcaccacttctctgaccttgccagggctgaccttcatcattctaagggaactttttttctttttttcccctccctaagcagtggttctcaatttggggctattttactccagaaggggcttttggcaatgtttggagacatttttggttgttacagcaagacttggagctaccagcctctagtgggtagaggccaaggatgctgctgaacattctacaatgcactggactgtccccacaaaagaatgttctgtcctgaattgttgatagtgccaaggttaagaaaccctcccataagggatgttttctaggcttaaacagtggcctgtatgtgtctttctccttatttctttatttcaagaaaagaaaaacgctgccaaagcaaaagccatgcagtatgttcataataaattaccttttaaaacaaatcccaggcctactcttcccgaaaatgggaaagacaaaaaa

SEQ ID NO: 32486 - DNA, 661 bp, Homo sapiens
agacggggtttcaccatggttggccaggatggtttcaatctcttgaccttgtgatcagcctgcctcaacctcccaaagtgctgggattacaggcatgagccaccgcgcccggccaaaatatccaatgacttctagatccattttcctacctagacctcttttctaaactccagatatatatttccaactgcctgtgctgtccgccataaactccacattgtaggaaatagaaaggagttataaaagtttaggttcaaagcaaaatttaaaaactcataaatgagacaaaattttgtgatgataaaggctatggtccacaatgaagatatgaaagtaatgaacctttctataaaatgtataggtgatagagctggtccccaactttaagcctttcagcgattcaagtaactacagaacatcgttaaagtactgagagaaatgtcaatccagaattctatatccagcaaaaatacccttcaacaattaaggcaaaaagaaaaagaagaaagacattttggatgaagaaaatctaagagaatgtgttggcggaagttctgctctaaaataaaagtaaaagaaggtctttaggccaaaggaaaattataccagtggtaatactagaacttcagagataaagagcagcagaaatggtatctgggaa

SEQ ID NO: 32487 - DNA, 843 bp, Homo sapiens
gaagaacgtgagttggaaaaatgctgagccagtccctggaaaacctgggtcctggcctggattctgtccttagccagctcttaacaaatcccttaacctcactgtctcctctccttcacaatagagttagtaattcccatccaactggcttcacaggcttttgtgagcttatgaatgtgaaagtattttctagtttataaaacactatatgaatgtggggaaatctttacttgaccttagggcatggagggtggagcacattttgtctgctgtttggacttggatgctgattagcagttatgaagtggcccagacacctagccattctttagtaagagtgaagatagcattttaagccctccttgtgtgcctagcatcttactgaacactttctggtgattctctcctttaatcctcacaaagatctcacagttgtcctccattttacggagaagaaaccgaggctccgagaggttaaacgatgtgcagaggctacctgtagtgatggtgctgagtcaagcctgtcaaccactgtgctcgttagtgaccaaggctgctttgacaggctgccagcttgtcagtggtttgcagccccccagacatttgctttcctacttcccatgcagttggggtgcctgcaagtgccaggttctctttggagtccatctgtgccttgtcacccaaaggagggcctcgagcatcacaaccgttgacatttcgaaacgtggtatctctacaacctttcattctcattgggattaccttgccatttgaacaccatcatttttggggactggtaaaaaggttgcctaaccctcacagggaacacacagttccctcaga

SEQ ID NO: 32488 - DNA, 512 bp, Homo sapiens
ttctttcccttaattatgccaagttgactgaagcagtgatacaggctggaaatatccaccatggttatttcagtttttgaactttaagcacagatattttgggaagtatcggggtgtgttgaatagttttcaattcatttattatttcttctagagaaattgacttgtttttgaaaacagcagttcagaattagataactacacgtgtttgcaaggatcccccccaacctggaaaaatatccttttcagacagccataataattcatagaaccaggattgattcagagaaattgtgtgacaggttgatggtctggaggttccaacctcattcacaaacctcagctctgtaggaaacagtgtggaccagaaatgaggccagaagtagtttcaccttcctaaactcaagccttttggggaggtctgcctcttattccatttattctattttagccacatttcagatgtgcttacttatctagttacttgcttagctcacttatttaaaaaaaaa

SEQ ID NO: 32489 - DNA, 347 bp, Homo sapiens
cctttttcagattgtgcttccatttaaaaaaatgagttccagtttaaaaatatatatatatgctggactgggcatggtggcttatgcctgtaatcccagcactttcggtggtcaaggtgggcagatcacttgagcccaggggttcgaggtcagcctgggcaacataaggagacctcatttctacaaaaaaatttaaaaattagccagaagtggtggcatgcacttgtagtcccagctattcaggaggctgaggtgggaggattgcttgagcccaggaggtcaaggctgcagtgggctgtgatagtgccactgcactccagcctgggtgacagggtgagaccctttct

SEQ ID NO: 32490 - DNA, 343 bp, Homo sapiens
cttgttaacaaggccttagtgcatggaagatgcagatcacaggttctccattcaaaagctactccaattctcccagactacatatgcaggtgaattaaatttaactacagactaatttagcagtacagaaacatgtcacacatccattcttttcacaatacaaaatataccacccttatggatatacacatttccttgtttaggatgtccttaacttcaatcgagatgtgaattttccagtaaaagagacactaaactgtcatttctttaaaggtttcacacactcaaggggcattcagtgcttactgtctactaaagacaaagtcactgccaacaaagccca

SEQ ID NO: 32491 - DNA, 384 bp, Homo sapiens
taaaaataatgagatatgttggggatgggaaccaagtctaaacacaaaattcattcgcttcatatacaccttataaacatagcctgaaggtagttttataaaacatttttaatactcatgtgcatgaaaaccaagttttgactgaaacctgtcacatgaggtcaagtgtggaattttccacttgtggtacgtcagtgctcaaaaagcttcagattgtggggcattttgagattagaaatgctctctacctgtactactttcctatgctgacacacacacacacacacacacacacacacacacacacacacacacacatttttggaggtgcattttcactctgttcgaccagccggggccaactgggcgaaccccattctctat

SEQ ID NO: 32492 - DNA, 542 bp, Homo sapiens
tgttgggttatttgtatttttatagttggattgtaacagttctttagaaatcttgggtatgctagaccctttcagatataatttgcaaatatttccttccattctatgggttatctttccactttcttgatggtgccctttgaagcacaaaagtttttaattttgatgaaattctaatttatttattttttcattgttgcttttggtgtcatatctaagaaaccattgctaaattcaaggttataaagatttattcctatgttttcttctaagagttttatagttttctcttactctaaaagtgtttgatccattttgagcccatttttatatggtgtgacataggtttctgtgatggttaattttatttgtcaacttcactgggccaggggatgcctagatagctgcttaagcacaatttctgggtgtgtctgtgaggtgtttcggaagagaatggcatttgaataggtggactgagtaaagcagatggccctccccaatgggggtgggcatcatacaatcaattgagggcctgaatggaa

SEQ ID NO: 32493 - DNA, 1033 bp, Homo sapiens
atttcctgaaaggtttttactctcttttccctccaggtctctccaagacaatcttctactttttcttaatttctgcttatcctttagacttcaattcaaatgttagttccttggagtagccttccctgatgatttccctgatataccatcccctctcctctcaacctaggtttagtgcacctgttttgtgctccctgtttttttccctatgcaatatttgatgcatttgattgtactatgtagttgtttgtcctgtcttttgcatatgtaaactcagtagataaggacagtgtctgatgttcctgaccattgagtctcctgtgctaatgcaatgcctgacacatatttggcacttaaatatttgttgaattaatctatattcttttctctccttcagcttccacttaaaactcagtcactatcatgcaactaaaacttctcttagtaaaaatttttaataattttcctaataattaaattcagaggtttttttttccagctcaatggattcaccaggatgtctcacaagtatttccagcctaacatgttttattttgaactctttgtctgccctcactgctttcccatgcccagtatccctttcccatacccaacatccctttctcccaaaaaagaaaagaaaaaactcttctctggcatttatgactcttaagaaatgttggataagacgctcctaatacatttgcacactcattcctacacagtcatgtattcatttgttaataagttctgacttgggtgggtgtgggtggctcacgcctataatcccaacaccagaagtccaaggtggaagaatcgcttgaggtctagaattcgagaccatccttggcaacatagtgagaccccatctctacaaaaagtaaaaattagctgggtatggtggtacacacctttaggcccagctacttgggaggctttggcaggaggatcacttgaacctgggaagttgaggctgcagtgagctaagattatgccactgcactccatcctaggtgacagaacggcagacacc

SEQ ID NO: 32494 - DNA, 622 bp, Homo sapiens
caagatcatgccactgcattccagcatggctgacaaagtgagacaccgtctgaggaaaaaaaaaattaacatctatactctattatagattacaaatattcaaagaaccaagtgcttaacaaaatacacttattgttctctaccttcctattttctttaatttctgatcagaatgtaaagacgggacagaaggtgtctcctgtctctcctgagacagtagagtatggagtactatcttttgataatggcaagctacctttcggaatctaacttactctctcctgagaagattctaggggtacttcaggataccaacaaaagagaattgttatttacatcatcccagtaatgtactatatagagatatgtgaaagtgagtaagtattttaccttcaggagtgggtaaattagcttttattatatgcgattattctgtgaggtgggggaaaaaactctccattaggagaaactggtgcctcataaagttagcatcttggccttacagtaataaggactttctaacttattgtaataaatgaaagaacatattcccatagggctttagccattattaaggaacaacttccatcttaagaagcttagctgaaaaaagaaatagggg

SEQ ID NO: 32495 - DNA, 540 bp, Homo sapiens
gtgtgctacatcaagcagagattaactgagttcatgaactggaagacacctaatgcagggtacacaacatatgatttgtatttgatccttttatctccttcagttttcttttctacccactgcatcctatattgggaaatgtctggataaataatgggtttgtcatctggccactaacttgtactttgcatttggcaaagacaacttgttaaaagaggaaatcacaatactataaagctgaaagggacttcagctaagttcacagagatgcctagtaactcactaaagccactaataatgacagagccaagggtgtgacagtgtctgaacctgccttaaatcctcttattccttagccactgcctttgttaccataccatgtcctctccaagaggacacactcaactttgtgccactgtgctcctgacacagtaatgcagacgatatggtagaaaaagtacgccccctggagtcagaaagactttgattaaatacctatgtagtgaatgaatagctgagatcttcagcaagttactgaac

SEQ ID NO: 32496 - DNA, 588 bp, Homo sapiens
atttcagcatacatggctttcaaaattatgaggcatgaaagtgtcaaaagcatctccagaaactcatgccgccaggatctgagactcaaaacagtgtggatcaaacaccatcaaagtgtggggtggggcaattcgagtttgtttccttgtttttatgtaagcagattaattagagaactaacataacgccagtctttgggcttttgatcctatcctgccaggacccagacttggagatgtattaaatggattcttccttttctaaatggaagaatctgcccttctcggcttcatagctcttctcaaagtctctgtcttggaccctcccgttagttactgagaatggtatactaacatctgagaaaggttggattcctcctagggacagaaaatccacatatggaaagtgcaaatcctgtgccgggtaatcacgaaagcagttgcagtagcattggatcatagagccccaggagacctcacaattcagcccccttcctggcaacactaatgaattaagaggtcagtttggtaattccaaaggctaagcctttgtaactataaataaatgcacagaatgaaaggaatgta

SEQ ID NO: 32497 - DNA, 422 bp, Homo sapiens
cagagtctatatgtcatactgggttaggttaattagctgttttgtgctaatcatttcacagtgtacacatatttcaagacatgtacactactaatatattcagtttttattgtcagttgtacctcagtaaagctggggaaaaaaatggaaatgtttaactcatatagaaattactgtattagatgtgtgttttgttcagttgccctgccagaagaaaaccctcagctagggtcaggcttagagatgatgctctagtaaacatctgtagaatgaaagtatgcgtagatggaagaactcctcctaattagcagtgtttgcccattccagtgttctgcatggaatcagtatgtattctactcattgcctgtaaaaagtttgaagtttaaatttgtgtagtaaaagcatctttgatatttctgttg

SEQ ID NO: 32498 - DNA, 527 bp, Homo sapiens
aaccagccccgagtgtggctgagaccccagaagggaggagggtgccttcctctcaggacacaggatagcgtgtctcccaccaccctaggggagccccaggattctcccacattcttggtcttggtggggtgtgatcctgtgatggttaatttatgtgttagcttggctaagccatggtacccagacatttggttaaacagtagtctcaacgttgctatgaaaggactcttcagatgtgattaacttcttttgtttctggagatagggttttgccacattgcccaggctggtcttgaactcctggactcaggcaatctgcctgcctcagcttcccaaagcgctggaattatgtgccactgcacctggccaagatgtgattaacatttaaaccagcagactctggagtgtgagtgggccttgtccaatcaggtgatggtaaagatggcggctcccgcaaagaggaagggttctccctgcagtctcatcaattcatccctgggtctccagcctgctgagtaccacttttt

SEQ ID NO: 32499 - DNA, 1314 bp, Homo sapiens
gaaaaaaaatgaactattttgtagcattgaacaagggtaggttccttgaatagtgccttgaaaatcatttacttaaatgctatcattttatggatactgaaagtgtgacatcagtgcccaagattacatggcttaaacttagagggtagggtgggacccagaatcctgacttgtgaatctcccttgctagagttttctgcctcatgccagagcctcctcctgcacagggatttctcacgccctccccaccctgcagcttcaatagggattttccctggacatactggctgctcttctccatagtaggcatttttccatgaagcaagtgtcattatgcccatgcacagatgaagaaactgaagccatgcatatggaggaagcaaaccaatacacatccaaagcaatgcacatccaatgacatggatgatccaaagccactcagctgtaactgctggagctgagacttgagcccagtgctcctaacccctgcattagtgccattctactgatgccaggttgaaaagaagctgtacacatgcagaagacacttttgggagcctttgcaatagcagatgttttatagctgagcagatcaagctgggaagaaatggtcgcttttcatagccatctctctgcacttgttggccttccctgacagtagcaacgttcttcattcttagatccctttcatcactaaggggatgccactaaactgaatttcttagcatggaaatgttacattccagggattgattttcctgcatagtatttctagaaaagttaatcgcctcattagtcatatttacattttattttaattgcatcctcgagagcaaatgtattcatttttttcctatgttatagttctctctttaacaaccccttaataaagcagagacaagatcagagcacatgaagagcactttgctttcttaaaatatgccacctcccaaaaatgtagggcccaattatcactgcggctataagctaattatcagatacaaaatatggatcacaactaattatcagaatctgaccttatttccaagtcatagattcctataaactaggttaacattagagatttaagcaggaactcaagaactgcagtaacccatggaaatgaatgtttatatttctaacaaatggctaaggcaagagatgattttctgaggcttatgtctggtgaaattttccagaagttcacgctctgcaaggccttattagtagaacatggatgatgaacggtccatttcattagtaacctgaaaccttctatttggagataaagatgactgcttccatttaaaaaaa

SEQ ID NO: 32500 - DNA, 1011 bp, Homo sapiens
ccgagtgccccggaggccttgaggctgtcatcgtcacctgctgcctccaggaaagaatgcaaaaccctaaaataggaaatgtggggccagcagaggaggggccggcacgcagtccttgaaagtgggggctgttgcccgccgcctcttcttagggtaagaacggggagagtcatcaggcctctgtctgtggaacagcagctccattcaacagtcatcaaagagtttgctatcttcttcaaactttgcagccaatctcacccacggattgaagaagacaacttgtaaataacaggaggaaacttaagtagagcatttaattttctcttcagttaaaataaaaaaagtaaatgctggaaatggaaatgatgacgagaaatatgcaagaaaataagccatgatttttctggcacagcactttatctttacataaaattgggattttgttgataagcatttttactgaagccaaaaagacctctccttcagttatgtttttaatcctaacatctggatagaaattaattgttccatttacaaattaaatgaatcttgtgaagaataatgttcaccaataaaatgtgcctgaaagatctggaacatcagaatttttcttcctgtaaaccacaaaaaagaatttttcatatgaaagaaaaccatgaggtttatggagctccagagcgtttgtgagcaaatccaccggggaagcccatggtggcatctctagactcaggtgagggtaatgcgtctgcagagtgagcctcagcattgggaccctgtgtgaccaaaggcaggacacggccatcgcagcacagaggggtcaccgacgcacaacagggctcccggtgcacccgcagcagctttcttcaaaattacccagacattagagcaatgctagcccctcaacgtgggctccaagaacgtgggaagtcagcctgccagccacaaagctgccacgtcctcccatccgggtgtgaataaagcacccacaaatgcctccttagttggaactga

SEQ ID NO: 32501 - DNA, 358 bp, Homo sapiens
gttttgtggctaacactgtaaacctcagatagatatgtcactgcagactggcatatggaatataaatgagatataaaagctgttttttccaacgtaacaccaggtgagctccttagaattaaagaaaccaaaaccatgctgtgaaaaaaaactttagatcctattgctttctcctaattacaacaagagtaacatgcaaaggatattatataagagggatttttaaaagacacttttagccttaaataaagcttcactgaggtttcattgccacaaggattgaactcaaggtaaaaatagggaatttgagcctttgagcctctgtccacaatgttagacattcaaggtcctctccctc

SEQ ID NO: 32502 - DNA, 585 bp, Homo sapiens
  misc_feature (489)..(489): n is a, c, g, or t
tttaaatccagaacaatggagccagctgacagaacagatttctgacacttgatgatgcagtaagaaaactgtaaaattcgagccatataaataaaacctgtactgttctagttgttttaatctgtctttttacattggcttttgttttctaaatgttctccaagctattgtatgtttggattgcagaagaatttgtaagatgaatacttttttttaatgtgcattattaaaaatattgagtgaagctaattgtcaactttattaaggattactttgtctgcccaccacctagtgtaaaataaaatcaagtaatacaatcttaactgttgtggccttttttgatcataagagttggtactgtttaaggccaaaagtaacagtttttatagatcttttagtttcaactcagcttttacaataaaaaggatttgtattgcattgagtttataaacttttggtttgtgaacttcatatttgatcttttctctnccaatcaaatgtctaggcttgtttgacttccacccccaatggtttttcactcttttatttacttcattttcctttaataacttaatctacttcatg

SEQ ID NO: 32503 - DNA, 810 bp, Homo sapiens
cacattccccacagggaaaacacatttctcacctcaaaagaagacaagacaacgagcaaacaagaaggagcagcaggaggggttctgagccgaggatgccgggcagacatgagggagacacgcacccccgaatccaaccagtgcctcggcacaacgacaaatgtcttcacgtcacagacctttagaggctcctgggcagagcctgaaccagggctcctgactggtctgtttggctcacatggtgttgagattttgccatcactcaatattcagatttcttataaatatccagatttccagcttctcttggaaaatcagaaaaaaacagcactgaactcctaggcccacaaggcactccccagtgaacagatgaaactgtcctctgctgcggggcaggagtctccaggtcacccccatccctccccacctgcctggaccctgaagaagccttctgagtctgtggctcaacgtgcgatgtgcagtgcaagggcctgccccgtagcctgccccgtaggctgccccatagcctgccccgtaagctgccccgtagcctgccccgtaggctgccccgtaggctccatggccactgccccacaaggcctgtctccacaggaatgggaagcggacagggagacgggcagcagctcacatgctgggacaacgcagtgttcaatccattctccatccagcagctccagacatctttccagaacacaaacctgaccccatcacctctctgcttagccactggcttaaactgccaatggtttgcctgcatgtaaaataaagccattctttaccattaaaaaa

SEQ ID NO: 32504 - DNA, 399 bp, Homo sapiens
gtggagaccatgtggagagcagaaatgatgcattcctaccacgactgctcagagaggtatgagtggagacctagggaggaaacgagcctggaattctacccacacctggcagtagcaagatggcatctgcaccccttctgcactggagtggggtcaaaggaagccagctaaaacagagggtttaaataagatccacagtgtcattatgtaatacataaagatttcaatcaaaaatcatctatcctaccaagaaacaagatctcaaattcaatggcaaaaaagtcaatcaatatatgccaaaatcaaaatgacagagatgttggaattatctaatggggagtttaaaggaggcatcatagaattacgtcaataaacaattatgatcatccttgaaacaag

SEQ ID NO: 32505 - DNA, 413 bp, Homo sapiens
aaaattcgaaactgtagaatctcatgtgcttgtggtagcctcctaccaccaggagaactttaaccaagtaccaaggctgaagctagcagttagctcaccatagtttttaaggtgccctaatcaaaattttaatataaaaattataaagcacgtggtggctcacacctgtaatccctgctacttgggaagctgaggggggaggatcacttgaggtcaagagttcaagaccagcctgagcaacacagtgagaccctgtctctccccccaaaattggccaagtgtggtggtatatgcctgctgtcccagctacttgggaggttgaggcgggaggatcacttggagtttgaggctgcagtgaactgcaacagtgccactacactccagccagggtgagagtgagacccctgtctctc

SEQ ID NO: 32506 - DNA, 522 bp, Homo sapiens
  misc_feature (500)..(500): n is a, c, g, or t
attcggaaacaagaatggccatcccaccacgacagcaatgtcaagccagtaagccctgacttgcttttcatagctgccacccccaggtaggagtcctgggagctggtgaaggacagctgctctgtgagcttcaaggtcttctttcagaatgccattgtgattacagagcctataaaataaaaaagatgctgcaggagatgcttatttaagcacagatcaccagcttctagaatctatgatggttcttcatggtttactgaaatatatctgtaatataatctggacattaaaatgcagcaactatactgtctctcaacaaagacataaaatggggcagtttgaaaaacttgtttgcgtgtatgcggcaattttaaatccatcagaggaagtaacttttaaccctttgttgactttaatgatgttcaaatccacagctgggcaatctcgttccacattccacctgaatgacaggtatgctaggctccgtggcccgattcttngggcctcgagggggcccaattt

SEQ ID NO: 32507 - DNA, 749 bp, Homo sapiens
agacagagatgtctgggccttgaccaatgagatcttcaggagtacttcagcagctgtttcggatttttctctgtggatgtcctcatgggactaagtggaaattggaaaagtatcatcaaactcttcttgagattcctttttgataaggaagattgcagaaaaatttgtggctgaagaggatgcactgagaagaaagataactgcccttattctaaatcccaatcttcaatcaagtactaagatggtctgcactttgcctgtggcgatttccttaggtagctggagaggaaacctcggtggtggtggtgacccacagactgccctgctgggaaaatgcactgaccagtcatcagcaaattctagcccattcagcagctgggcaatctcgttccacattccacctgaatgacagtgtttttcagagggttagcctggcagccttgcaaggatggagttggtgaggagagagacctgaggcccagagaccagtcaggagactgactttgtgctgtaggtggcagaggaagagcaggttagtactgtgcagtactggaaactggctgacactccatggtgctggtggatgctgcagtgggagcaggttccctccatgcattcggcacaatgctgagcatacaacttaatgatactacatgtcaaatgacaagctgaaacttaaacccagatgaaagaaattcatatgacacacttatctttacagtatttttttttttttaataaaaatgaga

SEQ ID NO: 32508 - DNA, 591 bp, Homo sapiens
agacagagatgtctgggccttgaccaatgagatcttcaggagtacttcagcagctgtttcggatttttctctgtggatgtcctcatgggactaagtggaaattggaaaagtatcatcaaactcttcttgagattcctttttgataaggaagattgcagaaaaatttgtggctgaagaggatgcactgagaagaaagataactgcccttattctaaatcccaatcttcaatcaagtactaagatggtctgcactttgcctactgccctgctgggaaaatgcactgaccagtcatcagcaaattctagcccattcagcaggttgaaaagctactgaccaggaaggtcatttccagcatttcccatagcttcaagattactagtacagacgcagaaggtaatgtaaaacaaagccacttaatccggtgaagttttcttgtgacagggtccctttaaagactattatcctgatttccatccaccctttgatagaatcaatgtgtactagatttaagcagaatcctgtaaatatcctccctatttatatctttaacataaaacagcctaagtggcacatgacaggtgaggagaaca

SEQ ID NO: 32509 - DNA, 401 bp, Homo sapiens
ttcaggtatttcagcaaaaattaaatacctaggaataaacttagatgtgcagggcttttatcaaggacatgacaaaattttgctgagaggaatgaaagatttgcattctatgttcctgaatgagcagatttcatgttataaatatgttatcaccatgtcttcatattaatttataaatgtaatttctgctgggcacagtggctcatacctgtaatctgaacagtttgggaagctgaagtgggtagatgacaattagctgggtgtctgtggcacacacttgttccaactacttctgaggccgaggtgggaggatcgcttgggcctgggaggcagaggttgcagtgagccgagatctgcctctgaactccagcctaggtgacagaataagaccctgtctcaaa

SEQ ID NO: 32510 - DNA, 369 bp, Homo sapiens
ttgctggcttaactgctggattttgacacccatttttgtccaatatgtaaataagtcactagaactacagatgggtaatgtttgcgtttatcttaagacccagttaaggccgggtgcaattgctcacgcctgtaatcccagcaccttgggaggccaaggcaggcagatcacaaggttaggagttcaagaccagcctggccaacatagtgaaaccctatctctactaaaaatgcaaaaaattagctgggcctggtggtgggcacctataatcccagctacgcaggaggctgaggcaggagaatctgttgaacccgggaggtggaggttgcagtgagccaagatcacaccattgcactccagcccgcgtga

SEQ ID NO: 32511 - DNA, 506 bp, Homo sapiens
tctgcagctcagagtgggagttggcctcagtgctccccaagagctcagagtgggcgtggggagccccagaggtgggtagcctggtcttagctccttgactctgctctgcagaggaaggagccaggactggagccacagccctgactcttggggagacgggcacatagttgacacccaaggaataaaactgccctccccttgccactaggctcagagggtctctaacagcctcgctgcgcaccttcagaaagtgactcatggagcctcaggttcatcgtgttcaaatggacacacagctccttgcggggaactgaatggggcccaagcaatgtaggagaatgtcctgggtgtggagacactttgtaaagcagaaacttagggctggccttgctcccaaccatgctgtggtcttctcacctgtccataacaatgacaggcaactgctcagaagaactccctgggcagcgggcacagccagagtggaggtggaaggaataaaggaaata

SEQ ID NO: 32512 - DNA, 423 bp, Homo sapiens
accaaaaataagtagaccaagtgcaagtcttctgattgaacagtgcccagttccagagtttatcagccatgctggtacttctcaagaaggagttgagagaagccttccttggaaagctagcaccaccaacaggaaagactagcaggtactgactgggagcatccctgttgggaaaggcagctggccatcaggtcacctcatattgacacatgtcagtcaaaagccttgcttcactcctagacccagaaccttcagtctgcaatttagtgtctcgctcaagaaaatgtaatctggcaggtgtcattagtatgtaaggaagcctctaacatgcaacaaagagattaaggtagccaataaataaactaaaaataaaataaacaggatagagatttggagcaacatagggagaccgcttctctacaa

SEQ ID NO: 32513 - DNA, 346 bp, Homo sapiens
aaggggctaaaaaatactggtttcaagtttggagtcattatagcactttttttatgttaatgggtataattcatgaaaaaggataaaactgaagacacgggacagtgaaatcataattccagaatctaaatctgtgtgttggcaagataggttggaacttgaagtggagtgattagtcttagataggagcagggataattctattgtgatcctagggaaggtgcagcatatgggctcatcaggctatggacttggtattgggaatgtggaataagaagccaggccatcaggttagagaatatgagataaaaaatggttgtcaggagaaagagaaagttaaagtact

SEQ ID NO: 32514 - DNA, 360 bp, Homo sapiens
tggtactccctcccctttatgcttaatggatttatgtaattataaaacatataattaaagtcaattatgtgctaatactactttatattttgctaccaaatgcttttggctaccacatcaaaccctggagcttgacatatataaacctgctcctttcttaatttcattagctcctccacggtcccatcatgacctaagttgccaccttcccaggagacaaatacaaaccaatgtgtaaatgtgttttactcagctttctttatgttttccaaagctgaattgtagaaccgcatttatactctgtccttctctgtgtctcttttctctgttctcagtcttccattcattttttgtagaaat

SEQ ID NO: 32515 - DNA, 402 bp, Homo sapiens
cagcacagactctatcacaccatggaccttcaagggatagctctcttggcaaaacacccttttgccagacctaattgccagaagctgcagtggaaatgagaacccaggatatgggacgagacagacctatgtgtggatctcagctctgccatttgctagctgtgtggccctgacagtcacctgccttgtgagctctgagttccttaagtgtaaaaatgccatggtatggtagagaggaaagagactcatatttgaatatgacacagaataggcccttagtgccagcctcaggggctcacacctgtaatcccagcactttgggaggccaaggcaggcaggttgctgaagcccaggagttcgagaccaccctggtcagtgtgatgaaactccgtctctaaaaaa

SEQ ID NO: 32516 - DNA, 287 bp, Homo sapiens
gcagctagataggaaggaacggaggcatgagagcaaaaagtacctgccacaattcacttcaacccagtagcaaacattcgctttccctcctccccccactgtgagtcagcaaaatataagaggaaacaagagttcagttggtggggaaaaaaagtagaaatctttgtcagtgtcttatttttttctttttcttattttagtattaagattaagtcattgggcgtctctgtgagatataatgaagaaacatcaattagcaggtttctccattatatcatgagcggttc

SEQ ID NO: 32517 - DNA, 613 bp, Homo sapiens
atattcctgtgacccacctaccaactcccctagggctgtaggacagaggtgaaaggccatagattctattgtcctatgagcatgtccaagcacccagcactggaagaataacttgcggagttgatacaaggtttgatatgtttctcattctaaataaaatatatgtacacttttacactaactttgtatttctattgttggattatctttcttaaagaaaactcatccattgattgatggtgggaatgtaaactggagagcaaatttatcagaatttcaaacacatactcttttgacccaacaatccttccttctgaaattttatcttacagctgttctcatacatgtgcagaatgacttacaggctcattcttggcagcgttgtttgtaatagcaaacaactggaaataatccaactatctaagaacaggggactgattccataaaggatgacacactcataaaatggaataccatgcaattgttaagaataatgaggaagcgcttaaagaattgatctataaataccttctgataaagttgtatgtgaaaaaaagtcaaactacagaaaaatgtgtatagtatgcttccatatgtggttaaaaaaaaaaaa

SEQ ID NO: 32518 - DNA, 251 bp, Homo sapiens
gtggtagctcctgtcacacagtttcataaatgtttgtttacttcttcaagttaacgactcagtgtgcgctcctcaagcttagaaatgatggcctattcatcttcaaatcccaacctctagtgtcgcgtctggcccgcagaaggaaaatgaaggcctgactgcattgactttttggatgcatttcctagatgagtcctatttctaggtggcctcacaagaaataaaaacatgtccagcttgttccggatgct

SEQ ID NO: 32519 - DNA, 395 bp, Homo sapiens
ctataattatggaaagaatgaaaacatgttaaagagcgtatacagcttgaataaattgtttaaagcaatgatctggtataagaataataaggtacactcttcttcatatcctgtatgcatatttttcatataaaataagaacattttgctactaagatttctaaaaataataacaccttgataatagatacatctgatctataaactctgcctttaaactcactatacaacgtgataaaattgcatgaaactaaatccatgtgtgtatacatgcacacaaacacccatacacagagtacttgcaaaactaagaaaatctgaataacatcagtggattatatccatatcctggttgtgaatatagttttgcgagatgttatcagtgagagaaactg

SEQ ID NO: 32520 - DNA, 338 bp, Homo sapiens
tttgtatttttagtagagatggggttttgccatgttggccaggttggtctcaaactcctggcctcaagtgatcccaccccgcctcggcctccccaaagtggtgggattcccagatgtgagccactgcgccctggtcctaaaatattttaaaaaccacatattccccatgcacatttttaggttgacttaaaattttttgttaaagtttaaatagttgtaaaagatgtcatttctgggcatatataatgacatttttaagtgaaatggttacatcattattctaattgcatcccatgtaaccttaatacaaaaatgatttaataccaccaccatccatt

SEQ ID NO: 32521 - DNA, 1505 bp, Homo sapiens
atttaactaatatatgttgaattccttaacccatttatgccagaggttgcaatattttgaatttttgcatgagttaaaaattagaccttggcaatgaccttgaacagtaggatataaataactctcacgtgcttagtattccaataatggaacactaggcataagtgggtcaatatattcaaataagatttaaacaaaataaatgaatgttgctagtcattttttttttttttctgaaatgcacttattgactaaagatttgccctgggaaatacatttctttgggattagtcaaaattacaatccagtcttgactctataatttataaactgttattttatttctctcatattgagcttcccagggaggaaggtaaactccctatctctaaggactgttacgcttaaataaaccatagtttatgtgaatatccagcacagtgccactgcacagaatttattcaataaattacacttcccttccagagcatcaaaatctacattttctggccaggcacggtggctcaggcctgtaatcccagcactttgggaggctgaggtgggcggattagttgaggtcaggagttcgagaccagcctggccaacatggtgaaatatataatatatagacacacgtgcacatgcgtatataatctagaataaggactacgttgttatagtaaaggaggaaaagtgaaaaatgtcatttctacacagccaaagcattagaccctgtcttgtagattcatcctttgaactctttcatttgaaaaattacccagttcttaacctgataatggatgagaaaaataatcccttgcctttctccaccaaagacctaaagataaatattgcttttctaaaaaattaaaaataaatcttaaaaaatctcaaattttctatctggcttcatcttgttcatgtcgaaaacacaacagtggggtgtcagcaaagctgtaatacctgagaataaaagcgtagtgccaatacgcatgaacagaaattctgttcagacatgctgaagccttctgcagaaactaacagaatccaactggcttcattaatttcagccatctacatctttttcttcttatataaacaattaatgttttggttttcctttctaaagaaaatcatgtggagattttattcattctccctaagcctacttactgtcaaattgacacatggcttaagtgaatagaacctccaatttccttttttgttcaagagctactgttaggtaggagaagtatatctgaatccttgcaaaaaaaagaaaacttcaaaaggaaatttttaagagaaaaagaaggtaagtacatgtgtaacctccgtttcagacgcattacctattgtatcgttttctttgcagtattgtaaagcatgaaaaaaataggaattaagatgtcaaaaaagaattttccttttttaaaagtctgagctggaagggataggaattcttaaatccaaaaaaacaaaacaagaacacatacacaaacaca

SEQ ID NO: 32522 - DNA, 667 bp, Homo sapiens
cccaggctggagagcaatggcgcaatcttggctcaccacaacctccgcctcctgggttcaagcaattcttctgccccagcctcccgaggagctgggattacaagcatgtgccaccacgcctggctaattttgtatttttagtagacacggggtttctccatgttggtcaggctggtctcaaactccggaccttaggtgatctgcccgcctcagcctcccaaagtgctgggattataggcgtgagccaccatgcccatccttatgtaagaactattatagctccgttccacagatgaggaaaccagggaccagaggaattgttgtgcaaagtcacggctaggaagtggaggagaaaccgggactcaaacccaggccacccagtggcctagtctgcactgtcaccacagcactccactgcttccctcctttgtagctgggagaagatggaatttagtaactggagaggtgactgggatgaggtgcagctctagaagctgcaccagaatctggggcctgccatgagtcactcaacttctcatcctgttttcctgtctgtaatcatattcatacccacctaagcaaagcctttagatgagaaatagatgagatgatgaatggaaacaactagtcatgaattttaaatatattattaataataatatatata

SEQ ID NO: 32523 - DNA, 1078 bp, Homo sapiens
cccaggctggagagcaatggcgcaatcttggctcaccacaacctccgcctcctgggttcaagcaattcttctgccccagcctcccgaggagctgggattacaagcatgtgccaccacgcctggctaattttgtatttttagtagacacggggtttctccatgttggtcaggctggtctcaaactccggaccttaggtgatctgcccgcctcagcctcccaaagtgctgggattataggcgtgagccaccatgcccatccttatgtaagaactattatagctccgttccacagatgaggaaaccagggaccagaggaattgttgtgcaaagtcacggctaggaagtggaggagaaaccgggactcaaacccaggccacccagtggcctagtctgcactgtcaccacagcactccactgcttccctcctttgtagctgggagaagatggaatttagtaactggagaggtgactgggatgaggtgcagctctagaagctgcaccagaactcacaggaccccagagctgccaagctagaatgccctcaaagggctcgtggttcaagccccagaggcgtcaccccatgggagtttcgctgaggagcctgtctcataggtggttctccctctgatctttcctgctgtccagtcatcctaatctgttgttcaggcactcccagggagagctttttcagccttaaccttggctttttgtcctgccttggcccaaatccacactcctagcctgactcctaccgtgttttcttctcctcctcctgctctcaagacattcaagattctgtgcccttgtcacctcgtctcctcactgggttctctcatttctgcaatgagtaagaaatgtgagtaggaagaagatgctctcggaaactcaagttcaaatattcctgtttctggttagctctggggcctgccatgagtcactcaacttctcatcctgttttcctgtctgtaatcatattcatacccacctaagcaaagcctttagatgagaaatagatgagatgatgaatggaaacaactagtcatgaattttaaatatattattaataataatatatata

SEQ ID NO: 32524 - DNA, 1013 bp, Homo sapiens
cttcttatccatgaacatggaatatctcttcatttgtttagttcttctttggggtctgtcatcagagttttatagttttccttatatagatcttgtacatattttgttttatacctaagtatttcattttttggatatgttaatataaataattttttttttattttcaaattccacttgttccttgcaggtatataggaaagcagttgatgtttgtatattaaccttgtagcctgtaaccttggtataatggcttataagttctgggacttttttttttttttttttcaattccttcacattttctccatcatgttgtctgtcaacaaagacagttttattttatgctttccaatctgtatactttttatttccttttcttattgaattagctaggacttccagtatgatatgatggaaaaggatgatgagagggaacatctttgcccgcttcctgatcttagtgggaaagctttaatttctgaccatcaattatgatgatagttgtaggtttttgatatatgttgtttatcaagttgaggaagcttcttactgttcctagttttctgagtgttttttgaaatgaacaggtgttggattttattaaatgccttttctgcatctgttgatgtgatcaggtgagtcttcttgaacctactgatgtgatgggtccatgttaattaattgatttaaaaaattatttattttgagacaagagtctcactttgtcacataggctggagtgcagtgggatgatcttggctcactgcagccttggcctcctgggcttaagcaatcctcctgtcttagtctcccaagtagcagggactacaggtgtgtgccatcatgcccggcgacagatttttgattattaaagcagccttggctgggcacagtggctcacacctgtaatctcaacactttgggaggccaaggcagacagatcacttgaggccaggagtttgagaccagcctgagtgacacagtgaaaccactttcttaactaaaaatac

SEQ ID NO: 32525 - DNA, 454 bp, Homo sapiens
ttccttctccagcccaactccaacctaggaggaagccttgcatgctgaattgccaagggcaaaattagaaagcactgtactcgagctgctacaagccatggaaaaatttcttctttgctgcttgggatgggctgagagaaaaagtggagagagggccccagaacgttactccagtgctgttttctgtcatcaggattggaacagaaaccctaagagtggagtaacaagcatccctcctgctatttgccagctttttcatctcttggtatattacagtgtgtgttccactggcattatgtaagttgattttaggtagcatgatgacaggcatttttttaaaaagttttagtaatatatatgttgtaatcagaaaaatatgtaacattgtttatcatgagtaaaaaattgagcgaaagattttaaaagtatacacaatatttaaggaaaaatatta

SEQ ID NO: 32526 - DNA, 206 bp, Homo sapiens
aaccctctgccagcccttcctcagcctccaggcctctgtggtcagcctcgttctggtttttttctgccccttgaaggctgaggcagtgtctttagtgttgctgcagccttctccaagaataggcattgctcggttaactgaatcaatgtaagcatctccatgaacggtgcaaatataatgagcagaaagacctttgtcctcaggga

SEQ ID NO: 32527 - DNA, 339 bp, Homo sapiens
gataatgacctctagctccatccatgttgctacaaaggatatgatttcactcatttttttgactgtgtattataccatgctatgtatataccctattttaaaaaatccaatccactgttgatgaacacctagattgattccatgttttgctattgtgaatagcgctgtgatgaacatgtgagtgcatgtgtctttttggtagaatggtttattttcctttagatatatactcagtaatgaagattgctgggttgaatggtaattttgttttaagttctttgagaaatcaccaaactacttttccacagtagctgaactaatttacattcacaccgacaa

SEQ ID NO: 32528 - DNA, 424 bp, Homo sapiens
tgggccccctaatccaatatgatttgtgtctttataaaaaagggaaatttgtgcacagagataacacaggggatatgccatatgaagatgaaggcagaattctacaagcccagggatgccaaagattgccagcaaaccaccagaagctaggagagaagtgtggattagattcttcctcacagccctcagaaggaaccagccctgccaagaacttgatctcagacttctagtctccagaactgtgagacagtgcattttgttttgtaagtcagccatatggtttgtggcactttgttatggcagccctaggagatgaagacaatatgcaacatggtatgtccattataggacactgtgggccataaatgtgttctttggcctgaagaaataaaacttggtggtccaagttgatgtcttaaacatc

SEQ ID NO: 32529 - DNA, 484 bp, Homo sapiens
  misc_feature (26)..(26): n is a, c, g, or t
  misc_feature (54)..(54): n is a, c, g, or t
aatttggacccgaatccacccattgngcgttttctggtgcgggtggagagaatntttgaggtccccaggagagcctgcttgcagggaagagacgcctcttcgggaaatttgtgcacagagataacacaggggatatgccatatgaagatgaaggcagaattctacaagcccagggatgccaaagattgccagcaaaccaccagaagctaggagagaagtgtggattagattcttcctcacagccctcagaaggaaccagccctgccaagaacttgatctcagacttctagtctccagaactgtgagacagtgcattttgttttgtaagtcagccatatggtttgtggcactttgttatggcagccctaggagatgaagacaatatgcaacatggtatgtccattataggacactgtgggccataaatgtgttctttggcctgaagaaataaaacttggtggtccaagttgatgtcttaaacatc

SEQ ID NO: 32530 - DNA, 493 bp, Homo sapiens
gcaaatgcaaataaaaaaagatacaagtggaatttaaagttaaaagcactaaacaggacaaataagaacattatataattgtaaaaatcaagactctaataaacataaacataaacctttgttcagtaaacaacatagcagctaaagagagtggaaggaggtcattgatttataaacagaaattattgggtgaggttttaggaaagatatgtaaagaaggctgactcaactggaaaatgtcttttgccccttccctttcttatttcttctgtccataatgttggatatgatggccgaaattgcaacagccatcttgtggccatgaagcaactttgaggatacaaagtagaattcaagattgcaaagctcaaaggaatccagattgttaatgacatcatagagctggcatatctttcctggactatctgttgccagatttgctttgtgtgtgtgagagagagaaaataaatctctttcttgttgaaattactgt

SEQ ID NO: 32531 - DNA, 665 bp, Homo sapiens
ccaatgtgacagtaagtgatctttcctttaaaccacagcgcttcttgtatgctccagccagtatttttccaaattgcgggtagccatgcgttgttgagtagtgagttctgggtactttgtatgtagtaaggatgagcagagttttcattacccggttgcaacgtaaaatgtatttctcactgtgggtccagagtttttaaaaagcatgaaagctcctgtgctagcacaatgccaagttctaaataacgtttattaaatggaattatagtattttattttcattttgtatttatttttgttttctagagctatcgcctccattcgtagctactggacagtagagaccataccatctttatttttccgattcccagtggagtgcttgtgatgatgtgggctcattcaatgtgtgtcaaataaaagtctgaatggatacatcaatggaagggataatatagctcagtgaatgtgcttgaaactaactgctgttctaactcctggtattcttctgattctactgtgagagctgacattgttcagttaatcgtttccaagggccctagtcccgcagacagtgagaccaagaataattcgcattcaggaagtaccacttgcccttagtcaatatggcatcctgaatgacttccggaaagggcaccgcaaaa

SEQ ID NO: 32532 - DNA, 438 bp, Homo sapiens
gtctcattattctggtaagtgtctgtctctcctgatgtcctctctgtgagttggggatcacgtttttgttcaccaccacatccctttagcttagcacatacttggcacttggttcaaagaaaattttttgagtgaaccatttgattttgttttttgttttatagagttgagaagttcttaggtagggagttgatagtatcacaaaattaatctgtatacccagaccttggtcccctggcagtttggttttcagccataactaaaacttagttatcccagaacagttttaacacttcttcattttttgttggggttcttttgaaagttaatttagactttgcaatacgcggtaacctgggctttcgttaagaggaaccaagcaggccaagtagctttttatcattccattgaacacggcgatacaagatgagcagataa

SEQ ID NO: 32533 - DNA, 733 bp, Homo sapiens
atattatctaggaaactttatctggtgtattatataatatcaaataaaatcattttgcttacagtcttttagatactccacttttctataaaacagtggtatgtgtttataaatagctgaattataaaatgagtttatctgtagcctattgaaaggatggccaaaaaagttattttccaatgaaattagatctagtaaagtaaactacttagttgagatataagcagtatataaagcacaataaaatgccacttttcatattttcttaaattgcttttaggaattttagtggtgactagtctgccattctatttcatttctgtaactgaagcagcgcagaaatcttctattttcttttttctccctttgcttgaatagtaaatggttatagcactttttctacttcgatagaatgaatggttataatgaaaaaagcttttgatgaatggcactcttggatttgttcttaattttggcaaagacgtatataattctgcaaaagactttctctgcctcttcctttagtgagagaaaaaaaaaggtaggaatgacaacttaactcctaggattctgaggatctgcttatacaaataagaagtgctaagtaaaaactctgaaaatgttgctaactggtagagaaatggagattaacactttgttaatggaaacctccaaataaaggaattataattgtttaataataaagactatattttaaaagtgaacaaaaaaa

SEQ ID NO: 32534 - DNA, 1456 bp, Homo sapiens
attgattaaaaggtgacctttcttattggactgataagacaaaaatatagattccaaatctattgacatatgatatcacatccacaaatgtttgcctatttttgtagcattattttggttgcaaagtctcttagggaatgcacaaaaataatacaaccttaaaaatcagactagaagatggaatataagtggtttccttgtaatttttttttaagcttggagaggtaataacacatctttgaattcaaactgaggactgctgcttaatggtgcttttacagggtggttctaaaatttttgagagtcaggtattgctttctctgactgtttaattcaccactggcacgtgtttcctatcctcaagcataagtttaaaagattacaaacctcatgctgctcagttttttctttccagtaaatcagatgcatggtttctctagatttacatatagaaaatcgagatgtggtgggtattagactaacacttcagtgataggaagaagagactgatttctcatatttgtgtaaaacattctcttacctaactaccatctggtccacattaatttcctctcatagccatagctttccattaccaatgagttttccatgtattcacagcatatgggccaggaaatctttctacagagaatgtgtcccttaggcatatatttcccctagattaccgtattaagaaatgttctccctaaaccatacttatggcattaccataaaattgcctcttgaacacagttaaattgaaagtgctcaaaatgcatatcaattcaggtaaaagaaatcttgctacttggaggggaggtattttttattcttccccactttctctttctaactccctacaaagctatttctaattatttgcttatgctgggcactgaattttctcttaggctgaccatatattttattaaagtagtcttgaattcaggagtggaaaaaaaaaagttatgttttagacctcaatgtaagctgaaaggaaataaaggaacttctatatttccatttctcaggctgattttccttcccctgttctcttatctgtatcatgacatgagacgtgaacctcagaaatgtaaaaacaaaaagtctagaataaagcattcccttgaattttaaatgaacatgcttttagcagctggatacgaagcagactattttcaacaaattgaatgtttccccacttgtgtgagagccaaacaagtgccatacagaaagggacctcttcaatgttaccaaagctttgtggcagcatttaagtgtggtggctccatagaagtcactatagcatggacgagccacttggcttgctttttcctgctaatcaaagttttaagaagataaaaagctatctttgttatatatgttttgtctaatttgcaatattacagtctcctggggggaaatccaacttccaataataattgtaaaaaaaaaa

SEQ ID NO: 32535 - DNA, 1950 bp, Homo sapiens
tcaaaggtgccaaagtatatgtgctcgcaaaatgcaaagaaaggtgacaaaaggaaatttgaattgggaacaagggtccatgcttttcaaagtattaaaaagttttttgccaggcaaaaatcacttactttacctttttaagaaaatttgtcattattttccccagatttcagcatttttcccaatttttatttgtggagcatctcaggcaagccccctttcctggagcagcgtgcagagaccactggcacttgactttatttcttccttgctccattgctgaacagaaatgtcgtgggctccacttcctgttgtctttaagctcttagtcccctccacgtatacctatctgtactatgcataaccatatgtagaaaaggttcagttccttttagtaggtagtcctggatttaatgctgacctaaaagtaatgtcgacaatgctgtcaggtagctgccgttctaccgactccctccatccctgcccacccactgccctcccgagaatatgctggctgcccagtgcagcccgggagacacaggggccttccagaggtagggtctaccaggtcccgtacaacccctgggctgtcaccgggggtcaacagctgctgctcctatatacccaaacacctgacagctccctggggagcagatggctgagaagggtgctgaggaagccatattgggaccagccacagccacacacatggagcctcatacttaggagcgtgctgcctttaaatgaaggtggtcggggccagtgcagcggctcacacccataatcccaacactttggaaagccaaggtgggaggatctcttgaacccaggagtttgagaccagcttgggcaacatagggagaccctgtctctacagaaactttaaaaattaggcaggcatgatggtgcacacctgtggtcccagctactcaagaggctgaaggaggatcacttgagtccagaaggtcgaggctgcagtgagctgtgatcatgccactgcactccagcctaagtgacagtgcggtaccctgtctcaaaaaaaaaaaaaaaaaaaaaaaaaaagaggttggagcaggaggaagcataggggcgggaacagccacctcctccatgccctagattgtgaatttatcgggcagccaacacatgtatgacacactaggccctgtattacagcttgttacacatttcataaaagggattttcattaaggagataatctattactacctaccttagtggctactagtataaaactatgacagatttagcaattaaatgaaatactggcctccatcaaataatcatagtaacaagaagcagcagttaccagacatctgatccccttcccccaaaatacccaaattcttcatggttctgcccttctctgtcctttctgctccccttgctcgcctgggaaatggaggaaaggccttccctctcacactgtcttgggatcttgctgagaattcagactgctcgaaacagtgacaaaccccagccatccagtcattcgtggagcacaatttggatgtggccccaggggcatctgtcccattcagagaaccttggcagtgcgatggccactgttcccaggcttcaacctcagtgaccccccccaacaactccccatggagagtccctgcccaaaaaagctgtaggatccaaggggtgtcaatagctcgttcccggcatcacctacacaccacaagcaggttttaatggaagcaagttgctccaccaaatccacaaaagggtaaagtttgtgatttttctttatcattgcgatcaccatctgaacgtaaggagtgcacttgtttggaagttctgacttctctgatctgtcttggtcgtttgtgttataaaaccaaagttctctacagactttatttttgtacaatatcattttgtaactttttacaaataaaaactcatttctattgaaaactg

SEQ ID NO: 32536 - DNA, 1449 bp, Homo sapiens
tcaaaggtgccaaagtatatgtgctcgcaaaatgcaaagaaaggtgacaaaaggaaatttgaattgggaacaagggtccatgcttttcaaagtattaaaaagttttttgccaggcaaaaatcacttactttacctttttaagaaaatttgtcattattttccccagatttcagcatttttcccaatttttatttgtggagcatctcaggcaagccccctttcctggagcagcgtgcagagaccactggcacttgactttatttcttccttgctccattgctgaacagaaatgtcgtgggctccacttcctgttgtctttaagctcttagtcccctccacgtatacctatctgtactatgcataaccatatgtagaaaaggttcagttccttttagtaggtagtcctggatttaatgctgacctaaaagtaatgtcgacaatgctgtcaggtagctgccgttctaccgactccctccatccctgcccacccactgccctcccgagaatatgctggctgcccagtgcagcccgggagacacaggggccttccagaggtagggtctaccaggtcccgtacaacccctgggctgtcaccgggggtcaacagctgctgctcctatatacccaaacacctgacagctccctggggagcagatggctgagaagggtgctgaggaagccatattgggaccagccacagccacacacatggagcctcatacttaggagcgtgctgcctttaaatgaaggtggtcggggccagtgcagcggctcacacccataatcccaacactttggaaagccaaggtgggaggatctcttgaacccaggagtttgagaccagcttgggcaacatagggagaccctgtctctacagaaactttaaaaattaggcaggcatgatggtgcacacctgtggtcccagctactcaagaggctgaaggaggatcacttgagtccagaaggtcgaggctgcagtgagctgtgatcatgccactgcactccagcctaagtgacagtgcggtaccctgtctcaaaaaaaaaaaaaaaaaaaaaaaaagggggtggggccggggggaacattggggggggaaaaggaccccccctcaggcccaaaatgggggatttttttgggcgccactttttttgcccttgggccctgtttacagcgtgggacccttttctaagggggttcctgaggggatactttgctacccacctgggggcttgttaaacttgacatttagcttatgaattgggcccctattatcctggtacggagcgcgctccgaattggtcctccccacaaccatttgggtcgcctggcttggcccgtccgaaggggagggcgcccagtggcctcgacaagcgccggaacccccctgcaagtgcgctcccacggggcgtctccccccgcgcgcggcgccctgtcgcgtgcggatggcgccg

SEQ ID NO: 32537 - DNA, 947 bp, Homo sapiens
tcggtaaccccgttgactttagaggattccccgtttccaaaaaaaaaaaaaaaaaaaaagaggttggagcaggaggaagcataggggcgggaacagccacctcctccatgccctagattgtgaatttatcgggcagccaacacatgtatgacacactaggccctgtattacagcttgttacacatttcataaaagggattttcattaaggagataatctattactacctaccttagtggctactagtataaaactatgacagatttagcaattaaatgaaatactggcctccatcaaataatcatagtaacaagaagcagcagttaccagacatctgatccccttcccccaaaatacccaaattcttcatggttctgcccttctctgtcctttctgctccccttgctcgcctgggaaatggaggaaaggccttccctctcacactgtcttgggatcttgctgagaattcagactgctcgaaacagtgacaaaccccagccatccagtcattcgtggagcacaatttggatgtggccccaggggcatctgtcccattcagagaaccttggcagtgcgatggccactgttcccaggcttcaacctcagtgaccccccccaacaactccccatggagagtccctgcccaaaaaagctgtaggatccaaggggtgtcaatagctcgttcccggcatcacctacacaccacaagcaggttttaatggaagcaagttgctccaccaaatccacaaaagggtaaagtttgtgatttttctttatcattgcgatcaccatctgaacgtaaggagtgcacttgtttggaagttctgacttctctgatctgtcttggtcgtttgtgttataaaaccaaagttctctacagactttatttttgtacaatatcattttgtaactttttacaaataaaaactcatttctattgaaaactg

SEQ ID NO: 32538 - DNA, 397 bp, Homo sapiens
aatagggtttcaccctgtcattgtcgtccttgttttctgagacagagtttttctctgtcgcccaggctggagtgcagtaacgtgatctagacccactgcaacctccgtcttcttggttcaagcgattctcctgcctcagcctcttgagtagctgggactacaagcacctgccaccacaccggctaatttttgtatttttagtggagatgaggtttcaccctgttgcccaggctggtcgcgaactcctgacctcaagtgatctgctgccctcagccttagagaataaacaactacataaccaccaagcaagcagctcaagaaacagaataagataagggcggtgagttaccagttccattcagtctgtgttggtcctagtcagtacagtaagacgtga

SEQ ID NO: 32539 - DNA, 342 bp, Homo sapiens
tataagggccagttcttgacatttaaatacttactgtatgtttaaagtatgctgtcaaacctactataaagcaacagtagtatataggggctgttatgttccctaaagaatggaatttttcatttactaagtcagccatagccttgccagacacctagagaatgaagcatctcttttggtggctcggttaatgtcctttgtggaaggagccagatggagtcgactgtgtgaagttagataaggcctaggtgcctaagaagtgggaccaagaccaagagaaagaaggaagtaggatgacagtttggtatgggaactaagataaccagtaggatggctgtgtag

SEQ ID NO: 32540 - DNA, 522 bp, Homo sapiens
cttaggatgtctttagttattttacatatttataacacagaaaaaaagtaagaagaaaaggaaaaatggtgtataatcttaagaccaggagataaccaataataaatattttgctataatttcttttcatattctatgcatatacattttatggaattgagttcacactgttcacataattttgctttctctattttgcctttacctttatcaataagcattttctttatatccttaaaatttctttattaacgtaacctaatacatatgcacaaaatgttacctaatcattcgcctgtttaagggcatttggtaatttccaatattttttccttcacgatttcgggtaatgtttaaataaaccaatttatggaaaagagctacctatgttggattacttgcttagaatgaattcctggaaatagaattactgggtcaaagggtaccaacatatttaatgtccccaaaggcatattggcaaattgccttccatacaaattataccaattccccctctgtaac

SEQ ID NO: 32541 - DNA, 350 bp, Homo sapiens
aatattactttcccttttaactttttattttgaagatttaaaaatatatagaaaagctgaatgtattgtgttcatgagcacaaaaatatccttaacattttgtcacatttgctttacatatatttaaaaattttattttgtgacctgatctcactctgttgcttaggctggagtggatcaaagcttggtgcagcctctaactcctgggctcaagcaatcctcctgaatgagcctcccaggtagctgggagactgaggtgggaggatcgctatctctaagttcttgagcctgggaggtgggggttgcagtgagctaagattgtgctaaaagtgacagaatgagatcctgcc

SEQ ID NO: 32542 - DNA, 408 bp, Homo sapiens
gtaagtttccaccttttacattaacagaatgaattgtgttcttctattgaaaccctgactggaagaggggttagagaatagatactgtttgtgggtgagaattgtattatttagaactttgcaattggctgggcacggtggctcatgcctgtaatcccagcactttgggaggccaaggcaggcagatcacccaaggtcaggagtttgagaccagcctggccaacatggtgaaaccctgtctctactaaaaatacaaaattagctgggcgtggtggtgcgtgcctgtcatgtcagctacttgggaggctgagccaagagaatcgcttgaacctgggaggtggaggttgcagtgagctgagattgagccactgcacttcagcctgggtgatagagcaagaccttgtctcc

SEQ ID NO: 32543 - DNA, 398 bp, Homo sapiens
ggacctcaaaaggaaagaattctgtgacttagatgaagcaacaaccccacagcatttgttacccacagaggtaagccaggactcagctttgtgctacaaaatccagaccatgtgcaagacggtcctgaaaggatatatggccccgaaagagagaaaagatgaaactccaacccgtgctttcattaggatgggtaggtttaatccaataagagatcacggtcagggtgccatgttggcttggtctctaaatccatcaggatgtgccctttccaccttcagttttccccacacagggtgggtgatgggtcacttaaagtttttgattcccagtccttcatggggagttcccgagggaaataagggcagggctcgtgacgtcctcgtacccttgttgtaca

SEQ ID NO: 32544 - DNA, 748 bp, Homo sapiens
tttaattattcctcatattcacaaccacttaaacatttaatagagtttttaaaaatccaaacaatgtgtatcttgtataattttattttcatttaaaattctattaccaaaaaagccaggttagccatttgcttataataaatcatgccttcttttaggaatttttagagtcagtttaatgggactcctgagttgacagctgtgcagtctgaattgccttagactctgaaaatgcttcagatttaaaatactaccaaccaacatggagtactgatcttcccacttgttgccaaagaggctagttaggaaaactagggacaggctgttctcttgcaattcaaaactgaacataaactgaaattgagagaaagtcatattaaatcctcatgtctgccatgtttgcagaggtcagctatacaaatatgaatgttaatttgaacttcaagaaaaggacactgctaaaatataatacatcttgaaaatgaagatgactctctacttgttttaatcagaacctcactgatatgtctcagggattaatttcatatatcatatccttaggctgagtgtgttggctcacacctctaatcctagcactttgggatgctgaggtaggagaattgtttcaggacaggagtttcagaccagcctggtcaacatggtgagctctcatctcaaaaagaaaaagaaaaaaagacccttcaagaactcagttttgtggtattaaaaactgagagagagatgttta

SEQ ID NO: 32545 - DNA, 698 bp, Homo sapiens
ctgttagtggattagcgagctcggtaatccggtctcctaaatgaacaaaaaagtagacgctttttgaggttgagcatatttcgattaaatcttggcttaggccctagatcaagggtttagatcagaataaaatgaaaattagtgttgcacgtacgcatattgcatcagaatcttgcagtgattgttttagtttcctgagttgcattgatagattcttttaaaatatgactgatttgcataactttagaagcagaatcattttcagtatatatggtgcacattgagggcaaaaagtagttttgttaatgtttaaacttaagttacctacaactttgaactgtatgtagaagttttgtagtttgaagtcaatagtgccataatataccttataaggcgttcttactagatctttgttatatttacctttttctctccctatggggtgatgtaggatagtgcttgaaatttgcacttcagtagcatttaatgttcagtgctcttgtcataaacatagaatggatattgagtagtttctgatcccagatggtaatgtgtaggttcaagggtattgtgtgtagcaagtgaagattgcagaaataaaacttcagttcatgcttgaaatttaagtattgttgtgatgccagaattgctgctcaccgtttttaggtttcaggtcctctgacaccttttggtatcgt

SEQ ID NO: 32546 - DNA, 421 bp, Homo sapiens
ttctgcagctgctctggtgggggagtgggaggccccaatcttggcaaaatagtgatatgggttttaatgcacacccagggcccaaagatgagggtttctgtttatgaatggtgaggagttagaaccaaaactatatacagccagggcccacaaagggctatacccttactaaaaagataggccagaaaaatatctttctactagcataggaagacaacagggagactgttcttgcctgagcatggaaagaagaaaaatgtctcctatgaagtcatgtgtgagctgggtctgtgcctcactccaatttgctatttatgtggtctatggggttagaaactctcaaccggtgacaccgctagtaaactagattttttcttaaaaaaaaagaaaatcttgcgggagggatataccttcagcccag

SEQ ID NO: 32547 - DNA, 344 bp, Homo sapiens
ttcagcttaagcccaggcccatcgttcacactctttgctgactctgccctctgagagttcttcctccgcccgcattttgtgtctttctagtgctgtgggttcccgggctgctttacatttgtttccacatattcctccatctgcattgcaagctctctgtgagaaagagctaaatctcatcagctttttgtgggggatggggacagggattctgtaaggtgtgtaggccagggactggggtaccaagggggggattgttgatggcaaggcacagcccccacttccttgctcaatgattttaccactccttggctggtctaggtttctttttctttttcttttct

SEQ ID NO: 32548 - DNA, 1248 bp, Homo sapiens
ctgataaggtctgttaggttagatataattgctattttattttaaatcacagcaaagttatttgtgttcacccttgggtttatttagaaaatacaaggttacaaagggcttccaaagatcattattagcagtaagaagattaccgaggaaaggaaaagtggtaaggaagtgggaagaaaaccgaagactgatgactgaataagatcttacatatttgcatagctcagaaatttgaatactatatccaggagtctatttttttttcaacttgtaaaaaatggtagtaaaatacaaaaaacataaaatgttctatcttaaccatttttaggagcacagttcagtgttattaaatatattcacaatgttgtgcaaccattaccaccatccatctccataactctgttcatcttataaaactgaaactatggccgttttaagtccccattgcccttcttcccagtaaccactattctattttgtctccatgattttggttactctatatacttcatgtcagtggaattacacagtatttatatttttgtggctgggttatttcacttagcataagtccttaggattcatgtaatgtgtagtatatatcagaatttccttcctttttaaggctaaataataatccagtgaatggaaatagcacattatgctaaagtattcactgctgatggacatttaggttgctacattttagctactatgaattatcattcagccaagcactgtggctcatgcttgcagtcccagctatgcaagaggttaaagcaggaagatcgcttgagtccaggatttcaaggccagcttgggcaacacagtgagacctcatctcttaaaactgtaataggcccacttgctccctcctgccatctggctgacatgaagaactggaggtggcagcagtggtagcctgcatctgaggctcatgggctgcaagcccctgctcgtgcaccatggatgattttgccaaagaaagtttcactgtagtggattatgtcttgttagaaaattgccctaatatgggtgactatgtcgttgctcctcaatttatgaccgacaattatgttcgtgtgactcagcttaactgggatggggtgggtacgcaataaaaagattacatctaagtgagagaaatttagcaattcttgtggttctgagataagtttgaagaaatcacaacatcttgagttgatagaagatactgtggatttggcaaagaaagttgctgtaagtggt

SEQ ID NO: 32549 - DNA, 929 bp, Homo sapiens
  misc_feature (512)..(512): n is a, c, g, or t
tgctatttcaaaacaattgactttaaaaaattatacttcacccacagagacaggtgttgttttgtaatggaaggagtagtaacttatgaatctagactcttaaaatcccagttctgatactttcataattgtgtgttttgagggcaagtgacttatctgaacttttttcttttttataacactggatgataattaaccctcaggattgtgaggatttaataactaagtcctgactcaaattatgttaccaataaatgctacttaaatgtaaagtccttgatttattttttcccctcagtcctgtttagtgttgaaattcttcaaaggagggtgagtctgggcatttacctgctattcaagagttttcaggaattcaaccccagccaaaatttttgggcccacatctcttgtcactggctttgctgtggtactaaagctccccaggacacacaaggaatcttctaggtcatgggtcaaactttttctgcaaaggggcacttacagtctattgncatattctttgtttttaagtgttcaagacatctgctgtttcctgaaatatgtccgtgtattttcaattccctttttcctgccctccctgggcatctcccagtttccctactgatgtgtcaaaactgagtttgtatgctacctcccaggaaagcagtctaatcttttgcaactctgttactgacttttgtggcattggattgggttatttgcttatggttgagacatcactggatcctttgatggattcataccaaaaccacaacatgtcatgagcatgcttgagagtgcatttgattccttgtttgtcagaccagtacattacagttggttcatttcttcccccgtgtgactgagtttcttgagggcgcggtctagcttccatctttgtatgtgtagcacctggtacatagagaaca

SEQ ID NO: 32550 - DNA, 551 bp, Homo sapiens
gtctgccctctctgctcgccctgcctagcttgaggatctgtcaccccagccatgaggattatcgccctcctcgctgctattctcttggtagccctccaggtccgggcaggcccactccaggcaagaggtgatgaggctccaggccaggagcagcgtgggccagaagaccaggacatatctatttcctttgcatgggataaaagctctgctcttcaggtttcaggctcaacaaggggcatggtctgctcttgcagattagtattctgccggcgaacagaacttcgtgttgggaactgcctcattggtggtgtgagtttcacatactgctgcacgcgtgtcgattaacgttctgctgtccaagagaatgtcatgctgggaacgccatcatcggtggtgttagcttcacatgcttctgcagctgagcttgcagaatagagaaaaatgagctcataatttgctttgagagctacaggaaatggttgtttctcctatactttgtccttaacatctttcttgatcctaaatatatatctcgtaacaagatgtctttg

SEQ ID NO: 32551 - DNA, 5090 bp, Homo sapiens
tccgcaattcgcctctgccacaggctgcaaaggacccgaggaaccgctctctctgaactgtgctgatgggcaggaggatgggagacaggaattgagagtcacagaggaaggacagtggagtctggcatcttattggtgtctttaaaggattgccatttaatgccattcaagatctactaagcatcatttttgcatgactactgcaaaaggattactttacagataccagttcctttgtcaagagcatactttggaccctgttttcagaaagcagggcactctttaatgaagaaacaccagagctgttaaacacattgagacacagaagattctagtgactgaggatggcttcctcttggaaactaatgctgtttctgtcagtcaccatgtgtctttcagaaagtgtggactatgggccagtttttgtgcaagaaccagatgatattatttttccaactgattctgatgaaaagaaggtagcattgaattgtgaagttcgtggcaatccagttcccagttacagatggcttcgaaatggaacagaaatagatctggaaagtgattatcgctacagtttgatagatggcaccttcattataagcaatccaagtgaagcaaaggattctggtcattatcagtgtttagcaaccaacactgtggggagtattcttagtagagaagctacactgcagtttgcctatctgggaaattttagtggccggacaagaagtgcagtctctgtgagggaaggccagggtgtcgttctgatgtgctctcctccgccacattcaccagagatcatctatagctgggtatttaatgagttcccttcctttgtggcggaagacagccggcggttcatctcccaggagacaggcaacctttatatttctaaagtccaaacatcagatgttggcagctatatttgtctggtgaaaaacacagtgacgaatgctagagtccttagtcctccaacgccactcactctgcgtaatgatggtgtgatgggagaatatgagccgaaaattgaggtccattttcctttcacggttacagctgctaaaggaacaactgttaagatggaatgctttgcacttggcaaccccgttccaacaatcacatggatgaaggttaatggttatattcctagtaaggcacgtctgcggaaatctcaggcggtgctggaaataccgaatgtacagctggatgatgcaggcatttatgagtgcagagctgaaaactcacgtggaaaaaattcctttcgtggacaattacaagtatacacctacccacactgggtagaaaaactgaatgatactcagttagacagtgggagccctctccgatgggaatgtaaggctactggaaaacccagacccacgtatcgttggctgaagaatggagtacccctctcacctcagagtagggttgagatggttaatggagtattgatgatccacaatgtgaatcaatcagatgctggaatgtatcagtgtttggctgaaaataagtatggagccatttacgctagtgctgagctgaagattctagcttcagctcccacttttgcactgaatcaactgaagaaaacaataattgttaccaaagaccaagaagttgtcatagagtgcaaaccccaaggctctccaaaaccaaccatctcttggaagaaaggagacagagcagttagagaaaacaaaagaatagctattcttccagacgggagtctacggatcctaaatgcttccaaatcagacgagggaaagtacgtttgccgaggggaaaacgtctttggttctgctgaaattatagcttcgctatctgtaaaagaacctacaaggatagaacttactcctaaaagaacagaattgacagtgggagaaagcattgtccttaattgcaaagcaattcacgatgctagtttggatgtcactttctactggactctgaaaggacagcctattgatttcgaggaagagggtggacattttgaaagcatcagggcccaagcatcctctgcagatttaatgatcaggaacatccttctgatgcatgctgggagatatggctgcagggtacagaccacagcagacagtgtgtcagatgaggcagaacttcttgttaggggacccccaggcccacctgggatagtaattgttgaggaaataaccgaaagtacggccacactgtcctggagcccagcagctgacaaccacagcccaatctcctcctacaaccttcaagctcgcagcccattttccctgggctggcaaacagtaaagacagtcccagaaatcataacaggggacatggagtcagccatggctgtggacctaaatccctgggtggaatatgaatttcgagtggtagccaccaaccctattgggacaggagatccaagcaccccatctcgaatgatccgcacaaatgaagcagttccgaagacagcacccaccaatgtaagcggaagaagtggaagaaggcatgagttagtcattgcctgggagccagtatctgaagagtttcagaatggggaaggcttcggctatattgtggctttcagacccaatggaacacgtggctggaaggaaaaaatggtgacatcctctgaagcttccaaattcatttatcgagatgaaagtgtccctcctcttactccctttgaagtgaaagttggcgtttataacaataaaggagatgggccttttagtcaaattgtggtcatctgttcagctgaaggagaacccagtgctgctcccacagatgtcaaggcgacaagtgtgtctgtgtcagagattcttgttgcatggaaacacattaaagagagtctaggaagaccacagggatttgaggttggttactggaaagacatggaacaggaagatacagcagaaacagtcaaaactagagggaatgagtctttcgtcatcctaacaggattagaaggaaatacgttatatcacttcacagtgagggcttacaatggagctggatatgggccacctagcagtgaagtgagtgcaaccaccaagaaatcccctcctagtcaagcacctagcaacctcaggtgggagcagcaaggctctcaggtttctctgggctgggaacccgtcataccattagccaacgaatctgaagttgtgggttacaaggttttttataggcaagagggtcacagcaacagccaagttattgaaacacagaaacttcaagcagtagtaccactcccagatgctggagtctatattattgaagttcgagcatatagtgaaggaggagatggaacagctagttctcaaattagggtaccatcatattcaggtggaaaaatcacaagtgcacagtcgacccttcactctctctccacatcttcgtcatcagtcaccttgctcttggcattgatgattccttcaacttcctggtgaaaactgctgacttaatttgcttttgtttgctttagcttggtaacagcggtgaatagagtgtagtgtaagtggagaaccaggatcctgagatgagcttgagctttaaaaacttgggactatacatggtgaacttacaggaggttaggggggaaatattacttatccatcaggtttctctttggtttttgtaaacggagaggacagttcttagtccagtaaaaatatgcagattgtatgtaatgaatttttgtaaacaaaggtaatttctgtcaaatgtattctttacttttttaatatgttgggattttattttatatctgatgactccgagtgtgtgccatccatttgttaagtaactggcctttagcagatctgtttcaaaaacaaatacaaaaatgagaatgaaaagtttgcttaagactaagtccagtgtttttcattttccctttggctgaatatttcaattgacaaaccagcaggacatatgaaaaatgcttcagtgatgtggtccattataagataagtacacaaaaattttcttgaaaaatattgtatgattgcatagtgaaatagcaagatttgtcaatatgctattctatatgcacccctagagcaagtcattagggtagggaataagccatttacattagtgcaagatagaaagcgagtccagatgaatttcagtgctatagtttttcataaagtactatgttatctagcagcaaatataataaatatttatttttaataacaaaagatggtttaacatcaccaaaaaatatgatcactaaaaactgcagacatgctggcatgggtgctaacttaaaaatgagatgaatatgggacagagcgtttccatttctttacctactgccaaaacagatgttgaattaggtccaaggttttcttctaattgcaaaattttgcaaaaattttaagggcaatgaaaatttgttgtgcaaataattatgcatagtctgtagattaaaatggttcaagtataacaaataagttttgatttttaaaaacagttccatgcatcacataccactgataaaatcaactagtaaaataaagacagtctttcttggataaattgaatttttaattaagctgtggaaacatggcatcagtacagggattcagctagtctagccagctatgcactgtttgattctgtggcttgggaagtaatccttatttgctatttcaaagagtcatcttgagcctgagagatcctagagagttgttggaaaatgagatgaaaattttctacttgatgatatcttaaagaagttctaacaagcacaagaatgtgccagagttggcatcatacccatgaagatgcgtgaaaggatagttattgcaaagtcatatgccagagaagagcctggagaaactatggttttataggcgatgttaacaagagaacaaaaattggttttataattttatataatttaaacttgttaactgtatttgcttcattaataacaagcaaaatgaaacaatatggagctcaaattgctagctctcaaggttaatccttgtagaatcagagaagtgattgaagtttctgttctgaacatcctgaaagaatagtttcagagccacagtaaaagtctgtatgtaggttacatattctctttggggaaatgatgtaag

SEQ ID NO: 32552 - DNA, 2420 bp, Homo sapiens
tccgcaattcgcctctgccacaggctgcaaaggacccgaggaaccgctctctctgaactgtgctgatgggcaggaggatgggagacaggaattgagagtcacagaggaaggacagtggagtctggcatcttattggtgtctttaaaggattgccatttaatgccattcaagatctactaagcatcatttttgcatgactactgcaaaaggattactttacagataccagttcctttgtcaagagcatactttggaccctgttttcagaaagcagggcactctttaatgaagaaacaccagagctgttaaacacattgagacacagaagattctagtgactgaggatggcttcctcttggaaactaatgctgtttctgtcagtcaccatgtgtctttcagagtattcaaaatctcttcctggtctctccacttcatatgctgctttgttaagaattaagaagagttcatcttcatctctctttggttccaaaaccagaccacgatacagcagcccttcattaggaacactgagtgcttcttcacccagctggctaggggcagctcagaattattattcccccatcaatctttatcattcctcagatgccttcaaacaagatgaaagtgtggactatgggccagtttttgtgcaagaaccagatgatattatttttccaactgattctgatgaaaagaaggtagcattgaattgtgaagttcgtggcaatccagttcccagttacagatggcttcgaaatggaacagaaatagatctggaaagtgattatcgctacagtttgatagatggcaccttcattataagcaatccaagtgaagcaaaggattctggtcattatcagtgtttagcaaccaacactgtggggagtattcttagtagagaagctacactgcagtttgcctatctgggaaattttagtggccggacaagaagtgcagtctctgtgagggaaggccagggtgtcgttctgatgtgctctcctccgccacattcaccagagatcatctatagctgggtatttaatgagttcccttcctttgtggcggaagacagccggcggttcatctcccaggagacaggcaacctttatatttctaaagtccaaacatcagatgttggcagctatatttgtctggtgaaaaacacagtgacgaatgctagagtccttagtcctccaacgccactcactctgcgtaatgatggtgtgatgggagaatatgagccgaaaattgaggtccattttcctttcacggttacagctgctaaaggaacaactgttaagatggaatgctttgcacttggcaaccccgttccaacaatcacatggatgaaggttaatggttatattcctagtaaggcacgtctgcggaaatctcaggcggtgctggaaataccgaatgtacagctggatgatgcaggcatttatgagtgcagagctgaaaactcacgtggaaaaaattcctttcgtggacaattacaagtatacacctacccacactgggtagaaaaactgaatgatactcagttagacagtgggagccctctccgatgggaatgtaaggctactggaaaacccagacccacgtatcgttggctgaagaatggagtacccctctcacctcagagtagggttgagatggttaatggagtattgatgatccacaatgtgaatcaatcagatgctggaatgtatcagtgtttggctgaaaataagtatggagccatttacgctagtgctgagctgaagattctagcttcagctcccacttttgcactgaatcaactgaagaaaacaataattgttaccaaagaccaagaagttgtcatagagtgcaaaccccaaggctctccaaaaccaaccatctcttggaagaaaggagacagagcagttagagaaaacaaaaggttagaatctattttataattcaagttcaacattagacttttttgaggttacaggtgacacacacaaactatgcaagaaagagtcttgcagtaccgtgagacgtattttatgaactgattgaaacatggttttgcctatatagtgattttaaaagaacccaaagtttgacttcaaaatggtcagtcttctttgactccatggggttttagcataagttggatatttcactaggttttgaagaaagtactctttaattaaactaattatttttgtttgtttttcatcttgcttctgcatttaggaggtctacaaatcatctgtgataatttttaagcattgtgttttaatttgattttaatacaaatgataaaaacatatgtgaatcttctggataatcatgacagaatactttcatgtgatatttatgccaatgcttgtctttttatccaggtcatatttaggcaaaatagtataggattatttttagtgccatag

SEQ ID NO: 32553 - DNA, 522 bp, Homo sapiens
tccgcaattcgcctctgccacaggctgcaaaggacccgaggaaccgctctctctgaactgtgctgatgggcaggaggatgggagacaggaattgagagtcacagaggaaggacagtggagtctggcatcttattggtgtctttaaaggattgccatttaatgccattcaagatctactaagcatcatttttgcatgactactgcaaaaggattactttacagataccagttcctttgtcaagagcatactttggaccctgttttcagaaagcagggcactctttaatgaagaaacaccagagctgttaaacacattgagacacagaagattctagtgactgaggatggcttcctcttggaaactaatgctgtttctgtcagtcaccatgtgtctttcagcattactgtcttccctgctgatctcagttgtttctcttttatcttctcaatgtcattttcctcttgaacttataagccaactgaaggagatggaggtagggttgcaagatgaaataaaggaca

SEQ ID NO: 32554 - DNA, 5312 bp, Homo sapiens
tccgcaattcgcctctgccacaggctgcaaaggacccgaggaaccgctctctctgaactgtgctgatgggcaggaggatgggagacaggaattgagagtcacagaggaaggacagtggagtctggcatcttattggtgtctttaaaggattgccatttaatgccattcaagatctactaagcatcatttttgcatgactactgcaaaaggattactttacagataccagttcctttgtcaagagcatactttggaccctgttttcagaaagcagggcactctttaatgaagaaacaccagagctgttaaacacattgagacacagaagattctagtgactgaggatggcttcctcttggaaactaatgctgtttctgtcagtcaccatgtgtctttcagagtattcaaaatctcttcctggtctctccacttcatatgctgctttgttaagaattaagaagagttcatcttcatctctctttggttccaaaaccagaccacgatacagcagcccttcattaggaacactgagtgcttcttcacccagctggctaggggcagctcagaattattattcccccatcaatctttatcattcctcagatgccttcaaacaagatgaaagtgtggactatgggccagtttttgtgcaagaaccagatgatattatttttccaactgattctgatgaaaagaaggtagcattgaattgtgaagttcgtggcaatccagttcccagttacagatggcttcgaaatggaacagaaatagatctggaaagtgattatcgctacagtttgatagatggcaccttcattataagcaatccaagtgaagcaaaggattctggtcattatcagtgtttagcaaccaacactgtggggagtattcttagtagagaagctacactgcagtttgcctatctgggaaattttagtggccggacaagaagtgcagtctctgtgagggaaggccagggtgtcgttctgatgtgctctcctccgccacattcaccagagatcatctatagctgggtatttaatgagttcccttcctttgtggcggaagacagccggcggttcatctcccaggagacaggcaacctttatatttctaaagtccaaacatcagatgttggcagctatatttgtctggtgaaaaacacagtgacgaatgctagagtccttagtcctccaacgccactcactctgcgtaatgatggtgtgatgggagaatatgagccgaaaattgaggtccattttcctttcacggttacagctgctaaaggaacaactgttaagatggaatgctttgcacttggcaaccccgttccaacaatcacatggatgaaggttaatggttatattcctagtaaggcacgtctgcggaaatctcaggcggtgctggaaataccgaatgtacagctggatgatgcaggcatttatgagtgcagagctgaaaactcacgtggaaaaaattcctttcgtggacaattacaagtatacacctacccacactgggtagaaaaactgaatgatactcagttagacagtgggagccctctccgatgggaatgtaaggctactggaaaacccagacccacgtatcgttggctgaagaatggagtacccctctcacctcagagtagggttgagatggttaatggagtattgatgatccacaatgtgaatcaatcagatgctggaatgtatcagtgtttggctgaaaataagtatggagccatttacgctagtgctgagctgaagattctagcttcagctcccacttttgcactgaatcaactgaagaaaacaataattgttaccaaagaccaagaagttgtcatagagtgcaaaccccaaggctctccaaaaccaaccatctcttggaagaaaggagacagagcagttagagaaaacaaaagaatagctattcttccagacgggagtctacggatcctaaatgcttccaaatcagacgagggaaagtacgtttgccgaggggaaaacgtctttggttctgctgaaattatagcttcgctatctgtaaaagaacctacaaggatagaacttactcctaaaagaacagaattgacagtgggagaaagcattgtccttaattgcaaagcaattcacgatgctagtttggatgtcactttctactggactctgaaaggacagcctattgatttcgaggaagagggtggacattttgaaagcatcagggcccaagcatcctctgcagatttaatgatcaggaacatccttctgatgcatgctgggagatatggctgcagggtacagaccacagcagacagtgtgtcagatgaggcagaacttcttgttaggggacccccaggcccacctgggatagtaattgttgaggaaataaccgaaagtacggccacactgtcctggagcccagcagctgacaaccacagcccaatctcctcctacaaccttcaagctcgcagcccattttccctgggctggcaaacagtaaagacagtcccagaaatcataacaggggacatggagtcagccatggctgtggacctaaatccctgggtggaatatgaatttcgagtggtagccaccaaccctattgggacaggagatccaagcaccccatctcgaatgatccgcacaaatgaagcagttccgaagacagcacccaccaatgtaagcggaagaagtggaagaaggcatgagttagtcattgcctgggagccagtatctgaagagtttcagaatggggaaggcttcggctatattgtggctttcagacccaatggaacacgtggctggaaggaaaaaatggtgacatcctctgaagcttccaaattcatttatcgagatgaaagtgtccctcctcttactccctttgaagtgaaagttggcgtttataacaataaaggagatgggccttttagtcaaattgtggtcatctgttcagctgaaggagaacccagtgctgctcccacagatgtcaaggcgacaagtgtgtctgtgtcagagattcttgttgcatggaaacacattaaagagagtctaggaagaccacagggatttgaggttggttactggaaagacatggaacaggaagatacagcagaaacagtcaaaactagagggaatgagtctttcgtcatcctaacaggattagaaggaaatacgttatatcacttcacagtgagggcttacaatggagctggatatgggccacctagcagtgaagtgagtgcaaccaccaagaaatcccctcctagtcaagcacctagcaacctcaggtgggagcagcaaggctctcaggtttctctgggctgggaacccgtcataccattagccaacgaatctgaagttgtgggttacaaggttttttataggcaagagggtcacagcaacagccaagttattgaaacacagaaacttcaagcagtagtaccactcccagatgctggagtctatattattgaagttcgagcatatagtgaaggaggagatggaacagctagttctcaaattagggtaccatcatattcaggtggaaaaatcacaagtgcacagtcgacccttcactctctctccacatcttcgtcatcagtcaccttgctcttggcattgatgattccttcaacttcctggtgaaaactgctgacttaatttgcttttgtttgctttagcttggtaacagcggtgaatagagtgtagtgtaagtggagaaccaggatcctgagatgagcttgagctttaaaaacttgggactatacatggtgaacttacaggaggttaggggggaaatattacttatccatcaggtttctctttggtttttgtaaacggagaggacagttcttagtccagtaaaaatatgcagattgtatgtaatgaatttttgtaaacaaaggtaatttctgtcaaatgtattctttacttttttaatatgttgggattttattttatatctgatgactccgagtgtgtgccatccatttgttaagtaactggcctttagcagatctgtttcaaaaacaaatacaaaaatgagaatgaaaagtttgcttaagactaagtccagtgtttttcattttccctttggctgaatatttcaattgacaaaccagcaggacatatgaaaaatgcttcagtgatgtggtccattataagataagtacacaaaaattttcttgaaaaatattgtatgattgcatagtgaaatagcaagatttgtcaatatgctattctatatgcacccctagagcaagtcattagggtagggaataagccatttacattagtgcaagatagaaagcgagtccagatgaatttcagtgctatagtttttcataaagtactatgttatctagcagcaaatataataaatatttatttttaataacaaaagatggtttaacatcaccaaaaaatatgatcactaaaaactgcagacatgctggcatgggtgctaacttaaaaatgagatgaatatgggacagagcgtttccatttctttacctactgccaaaacagatgttgaattaggtccaaggttttcttctaattgcaaaattttgcaaaaattttaagggcaatgaaaatttgttgtgcaaataattatgcatagtctgtagattaaaatggttcaagtataacaaataagttttgatttttaaaaacagttccatgcatcacataccactgataaaatcaactagtaaaataaagacagtctttcttggataaattgaatttttaattaagctgtggaaacatggcatcagtacagggattcagctagtctagccagctatgcactgtttgattctgtggcttgggaagtaatccttatttgctatttcaaagagtcatcttgagcctgagagatcctagagagttgttggaaaatgagatgaaaattttctacttgatgatatcttaaagaagttctaacaagcacaagaatgtgccagagttggcatcatacccatgaagatgcgtgaaaggatagttattgcaaagtcatatgccagagaagagcctggagaaactatggttttataggcgatgttaacaagagaacaaaaattggttttataattttatataatttaaacttgttaactgtatttgcttcattaataacaagcaaaatgaaacaatatggagctcaaattgctagctctcaaggttaatccttgtagaatcagagaagtgattgaagtttctgttctgaacatcctgaaagaatagtttcagagccacagtaaaagtctgtatgtaggttacatattctctttggggaaatgatgtaag

SEQ ID NO: 32555 - DNA, 1511 bp, Homo sapiens
tccgcaattcgcctctgccacaggctgcaaaggacccgaggaaccgctctctctgaactgtgctgatgggcaggaggatgggagacaggaattgagagtcacagaggaaggacagtggagtctggcatcttattggtgtctttaaaggattgccatttaatgccattcaagatctactaagcatcatttttgcatgactactgcaaaaggattactttacagataccagttcctttgtcaagagcatactttggaccctgttttcagaaagcagggcactctttaatgaagaaacaccagagctgttaaacacattgagacacagaagattctagtgactgaggatggcttcctcttggaaactaatgctgtttctgtcagtcaccatgtgtctttcagagtattcaaaatctcttcctggtctctccacttcatatgctgctttgttaagaattaagaagagttcatcttcatctctctttggttccaaaaccagaccacgatacagcagcccttcattaggaacactgagtgcttcttcacccagctggctaggggcagctcagaattattattcccccatcaatctttatcattcctcagatgccttcaaacaagatgaaagtgtggactatgggccagtttttgtgcaagaaccagatgatattatttttccaactgattctgatgaaaagaaggtagcattgaattgtgaagttcgtggcaatccagttcccagttacagatggcttcgaaatggaacagaaatagatctggaaagtgattatcgctacagtttgatagatggcaccttcattataagcaatccaagtgaagcaaaggattctggtcattatcagtgtttagcaaccaacactgtggggagtattcttagtagagaagctacactgcagtttgcctatctgggaaattttagtggccggacaagaagtgcagtctctgtgagggaaggccagggtgtcgttctgatgtgctctcctccgccacattcaccagagatcatctatagctgggtatttaatgagttcccttcctttgtggcggaagacagccggcggttcatctcccaggagacaggcaacctttatatttctaaagtccaaacatcagatgttggcagctatatttgtctggtgaaaaacacagtgacgaatgctagagtccttagtcctccaacgccactcactctgcgtaatgatggtgtgatgggagaatatgagccgaaaattgaggtccattttcctttcacggttacagctgctaaaggaacaactgttaagatggaatgctttgcacttggcaataaatacataaaagggagtgtaaagaagactgcttcactcaagaaggtctctgtttatcacttggtgtcctttctaagaaatgtcacaattatggaaaaaagaaacatcttatgaagatgtctaccctctacctaaagaccaatctgccacccttatgaaaataaactactggcctcgttggcctca

SEQ ID NO: 32556 - DNA, 361 bp, Homo sapiens
cgctaatgggtcattatggctaaacatagtctatcactggcgttactcatggtattggaaggaacttgaattccatatagatagtgtgatggagaaagtattttgggcattggcagtattaattcaaagaacaaaggacctgtctgtcatgtgtggagagccgtttccgcttgtttctttaaacgctatgggaaaagcagtcggccccgtgcactctgctggacagcttcagtctccacgtattggtttggccaattgtcattcgctgtcatcatggcagcagcagttgaagggacagcttgtcttgatttgcatttttgggtgtttgtgctatttatagacaattaagaaaagacatgga

SEQ ID NO: 32557 - DNA, 1095 bp, Homo sapiens
tcccccccaaaaatacttttcttgcttaatttactttcttggtaagagtgaatagaggctaagtgataatgccactacactgattaaatgacttactggcacaaaactattgaggcttaactagttgactgttttaataacatcattaaaatttcattttggtttattagagcacatccatgcaaagttggaatctaaccattctcatgtctccttataatgcctaggggatctttgaaacagtatttttgccaactcatactttctattttcattctgtaaagataaaacatgtaagtgaaaacgtttaacaaacattaagaaccttcttcgaccaggcactctccttcgctacaaaatttccacattacctatttttttattagccatttttgaactctcttccatttctaagtttctccctgcagctttcctgaacatgaagcatttccttttcttttcatttctagctttcctttctctgtacctcatgtacacttggaagcttcagggacttagcactggtcatgccagcctctacagatcacatctctgtctataattgggtctccatggtaatgagaagcagaaagtgctgaagtagcgcactatgtaaggactggcaagagaaaatactgtcgcggcctctacaggcatagcattgaatccccatggtgcccaagaagcccgagagaagcacgctgtggtgtagagcaggagactgaggacacggacttggcagatttattagcagcaatattctaagatgaaccaaatttaagagtttgtaagtgctcttttcaattggaaaagacctttgaaatttttttttcttttcttttaggaggccagatgctccagtgcctgatggcgaaagtgagaaaactgtagaagaaagttcagatagcgaatcttcttttagtgattaagcttaattttgataagaattacatatgcatgcataggggtacatttacattctgtaagagattgagcctgaactctcttagtcataaaaacatcaaatggccacatgtccactaccaagcttcttctatgttaaaaaaataataataaagcagttttaacctgcca

SEQ ID NO: 32558 - DNA, 863 bp, Homo sapiens
ggccccggaggcgggcacttggggggaaagttgagacgtgattaccgggttgggcgggccccatctgggaggggtttgtgggtgaactcggggtccaccgcccgctgaggagatggatgaggacgggcttcctctcatggggtcaggcatagacctgaccaaggtgccagctattcaacagaaaagaacggtggcttttctaaaccaatttgtggtgcacactgtacagttcctcaaccgcttttctacagtttgtgaggagaaactggcagacctttcacttcgtatccaacaaattgaaacaactctcaatattttagatgcaaagttgtcatctatcccaggcctagatgatgtcacagttgaagtatctcctttaaatgtcaccagtgtcacaaatggagcacatcctgaagccacttcagagcaaccacagcagaacagtacacaagactctggactacaggaaagtgaagtatcagcagaaaatatcttaactgtagccaaggatccaagatatgccagatatctcaaaatggttcaagtgggtgtaccagtgatggcaataagaaacaaaatgatatcagaaggactagacccagatcttcttgagaggccagatgctccagtgcctgatggcgaaagtgagaaaactgtagaagaaagttcagatagcgaatcttcttttagtgattaagcttaattttgataagaattacatatgcatgcataggggtacatttacattctgtaagagattgagcctgaactctcttagtcataaaaacatcaaatggccacatgtccactaccaagcttcttctatgttaaaaaaataataataaagcagttttaacctgcca

SEQ ID NO: 32559 - DNA, 947 bp, Homo sapiens
ggccccggaggcgggcacttggggggaaagttgagacgtgattaccgggttgggcgggccccatctgggaggggtttgtgggtgaactcggggtccaccgcccgctgaggagatggatgaggacgggcttcctctcatggggtcaggcatagacctgaccaaggtgccagctattcaacagaaaagaacggtggcttttctaaaccaatttgtggtgcacactgtacagttcctcaaccgcttttctacagtttgtgaggagaaactggcagacctttcacttcgtatccaacaaattgaaacaactctcaatattttagatgcaaagttgtcatctatcccaggcctagatgatgtcacagttgaagtatctcctttaaatgtcaccagtgtcacaaatggagcacatcctgaagccacttcagagcaaccacagcagaacagtacacaagactctggactacaggaaagtgaagtatcagcagaaaatatcttaactgtagccaaggatccaagatatgccagatatctcaaaatggttcaagtgggtgtaccagtgatggcaataagaaacaaaatgatatcagaaggactagacccagatcttcttgagaggccagatgctccagtgcctgatggcgaaagtgagaaaactgtagaagaaagttcagatagcgaatcttcttttagtgattaagcttaattttgataagaattacatatgcatgcataggggtacatttacattctgtaagagattgagcctgaactctcttagtcataaaaacatcaaatggccacatgtccactaccaagcttcttctatgttaaaaaaataataataaagcagttttaacctgccaaaaaaaacaggcaaaacaaagaaaccccccgggagagaccggcaaaagggcaggccccacaggcgggcgcggcccagtttgtcc

SEQ ID NO: 32560 - DNA, 488 bp, Homo sapiens
ttatttcgttcctactatctctctaaataatttaggatataaaattgactgaataaaaaccagtaagccaaggttttcacccttcgatttttataccagggcaagatggagaagtatctggaaagggactgtcccaggattactagcagaaagaagcaaatactcttatccccatagcccttatcatcaagctgaaaaataaagaacaaagcaacaagtaaacacacctatgaaagcaacttgtttgagctgtctcaacttctctgcagctgttctggctgtatctgtattctagtacttctttgaactctagagaaaagtttgttcatcaaaacctcatgaagtttaaaggtagtctattgccttttgtcctttttcaaaaatcttatttctttatttaaattgacaggtaaaaattgtatttttatgatgtacaacatgatgttttgatatatgaatacattgtggaatggccaaaccaagctatt

SEQ ID NO: 32561 - DNA, 409 bp, Homo sapiens
ggtacccactagtccacggttggctcaggtcacccggcagcagcagctctcgagagctgaggcacaaggcgggggccccatctgggaggggtttgtgggtgaactcggggtccaccgcccgctgaggagatggatgaggacgggcttcctctcatggggtcaggcatagacctgaccaaggtgccagctattcaacagaaaagaacggtggcttttctaaaccaatttgtggtgcacactgtacagttcctcaaccgcttttctacagtttgtgaggagaaactggcagacctttcacttcgtagccaaccgtggactagtagccaaccgtggactagtagccaaccgtggactagtagccaaccgtggactagtagccaaccgtgatagtagccaaccgtggactagt

SEQ ID NO: 32562 - DNA, 821 bp, Homo sapiens
ctctactgctacttgcccagcgtgcgccaccccgagaatggacgtcacattctggtctactgctaccactaccacaatgccgagcgaggaggcgggctctccggaagccgccgagtgattagtgccagctattcaacagaaaagaacggtggcttttctaaaccaatttgtggtgcacactgtacagttcctcaaccgcttttctacagtttgtgaggagaaactggcagacctttcacttcgtatccaacaaattgaaacaactctcaatattttagatgcaaagttgtcatctatcccaggcctagatgatgtcacagttgaagtatctcctttaaatgtcaccagtgtcacaaatggagcacatcctgaagccacttcagagcaaccacagcagaacagtacacaagactctggactacaggaaagtgaagtatcagcagaaaatatcttaactgtagccaaggatccaagatatgccagatatctcaaaatggttcaagtgggtgtaccagtgatggcaataagaaacaaaatgatatcagaaggactagacccagatcttcttgagaggccagatgctccagtgcctgatggcgaaagtgagaaaactgtagaagaaagttcagatagcgaatcttcttttagtgattaagcttaattttgataagaattacatatgcatgcataggggtacatttacattctgtaagagattgagcctgaactctcttagtcataaaaacatcaaatggccacatgtccactaccaagcttcttctatgttaaaaaaataataataaagcagttttaacctgcca

SEQ ID NO: 32563 - DNA, 983 bp, Homo sapiens
ggtacccactagtccacggttggctcaggtcacccggcagcagcagctctcgagagctgaggcacaaggcgggggccccatctgggaggggtttgtgggtgaactcggggtccaccgcccgctgaggagatggatgaggacgggcttcctctcatggggtcaggcatagacctgaccaaggtgccagctattcaacagaaaagaacggtggcttttctaaaccaatttgtggtgcacactgtacagttcctcaaccgcttttctacagtttgtgaggagacagggtctcactttgtcacccatgctggagtgtagtggagtgaacttagctcactgcagcctagacctcctgcctcagcgccccaagtagctggaactacagaaactggcagacctttcacttcgtatccaacaaattgaaacaactctcaatattttagatgcaaagttgtcatctatcccaggcctagatgatgtcacagttgaagtatctcctttaaatgtcaccagtgtcacaaatggagcacatcctgaagccacttcagagcaaccacagcagaacagtacacaagactctggactacaggaaagtgaagtatcagcagaaaatatcttaactgtagccaaggatccaagatatgccagatatctcaaaatggttcaagtgggtgtaccagtgatggcaataagaaacaaaatgatatcagaaggactagacccagatcttcttgagaggccagatgctccagtgcctgatggcgaaagtgagaaaactgtagaagaaagttcagatagcgaatcttcttttagtgattaagcttaattttgataagaattacatatgcatgcataggggtacatttacattctgtaagagattgagcctgaactctcttagtcataaaaacatcaaatggccacatgtccactaccaagcttcttctatgttaaaaaaataataataaagcagttttaacctgcca

SEQ ID NO: 32564 - DNA, 805 bp, Homo sapiens
ggccccggaggcgggcacttggggggaaagttgagacgtgattaccgggttgggcgggccccatctgggaggggtttgtgggtgaactcggggtccaccgcccgctgaggagatggatgaggacgggcttcctctcatggggtcaggcatagacctgaccaaggccagctattcaacagaaccgcttttctacagtttgtgaggaaactggcagacctttcacttcgtatccaacaaattgaaacaactctcaatattttagatgcaaagttgtcatctatcccaggcctagatgatgtcacagttgaagtatctcctttaaatgtcaccagtgtcacaaatggagcacatcctgaagccacttcagagcaaccacagcagaacagtacacaagactctggactacaggaaagtgaagtatcagcagaaaatatcttaactgtagccaaggatccaagatatgccagatatctcaaaatggttcaagtgggtgtaccagtgatggcaataagaaacaaaatgatatcagaaggactagacccagatcttcttgagaggccagatgctccagtgcctgatggcgaaagtgagaaaactgtagaagaaagttcagatagcgaatcttcttttagtgattaagcttaattttgataagaattacatatgcatgcataggggtacatttacattctgtaagagattgagcctgaactctcttagtcataaaaacatcaaatggccacatgtccactaccaagcttcttctatgttaaaaaaataataataaagcagttttaacctgcca

SEQ ID NO: 32565 - DNA, 1364 bp, Homo sapiens
ggccccggaggcgggcacttggggggaaagttgagacgtgattaccgggttgggcgggccccatctgggaggggtttgtgggtgaactcggggtccaccgcccgctgaggagatggatgaggacgggcttcctctcatggggtcaggcatagacctgaccaaggtgccagctattcaacagaaaagaacggtggcttttctaaaccaatttgtggtgcacactgtacagttcctcaaccgcttttctacagtttgtgaggagaaactggcagacctttcacttcgtatccaacaaattgaaacaactctcaatattttagatgcaaagttgtcatctatcccaggcctagatgatgtcacagttgaagtatctcctttaaatgtcaccagtgtcacaaatggagcacatcctgaagccacttcagagcaaccacagcagaacagtacacaagactctggactacaggaaagtgaagtatcagcagaaaatatcttaactgtagccaaggatccaagatatgccagatatctcaaaatggttcaagtgggtgtaccagtgatggcaataagaaacaaaatgatatcagaaggactagacccagatcttcttgagaggccagatgctccagtgcctgatggcgaaagtgagaaaactgtagaagaaagttcagatagcgaatcttcttttagtgattaagcttaattttgataagaattacatatgcatgcataggggtacatttacattctgtaagagattgagcctgaactctcttagtcataaaaacatcaaatggccacatgtccactaccaagcttcttctatgttaaaaaaataataataaagcagttttaacctgccagtatgtcttgttgctaaaataaagggcctcaaaatgaaaaataggataccctaaataaagtacaattagtgctccaaatactaagatagaatattttagagatgcaatgagcaattacagtcaggcacggtggctcacgcctgtaatcccagcactttgggaggccgaggcgagtggataacctgaggtcaggagttcaagaccagcctggccaacatggtgaaacctccatctctactaaaaatacaaaaagtagctgggcgtggtgacaaaaattagctgggcgtagtggcaggtgcctgtaatcccagctactcgggaagctgaggcaggagaatcacttgaacccagaaggtaaaggtttcagtgagctgagattgcgtcattgcactccagccatggcgacaagagtgaaactctgtcttaaaaataaaaagagatgcaatgagcaattttaaatgaagtcagtgtgagtttagtgatcaatagtagacccaatgc

SEQ ID NO: 32566 - DNA, 949 bp, Homo sapiens
ggccccggaggcgggcacttggggggaaagttgagacgtgattaccgggttgggcgggccccatctgggaggggtttgtgggtgaactcggggtccaccgcccgctgaggagatggatgaggacgggcttcctctcatggggtcaggcatagacctgaccaaggtgccagctattcaacagaaaagaacggtggcttttctaaaccaatttgtggtgcacactgtacagttcctcaaccgcttttctacagtttgtgaggagaaactggcagacctttcacttcgtatccaacaaattgaaacaactctcaatattttagatgcaaagttgtcatctatcccaggcctagatgatgtcacagttgaagtatctcctttaaatgtcaccagtgtcacaaatggagcacatcctgaagccacttcagagcaaccacagcagaacagtacacaagactctggactacaggaaagtgaagtatcagcagaaaatatcttaactgtagccaaggatccaagatatgccagatatctcaaaatggttcaagtgggtgtaccagtgatggcaataagaaacaaaatgatatcagaaggactagacccagatcttcttgaaaaaattaaaaaaagaaaaaaatgaagacagacaataacaagtgttgctgacggtgtggagaaattggaaccctcatacattgcaggaggccagatgctccagtgcctgatggcgaaagtgagaaaactgtagaagaaagttcagatagcgaatcttcttttagtgattaagcttaattttgataagaattacatatgcatgcataggggtacatttacattctgtaagagattgagcctgaactctcttagtcataaaaacatcaaatggccacatgtccactaccaagcttcttctatgttaaaaaaataataataaagcagttttaacctgcca

SEQ ID NO: 32567 - DNA, 752 bp, Homo sapiens
ggccccggaggcgggcacttggggggaaagttgagacgtgattaccgggttgggcgggccccatctgggaggggtttgtgggtgaactcggggtccaccgcccgctgaggagatggatgaggacgggcttcctctcatggggtcaggcatagacctgaccaaggtgccagctattcaacagaaaagaacggtggcttttctaaaccaatttgtggtgcacactgtacagttcctcaaccgcttttctacagtttgtgaggagaaactggcagacctttcacttcgtatccaacaaattgaaacaactctcaatattttagatgcaaagttgtcatctatcccaggcctagatgatgtcacagttgaagtatctcctttaaatgtcaccagtgtcacaaatggagcacatcctgaagccacttcagagcaaccacagggtgtaccagtgatggcaataagaaacaaaatgatatcagaaggactagacccagatcttcttgagaggccagatgctccagtgcctgatggcgaaagtgagaaaactgtagaagaaagttcagatagcgaatcttcttttagtgattaagcttaattttgataagaattacatatgcatgcataggggtacatttacattctgtaagagattgagcctgaactctcttagtcataaaaacatcaaatggccacatgtccactaccaagcttcttctatgttaaaaaaataataataaagcagttttaacctgcca

SEQ ID NO: 32568 - DNA, 1069 bp, Homo sapiens
ggtacccactagtccacggttggctcaggtcacccggcagcagcagctctcgagagctgaggcacaaggcgggggccccatctgggaggggtttgtgggtgaactcggggtccaccgcccgctgaggagatggatgaggacgggcttcctctcatggggtcaggcatagacctgaccaaggtgccagctattcaacagaaaagaacggtggcttttctaaaccaatttgtggtgcacactgtacagttcctcaaccgcttttctacagtttgtgaggagacagggtctcactttgtcacccatgctggagtgtagtggagtgaacttagctcactgcagcctagacctcctgcctcagcgccccaagtagctggaactacagaaactggcagacctttcacttcgtatccaacaaattgaaacaactctcaatattttagatgcaaagttgtcatctatcccaggcctagatgatgtcacagttgaagtatctcctttaaatgtcaccagtgtcacaaatggagcacatcctgaagccacttcagagcaaccacagcagaacagtacacaagactctggactacaggaaagtgaagtatcagcagaaaatatcttaactgtagccaaggatccaagatatgccagatatctcaaaatggttcaagtgggtgtaccagtgatggcaataagaaacaaaatgatatcagaaggactagacccagatcttcttgaaaaaattaaaaaaagaaaaaaatgaagacagacaataacaagtgttgctgacggtgtggagaaattggaaccctcatacattgcaggaggccagatgctccagtgcctgatggcgaaagtgagaaaactgtagaagaaagttcagatagcgaatcttcttttagtgattaagcttaattttgataagaattacatatgcatgcataggggtacatttacattctgtaagagattgagcctgaactctcttagtcataaaaacatcaaatggccacatgtccactaccaagcttcttctatgttaaaaaaataataataaagcagttttaacctgcca

SEQ ID NO: 32569 - DNA, 1105 bp, Homo sapiens
ctctactgctacttgcccagcgtgcgccaccccgagaatggacgtcacattctggtctactgctaccactaccacaatgccgagcgaggaggcgggctctccggaagccgccgagtgattagtgccagctattcaacagaaaagaacggtggcttttctaaaccaatttgtggtgcacactgtacagttcctcaaccgcttttctacagtttgtgaggagacagggtctcactttgtcacccatgctggagtgtagtggagtgaacttagctcactgcagcctagacctcctgcctcagcgccccaagtagctggaactacagaaactggcagacctttcacttcgtatccaacaaattgaaacaactctcaatattttagatgcaaagttgtcatctatcccaggcctagatgatgtcacagttgaagtatctcctttaaatgtcaccagtgtcacaaatggagcacatcctgaagccacttcagagcaaccacagcagaacagtacacaagactctggactacaggaaagtgaagtatcagcagaaaatatcttaactgtagccaaggatccaagatatgccagatatctcaaaatggttcaagtgggtgtaccagtgatggcaataagaaacaaaatgatatcagaaggactagacccagatcttcttgaggtgaagtaagaacatttatgatcataatatgcagagccaaatttctgttccccttgaaaatatgaatatcccgcctggaaatgatggtattgctaaaaattaaaaaaagaaaaaaatgaagacagacaataacaagtgttgctgacggtgtggagaaattggaaccctcatacattgcaggaggccagatgctccagtgcctgatggcgaaagtgagaaaactgtagaagaaagttcagatagcgaatcttcttttagtgattaagcttaattttgataagaattacatatgcatgcataggggtacatttacattctgtaagagattgagcctgaactctcttagtcataaaaacatcaaatggccacatgtccactaccaagcttcttctatgttaaaaaaataataataaagcagttttaacctgcca

SEQ ID NO: 32570 - DNA, 668 bp, Homo sapiens
ggtacccactagtccacggttggctcaggtcacccggcagcagcagctctcgagagctgaggcacaaggcgggggccccatctgggaggggtttgtgggtgaactcggggtccaccgcccgctgaggagatggatgaggacgggcttcctctcatggggtcaggcatagacctgaccaaggtgccagctattcaacagaaaagaacggtggcttttctaaaccaatttgtggtgcacactgtacagttcctcaaccgcttttctacagtttgtgaggagggcaagatggagaagtatctggaaagggactgtcccaggattactagcagaaagaagcaaatactcttatccccatagcccttatcatcaagctgaaaaataaagaacaaagcaacaagtaaacacacctatgaaagcaacttgtttgagctgtctcaacttctctgcagctgttctggctgtatctgtattctagtacttctttgaactctagagaaaagtttgttcatcaaaacctcatgaagtttaaaggtagtctattgccttttgtcctttttcaaaaatcttatttctttatttaaattgacaggtaaaaattgtatttttatgatgtacaacatgatgttttgatatatgaatacattgtggaatggccaaaccaagctatt

SEQ ID NO: 32571 - DNA, 541 bp, Homo sapiens
cgacacacgccggttgcgatagctagccctacctcttattcagcccccaagattttgtgtgtgtttatgtgtggtgctttttgcctgccaaaattcgtaccagtgagtctagagcctgttctcaaacttttgtgcacctctgtcatcttcggacaccccacccacagcttaggaaacaagttaatgactattcccagtccttcaagaaattcatatcacacagcaaagtgcctcgtgattatgtccaaatatgaaaagatttgcactgtgtacgttcctcctgtatgaaccatgtttgtttttacgtaacacaggtgccagctattcaacagaaaagaacggtggcttttctaaaccaatttgtggtgcacactgtacagttcctcaaccgcttttctacagtttgtgaggaggtaggtccggtgatactggtttatagagtcgcctggaaatcacctttcactgctgagactgacaaatggagtaaaacaagaattacagtctttattcatgtaccgtgacctctcatcacccaattgtg

SEQ ID NO: 32572 - DNA, 332 bp, Homo sapiens
aaatcaaaatctgccacgatttgaagcagccttcttgaaaataaaggttagtgggctgggcgctgtggctcacgcctgtaatcccaacactttgggaggccgaggcaggcggatcacgaggtcaggagtttgagagcagcctggccaatatggtgaaaccccgtctctactaaaaatacaaaaattagctgggcgtggtggcgtgcacctgtagtcccagctactcaggaggctgaggcagaagaatcgcttgaacctgggaggcagaggtggtagtgcagccgagatcgtgccactcgatccagcctcgggaccagagtaagattccatct

SEQ ID NO: 32573 - DNA, 432 bp, Homo sapiens
aaacacctcaaaggttattgaaattctgaatcattggatgcttggattctgccacaaaaaatggttggtcttgaaactaagatattagaccttatgatgccattttgaagctcactgtcttataaactgaggtgtcggctgcaaatgaggtgccagagatgtaacataattcttaatcatcatttctttttttgagacaagagtctcactctgtcgcccaggttaaagtgcagaggtatgatctcggctcactgcaacctccgcctcccgagttcaagcgattctcctgccccagcctcctgagtagctggaattacaggtgcctgctaccacgcccagctaatttttgtatgtttagtagagaccgggtttcaccatgttggccagactggtctcaaactcctgacctcaagtgatccatctacctccgcc

SEQ ID NO: 32574 - DNA, 390 bp, Homo sapiens
cacactctgaacaagagcaacctttccaccatgcagctccagtaatgctcccctgcacagaaaccctcagggactccccactgcacagaagggaatcatgcctttccaagaagaagcattcaaatcacatcaactatgtccaatgagcaacactgatatgactcccacgatatatactgaggagtttcatatatatttattcatttagatacatattattattactgttattatttttattgttatttttgagacagagtctcgctttgtcgcccaggctggaatgcagtggacaagtgtttgtgagttggacaagctttcgtaaagtcatgaaaacattgccagacaagatcagctataattaaagatgaattagaaaaaactccaaaa

SEQ ID NO: 32575 - DNA, 484 bp, Homo sapiens
tttttttgtatttttagtagagacggggtttcatcctgttagctaggatggtctcagtctcctgaccttgtgatctgcccacctcggcctcccaaagtgctgggattacaggtgtgagccaccacacccagacactattatatatttttaaaatatgacagattttaaaattgctttaatggacaatttacatatatacatacatagatacagattttggttcaagtggagaaaaatctaatagcaaatgtataaatacatcaattatgttttctcaagttttaagaaaatttgaatacttgttccctccaaaactcatgttgaaatttaaaccccattgtggcagtattgaaaggtggggccttttaagaggtgaatggaccatgagggctctgccctggtgaatgtattaatccattcttggattaatgtattaatggattaatgggttatcatgggagggaactggtgtctttataagaag

SEQ ID NO: 32576 - DNA, 596 bp, Homo sapiens
tacatggctaactggaaaaataaataaaggtaccatagaggaaaaacaaaattgccctgtggggagaacatgtggtgtcatatggtgtgactaaataggatccagtaagataagacaaggtagagcatcttgggagtgattccatgtttcaaggttaaaatgttaactacattaaaggtagtaaaccagtgaaagaatcctcaagatcccagtgcagaatgtttgccaagagataagaagatcaactgttttggtattcatagcagaaagccataggaaaattatctttttgatattcttttttgaagaagataggtcctttatttatttatttatttatttatttatttatttactttattttattttattttttgagatggagtttcgctcttgttccccagctggagtgcagtggtgcaatcttggctcactgcagcctccgcctcccaggttcaagcaattcttctgcctcagctacttgggtggcaattcaaggagaattgcttgaacccccgggaggcagaggttgcagtgagccgagatcgtgcctctgccctccaacctgggtgacagagcaagactccatctcacaa

SEQ ID NO: 32577 - DNA, 795 bp, Homo sapiens
agacaacttagtcatctttaaattatgaagacttaaagctatggcatagtaccttaaattctggtcagtattgatctgcagctaatgatgatgtcacctccacaaatcagacatgggtgctttacagagctacttacaggcaacttctggccctgacttagccttagctctcttgcccaacccccctacacacacatgctttgttgccctaaatttatgaatctacacataggactcctcaactaagtctacatgtggctgatagcagaaggcagcactgttgcacaaacaggaactctgagttcaagcaatactctgcccaagaatttgaaattgttgatgcagaaagagaaaagagcaagcaagaagaaagaaaagaaaagaagaagagtcttcacttgttaatgctccatcttgctttctttgaggtgctcctaatgccttcagaaggcagaagatttatagatctgaagagaaacaacaggatccctgatgccttcaagatattgcatctcggccaggcatggtggctcacatctgtaatcccaggagtttgggaggaccacacagacacgttgcaaggtcaggagatacagaccatcctggccaacattgcgaagccccgtctctactaaaaatataaaaattagctgggtatggtggcatacacctgtagtcccagctacatgggaggctgaggcaggagaatcgcttgaacccgggaggcagaggttgcagtgagccaagatcgcaccactgcattccagcctgtcgacaaagcgagacttgtctcag

SEQ ID NO: 32578 - DNA, 311 bp, Homo sapiens
gtacacatcaacaataccaccctgtttgctgtactgggtatacagaaattattgggcagatgccctcttgaagtccttacatttgatccttatagatggatcacagatgaaagttcaagatgctattttaagagtgaaaatacaagagaatcaaatttgacccacctagacttgaaatgaagatactgatttccacaatgtctgtgtagtttgagacgaagaaacatccagaagagattggaaaaaagagaaagaactgtagagaaatccttctaacctacgaattagggaaggtgggtagttggtgaatt

SEQ ID NO: 32579 - DNA, 423 bp, Homo sapiens
tttgaataagctgattaaaaaaaacccctgctgttataaaaccataaagccctggctcagattttatttcagctctatgtaataataatttctgtttcaactcataatttaatgcaggtgaaaaatctaaatttttatgatgttgttctggattttatattaatggactcctttgaagatttggaaaacccacccacatccatacagaatgtagtaaataatcgatggctaaactcatccttcaaagaaacagtaagtggtggttaacctttctcagccttttaagtttgattaaaaagtgaggctgggcgcagtagctcacgcctgtaatcccagcactttgggaggccaaggcaggcggatcacctgaggtcaggagtttgagaccagcctggccaacatggtgaaaccccatctctacta

SEQ ID NO: 32580 - DNA, 407 bp, Homo sapiens
gctgtactctttccaccatctctcagttgtttttttatattactcactttctttgccttttatttaaaagtgggaaaaatatttagaattttaacattagaatttaatttgttctgtgtactttttctctccttgtaggatattattagtactgaatttatccataaactcgaagctctgctgcaaagagcctatcgtctccaagaggagtttgaagctacccttggggcatctgatcctaattcccttgctgatgatattggtaagatggatatttcatatggcttttatgaaatgtttacttttcttttatatccttggaatcatctgcataagtgtctgtcttatgtaataataggttacttaaaaaaaaataaactagccaagagaaaaaatttttatcatat

SEQ ID NO: 32581 - DNA, 1047 bp, Homo sapiens
gctgtactctttccaccatctctcagttgtttttttatattactcactttctttgccttttatttaaaagtgggaaaaatatttagaattttaacattagaatttaatttgttctgtgtactttttctctccttgtaggatattattagtactgaatttatccataaactcgaagctctgctgcaaagagcctatcgtctccaagaggagtttgaagctacccttggggcatctgatcctaattcccttgctgatgatattgataaagatacagatatcaccatgaagggtaatgtggaagactttggcctgcgagacaccttgagcatcgcatccacggattcctttgcttccgcagcagagcttgcagaacacagagaagtacggcatacctacagcctggagtccctttgtcactgcccattttacgaggaagccatgcatttagttgaagaaggaaaaatttactccagagtactgagaactgaaatgttggagtgcctaggagacagtgattttcttgccaaacttcactgtattcgacaggcttttcaggtaattctttcagaatcagctaacaggatattcctcgctgagagcggaaggaaaattttatcagctttaattgtgaaagcacgaaagaatccaaagaagtttgaagatgtttttgatgaaatgatctattttttagagcagaccgatcactggggtagtactgaaatggaacttgctgctagaggggtgaaaaatctaaatttttatgatgttgttctggattttatattaatggactcctttgaagatttggaaaacccacccacatccatacagaatgtagtaaataatcgatggctaaactcatccttcaaagaaacagtaagtggtggttaacctttctcagccttttaagtttgattaaaaagtgaggctgggcgcagtagctcacgcctgtaatcccagcactttgggaggccaaggcaggcggatcacctgaggtcaggagtttgagaccagcctggccaacatggtgaaaccccatctctacta

SEQ ID NO: 32582 - DNA, 822 bp, Homo sapiens
ggcatcgtctcggtggagacagacctgctgcagtggtgcctggagtcgggcagcatccccatcctgtgccccatcggggagacggccgcgcgccgctccgtgcttctcgactccctggaggtgaccgcgtcgctggccaaggcgctgcggcccaccaaaatcatcttcctcaataacacaggcggcctgcgcgacagcagtcataaggtcctgagtaacgtgaacctgcccgccgacctggacctggtgtgcaacgccgagtgggtgagcacaaaagaacggcagcagatgcggctcatcgtggacgtgctcagccgcctgccccaccactcctcggccgtcatcaccgccgctagcacgctgctcactgagctctttagcaacaagggtgagggcggtgggcgggcgggggactgggtcccgggagtgagtactggccggggctgggtgtctgcggtcaggaggagcggcttctcctcctgtccaggagccgtagggggaggcggggggtgtcacagcaatggctcctgctgctgccgaaacccgggggaggtgagagaggaggagacccagtgtactggaagggaactccgaaggaattaaaggaatgggcgggactaggggggagaaggaggggccccccggtgggcggggccaggggcgggaccataagggaggtgttcgaccaggagagatgggcggggcttaggtgggtgggccgggtcagcggcgggagacagacttcaaggagcgaggcaagactaacggaagtgggtggggctccaggcgacaggaggaacttggggcacaatctctgcctgg

SEQ ID NO: 32583 - DNA, 2233 bp, Homo sapiens
ggcatcgtctcggtggagacagacctgctgcagtggtgcctggagtcgggcagcatccccatcctgtgccccatcggggagacggccgcgcgccgctccgtgcttctcgactccctggaggtgaccgcgtcgctggccaaggcgctgcggcccaccaaaatcatcttcctcaataacacaggcggcctgcgcgacagcagtcataaggtcctgagtaacgtgaacctgcccgccgacctggacctggtgtgcaacgccgagtgggtgagcacaaaagaacggcagcagatgcggctcatcgtggacgtgctcagccgcctgccccaccactcctcggccgtcatcaccgccgctagcacgctgctcactgagctctttagcaacaaggggtccgggaccctgttcaagaacgccgagcgaatgctacgggtgcgcagcctggacaagctggaccagggccgtctagtgtacctggtcaacgccagcttcggcaagaagctcagggacgactacctggcctcgctgcgcccgcggctgcactccatctacgtctccgaggggtacaacgccgccgccattctgaccatggagcccgtcctggggggcaccccgtacctggacaaatttgtggtgagctccagccgccagggccaaggctccggccagatgctgtgggagtgcctgcggcgggaccttcagacacttttctggcgctcccgggtcaccaaccccatcaatccctggtacttcaaacacagtgatggcagcttctccaacaagcagtggatcttcttctggtttggcctggctgatatccgggactcctatgagttggtcaaccacgccaagggactgccagactcctttcacaagccagcttctgaacccaggcagctgaccttcaccatggacactacaggccctggaatggccagggtggaccaaaagccatgccagctgggcatgaccccaggcagccagccacaggctgaagggggcttgttggctgagtgatctgcagaggagaaagcagccccagctctgcccagaggaggcgctgaagtgggacaagcacaggaaagaaggggaccagtctaggaccccaacttgactcactctaaagctacaaccaaatggccttcgattttcaacctggggattaggggaggggagggtgccttccagggctctactcaggactaaccctaagggtgagctagtttctgtgcctctgtgctatgttttgaggctcccttacccaaaataatacccctgcctgcgtgatattctaccattcattttaattcctttgggtcttgcagtttttcaggaggccttgattaaaatgcaaatacttgtctgagagtcagcttacacttgaaagaaaattagaagtgaccccgtgggagcaagatttttttttttttttttaagacaggatcttgctctgttaccaaggctagagtacagtggtgcaatcacagctcactgcagccttgacctcccaggctcaagcaatcctcccatgtcagcctcctaaataagctggtaccacaggcatgcaccgccacacctggatcttttttttttggtagagacgaggtctcactatgttgccaaggctgctctcaaactcctgggctcaagcaatcctccctgcttggcctcccaaaatgctaggattacaggctgggagcaagatcttgagggctggggaatcaggggactcctggagggagtagaagacttctatgatgaatgctgccaccatctccctcccagagattaggaagcatcctcccttccacagaccaggccacagcagccccagctccccttgcctgtgagtgcctccacccacagctccctttctaggctgggctcacagccagacccaggcatcagtggcggaccgtttacctgcaagagcccagagaagttaaaagatggctttggcttaaaagctcaaactttgggaaccgttttttcccccccttaagggcccccttaacctaaggttggggttggttggttcccaggttcttccttaaccaggggaacttccgaatgggggcagaaaaaaatttccaaaatacgccccccccaggcgcgggatctctactaccattttgtgaaacacatattttctctctgtagaaagcctctccccaataacgtgtctacgacaagggacagcccaaataacgcggacgtggcgtgcgtgggggtgacc

SEQ ID NO: 32584 - DNA, 318 bp, Homo sapiens
aaatgagataacacacagcaggaccaagctgggtgcccagcatgcagtaggtcctcaatcaatgttttttaaagacagaaccagtgagtaatgaacactggccttgccctaaaaactgtttcctacatcacctccccacacccaggtacttcaaacacagtgatggcagcttctccaacaagcagtggatcttcttctggtttggcctggctgatatccgggactcctatgagttggtcaaccacgccaagggactgccagactcctttcacaagccagcttctgaacccaggcagctgaccttcaccatggacacta

SEQ ID NO: 32585 - DNA, 421 bp, Homo sapiens
aagccagcttctgaacccaggcagctgaccttcaccatggacactacaggccctggaatggccagggtggaccaaaagccatgccagctgggcatgaccccaggcagccagccacaggctgaagggggcttgttggctgagtgatctgcagaggagaaagcagccccagctctgcccagaggaggcgctgaagtgggacaagcacaggaaagaaggggaccagtctaggaccccaacttgactcactctaaagctacaaccaaatggccttcgattttcaacctggggattaggggaggggagggtgccttccagggctctactcaggactaaccctaagggtgagctagtttctgtgcctctgtgctatgttttgaggctcccttacccaaaataatacccctgcctgcgtgatattcta

SEQ ID NO: 32586 - DNA, 1368 bp, Homo sapiens
cgtagtttcgatgccggaacgtgcaggttgcgaatccccgtaggcgagcgagcggctaggttcgtgatctggagagacgctcagattattaagttcctgcaacttaactgggaactgatcaagatttcaagctaaagatggtggtgatgaacagcctgagggtcattcttcaagcctctccaggcaaattgctgtggagaaagttccagattccgagattcatgccagcgaggccctgcagcctctatacttgtacttacaaaacccggaaccgagccttgcatccactctgggagagcgtggacctggttcctgggggcgatcgccagtcacccatcaacattcggtggagggacagtgtttatgatcccggcttaaaaccactgaccatctcttatgacccagccacctgcctccacgtctggaataatgggtactctttcctcgtggaatttgaagattctacagataaatcatgatcaagggaggacccctggaacacaactaccgattgaagcagttccattttcactggggggccatcgatgcctggggttctgagcacaccgtggacagcaaatgcttcccagcagagctgcacttagtgcattggaacgcagtcaaatttgaaaactttgaggatgcagcactggaagaaaatggtttggctgtgataggagtatttttaaagctaggcaaacatcataaggagctacagaaattagtggatactttgccgtcaattaagcataaggacgcccttgtggaatttgggtcatttgacccttcctgcctgatgcctacctgcccagattactggacctactcagggtctctgactaccccacccctctccgagtctgtcacctggatcattaagaagcaaccagtagaggttgatcatgatcagcttgagcaatttcggaccctgcttttcacttccgaaggggagaaagagaaaagaatggtggacaacttccgcccccttcagccactgatgaatcgcactgttcgttcatccttccggcatgattatgtgctgaatgtacaagcaaaacccaagccggccaccagccaagcaaccccctaaaacattcatatctaggcagtattttgcttttgctttaatatatactagcttactataaattgttaactagactattctaagtgcctgcatttgataatatttacagatgtgcatttcttagcatgagagtgcttcatcagtctttgaggaaggctattcggtaccagcaagagacacaagtttctcttacagatacctgttggtaattgtaatgcctttttttttttctttaagagactaggtctagcctgggcaatgagagtgaaactcttatctca

SEQ ID NO: 32587 - DNA, 682 bp, Homo sapiens
gggcttcattctggaaactttgttagggctgcttttcttaagtgcccacatttaacgaaggctggaaatgggtgtattcaaaaccctttaaaatccttaagggagttttgctatagaatctcaggataaagacagactccgacaatattcatccagaaattttcatgtaagtcagttgtttgaaacttgggatttatttttctcttagaaactaagtctaagtggtggttactacatcagcacacaaaatcctgtttaattcataaactaaactgtaataataactgcgtttacttgttcatattgggtttttattgactaaaagcttccagcctctttttcatgcagccaggataacagtgataccaaaacctatcaaagattagaccatcctacccccaaaatataacaataggccaatatctctaaaaaatatgtaacaacagaaaaaaaagctaaataaaatagtagaaatagaatctagcagtgcattagaagaaatatatactttgtccaggtagggtttattccagtaatccacagatggttcagtactaagaatgatatacttacaattaatggatttcatcccatcaacaaatctatatgatcatttccatggatttcctaaaatacgttagacaaaacccaccatccctttaaaaatttttttaataaaaca

SEQ ID NO: 32588 - DNA, 515 bp, Homo sapiens
tcacgtgttaaccctcttttcatggtgtttcagctgcacttagtgcattggaacgcagtcagatttgaaaaccttgaggatgcagcactggaagaaaatggtttggctgtgataggagtatttttaaagctaggcaaacatcataaggagctacagaaattagtggatactttgccgtcaattaagcataaggtactatttgttttccttaattacttgaaatatacttttatgtttcaatctcagagcggagacattaccaaggcactttgaattgggaagtttaattaggtgaactgtattcagccttagaagaaaacttgccatttatgattccaggggacagaagtcatcattctgtgggtaggcagtgagctttctggttttgctgcagtgccgctgaggacttggggactcaggaacatattgctgtcccctcctctgttcctgacaccggctccttctaagtccttgtgaacacacccagagcagccttctgttctgtagctgccatc

SEQ ID NO: 32589 - DNA, 407 bp, Homo sapiens
ggtaaaaaaaaaaaaaaaaaaaaaaaaaaaaaagcattgcggccgcctgctgccctgacgcctcaggcttgcctgcacctggaaggagcttcgccaggtgggccatgagcctctgagcacacccagcctgctgcccggctccaagagtcaggcccctgccaccacctcctgagcctccagccctcagcaccttcaccctactgaccgcggttctacccccacaccagccaccggccccaccggggcacttcccactgctccagccgaccactcagcgagccccaggcccacctctcctctcccttaaagcccttcccttgcccttgcccattcgctcctgccttctccctggggacaggaggcatgcttctccccagtttccgcaataaaatatttgttgttaataa

SEQ ID NO: 32590 - DNA, 409 bp, Homo sapiens
gcagcttttctggcaaaccggcttggggccttccagtagaccactggggctgccagaagtttccgtaatctgatttatctgtagaatcttcaaattccacgaggaaagagtacccattattccagacgtggaggcaggtggctgggtcataagagatggtcagtggttttaagccgggatcataaacactgtccctccaccgaatgttgatgggtgactggcgatccgcccccaggaaccaggtccacgctctcccagagtggatgcactgagccagaacctcctcgttcgctcccggtacccgaggatcccgcacgcggccatcttggccacgccccctcacgtttagccacgtcccccttccattctctcggaacaggcaagacccctctggtccgcgtcacttttc

SEQ ID NO: 32591 - DNA, 1316 bp, Homo sapiens
gctaaacgtgagggggcgtggccaagatggcgcgtgcgggatcctcgggtaccgggagcgaacgaggaggttctggctcagtgcatccactctgggagagcgtggacctggttcctgggggcgatcgccagtcacccatcaacattcggtggagggacagtgtttatgatcccggcttaaaaccactgaccatctcttatgacccagccacctgcctccacgtctggaataatgggtactctttcctcgtggaatttgaagattctacagataaatcagctgcacttagtgcattggaacgcagtcaaatttgaaaactttgaggatgcagcactggaagaaaatggtttggctgtgataggagtatttttaaagatttcggaaacttctggcagcccagtgtctactggaaggcccaagccgcttgccagaaagctgcgccccgcccaaaagcactgggttctgcagtccaggcccttcctcagctcccaggtccaggagaactgcaaggtcacctacttccacaggaagcactgggtccgcatccggcccctccgcaccactcctcccagctgggactacacccgcatctgcatccagagagagatggtccccgcccgcatccgcgtcctgagagagatggtccccgaggcctggaggtgctttcccaacaggctgccgctgctgagcaacatcaggcctgatttctccaaggctcccctggcctacgtgaagcggtggctttggaccgcccgccacccccacagcctgtccgcagcctggtgaccgtgaaaatcgccccgccagagagcagaggaagcccgacgcccaggccatctgccttcaggtctgtgatgagaaacggagtggcctgttccgttgtgcccaggtctaggccgctgagcagagccctcactcccaggcagagttgtctgaatccttcctggcggccgcctgctgccctgacgcctcaggcttgcctgcacctggaaggagcttcgccaggtgggccatgagcctctgagcacacccagcctgctgcccggctccaagagtcaggcccctgccaccacctcctgagcctccagccctcagcaccttcaccctactgaccgcggttctacccccacaccagccaccggccccaccggggcacttcccactgctccagccgaccactcagcgagccccaggcccacctctcctctcccttaaagcccttcccttgcccttgcccattcgctcctgccttctccctggggacaggaggcatgcttctccccagtttccgcaataaaatatttgttgttaataat

SEQ ID NO: 32592 - DNA, 1570 bp, Homo sapiens
ggacagaaatggcattagtgtttagagaagattatgtatatatggctgtatgaacactgaaaattatgagggtcaacataaaatcagcattacaggtactaaaacataaatcctgatggctttcaccgttttcttaagagcaaaattgcaaaaagtgatattaacagtcatcctagacgaatatgagcaaatgatttgtttttccttaaaagagcctccaagtgtattgtgatcattttcacactgatcaaagagagcacccttctgtcaacaggtatctgcagttttcaggacctggcagaaattcttctatgttctgcctttaaaggtcaggtacaaaagcagagacagctgccaggcccctctgcccagagctaagtgtctgggaccatgagtgggaaggactgaggcttgagcctccttggtcctccagacagcatggggcgctacttgccccttctgcagctgcgcgcggcaaagctgtggcctggccgtggcctcctgccccatgcaacagttggtggacagaccgtacctggcacacggcgccttgtgcactttccaacattttgatgctaaccgtcgctagtcactgagccctgacatttgatctctggccttgaccgcagatttcggaaacttctggcagcccagtgtctactggaaggcccaagccgcttgccagaaagctgcgccccgcccaaaagcactgggttctgcagtccaggcccttcctcagctcccaggtccaggagaactgcaaggtcacctacttccacaggaagcactgggtccgcatccggcccctccgcaccactcctcccagctgggactacacccgcatctgcatccagagagagatggtccccgcccgcatccgcgtcctgagagagatggtccccgaggcctggaggtgctttcccaacaggctgccgctgctgagcaacatcaggcctgatttctccaaggctcccctggcctacgtgaagcggtggctttggaccgcccgccacccccacagcctgtccgcagcctggtgaccgtgaaaatcgccccgccagagagcagaggaagcccgacgcccaggccatctgccttcaggtctgtgatgagaaacggagtggcctgttccgttgtgcccaggtctaggccgctgagcagagccctcactcccaggcagagttgtctgaatccttcctggcggccgcctgctgccctgacgcctcaggcttgcctgcacctggaaggagcttcgccaggtgggccatgagcctctgagcacacccagcctgctgcccggctccaagagtcaggcccctgccaccacctcctgagcctccagccctcagcaccttcaccctactgaccgcggttctacccccacaccagccaccggccccaccggggcacttcccactgctccagccgaccactcagcgagccccaggcccacctctcctctcccttaaagcccttcccttgcccttgcccattcgctcctgccttctccctggggacaggaggcatgcttctccccagtttccgcaataaaatatttgttgttaataat

SEQ ID NO: 32593 - DNA, 1713 bp, Homo sapiens
taggtggcagcgacttggagtcagaatcccactgggaatcctttaactgggagcagtatttcgtttagctcagtttcataatggagaacagctgttcgcagatgtaggtgctcccgaacatggaaagaatctttgcgcaatggtgcttgtatttcgggtagctaccccagaggtacttgtagaattctggtattcccaccttgtcgtatttcgtcttcaggaccgtgttgcattacaggtactaaaacataaatcctgatggctttcaccgttttcttaagagcaaaattgcaaaaagtgatattaacagtcatcctagacgaatatgagcaaatgatttgtttttccttaaaagagcctccaagtgtattgtgatcattttcacactgatcaaagagagcacccttctgtcaacaggtatctgcagttttcaggacctggcagaaattcttctatgttctgcctttaaaggtcaggtacaaaagcagagacagctgccaggcccctctgcccagagctaagtgtctgggaccatgagtgggaaggactgaggcttgagcctccttggtcctccagacagcatggggcgctacttgccccttctgcagctgcgcgcggcaaagctgtggcctggccgtggcctcctgccccatgcaacagttggtggacagaccgtacctggcacacggcgccttgtgcactttccaacattttgatgctaaccgtcgctagtcactgagccctgacatttgatctctggccttgaccgcagatttcggaaacttctggcagcccagtgtctactggaaggcccaagccgcttgccagaaagctgcgccccgcccaaaagcactgggttctgcagtccaggcccttcctcagctcccaggtccaggagaactgcaaggtcacctacttccacaggaagcactgggtccgcatccggcccctccgcaccactcctcccagctgggactacacccgcatctgcatccagagagagatggtccccgcccgcatccgcgtcctgagagagatggtccccgaggcctggaggtgctttcccaacaggctgccgctgctgagcaacatcaggcctgatttctccaaggctcccctggcctacgtgaagcggtggctttggaccgcccgccacccccacagcctgtccgcagcctggtgaccgtgaaaatcgccccgccagagagcagaggaagcccgacgcccaggccatctgccttcaggtctgtgatgagaaacggagtggcctgttccgttgtgcccaggtctaggccgctgagcagagccctcactcccaggcagagttgtctgaatccttcctggcggccgcctgctgccctgacgcctcaggcttgcctgcacctggaaggagcttcgccaggtgggccatgagcctctgagcacacccagcctgctgcccggctccaagagtcaggcccctgccaccacctcctgagcctccagccctcagcaccttcaccctactgaccgcggttctacccccacaccagccaccggccccaccggggcacttcccactgctccagccgaccactcagcgagccccaggcccacctctcctctcccttaaagcccttcccttgcccttgcccattcgctcctgccttctccctggggacaggaggcatgcttctccccagtttccgcaataaaatatttgttgttaataat

SEQ ID NO: 32594 - DNA, 1299 bp, Homo sapiens
gctaaacgtgagggggcgtggccaagatggcgcgtgcgggatcctcgggtaccgggagcgaacgaggaggttctggctcagtgcatccactctgggagagcgtggacctggttcctgggggcgatcgccagtcacccatcaacattcggtggagggacagtgtttatgatcccggcttaaaaccactgaccatctcttatgacccagccacctgcctccacgtctggaataatgggtactctttcctcgtggaatttgaagattctacagataaatcagctgcacttagtgcattggaacgcagtcaaatttgaaaactttgaggatgcagcactggaagaaaatggtttggctgtgataggagtatttttaaagatttcggaaacttctggcagcccagtgtctactggaaggcccaagccgcttgccagaaagctgcgccccgcccaaaagcactgggttctgcagtccaggcccttcctcagctcccaggtccaggagaactgcaaggtcacctacttccacaggaagcactgggtccgcatccggcccctccgcaccactcctcccagctgggactacacccgcatctgcatccagagagagatggtccccgcccgcatccgcgtcctgagagagatggtccccgaggcctggaggtgctttcccaacaggctgccgctgctgagcaacatcaggcctgatttctccaaggctcccctggcctacgtgaagcggtggctttggaccgcccgccacccccacagcctgtccgcagcctggtgaccgtgaaaatcgccccgccagagagcagaggaagcccgacgcccaggccatctgccttcaggtctgtgatgagaaacggagtggcctgttccgttgtgcccaggtctaggccgctgagcagagccctcactcccaggcagagttgtctgaatccttcctggcggccgcctgctgccctgacgcctcaggcttgcctgcacctggaaggagcttcgccaggtgggccatgagcctctgagcacacccagcctgctgcccggctccaagagtcaggcccctgccaccacctcctgagcctccagccctcagcaccttcaccctactgaccgcggttctacccccacaccagccaccggccccaccggggcacttcccactgctccagccgaccactcagcgagccccaggcccacctctcctctcccttaaagcccttcccttgcccttgcccattcgctcctgcctgtctcactgggacaggagacatgcttctccccagttctctctcactga

SEQ ID NO: 32595 - DNA, 1280 bp, Homo sapiens
gctaaacgtgagggggcgtggccaagatggcgcgtgcgggatcctcgggtaccgggagcgaacgaggaggttctggctcagtgcatccactctgggagagcgtggacctggttcctgggggcgatcgccagtcacccatcaacattcggtggagggacagtgtttatgatcccggcttaaaaccactgaccatctcttatgacccagccacctgcctccacgtctggaataatgggtactctttcctcgtggaatttgaagattctacagataaatcagctgcacttagtgcattggaacgcagtcaaatttgaaaactttgaggatgcagcactggaagaaaatggtttggctgtgataggagtatttttaaagatttcggaaacttctggcagcccagtgtctactggaaggcccaagccgcttgccagaaagctgcgccccgcccaaaagcactgggttctgcagtccaggcccttcctcagctcccaggtccaggagaactgcaaggtcacctacttccacaggaagcactgggtccgcatccggcccctccgcaccactcctcccagctgggactacacccgcatctgcatccagagagagatggtccccgcccgcatccgcgtcctgagagagatggtccccgaggcctggaggtgctttcccaacaggctgccgctgctgagcaacatcaggcctgatttctccaaggctcccctggcctacgtgaagcggtggctttggaccgcccgccacccccacagcctgtccgcagcctggtgaccgtgaaaatcgccccgccagagagcagaggaagcccgacgcccaggccatctgccttcaggtctgtgatgagaaacggagtggcctgttccgttgtgcccaggtctaggccgctgagcagagccctcactcccaggcagagttgtctgaatccttcctggcggccgcctgctgccctgacgcctcaggcttgcctgcacctggaaggagcttcgccaggtgggccatgagcctctgagcacacccagcctgctgcccggctccaagagtcaggcccctgccaccacctcctgagcctccagccctcagcaccttcaccctactgaccgcggttctacccccacaccagccaccggccccaccggggcacttcccacctctcctctcccttaaagcccttcccttgcccttgcccattcgctcctgccttctccctggggacaggaggcatgcttctccccagtttccgcaataaaatatttgttgttaataat

SEQ ID NO: 32596 - DNA, 1262 bp, Homo sapiens
gagatgtgtagccagagcgcagagcagtgcatccactctgggagagcgtggacctggttcctgggggcgatcgccagtcacccatcaacattcggtggagggacagtgtttatgatcccggcttaaaaccactgaccatctcttatgacccagccacctgcctccacgtctggaataatgggtactctttcctcgtggaatttgaagattctacagataaatcagctgcacttagtgcattggaacgcagtcaaatttgaaaactttgaggatgcagcactggaagaaaatggtttggctgtgataggagtatttttaaagatttcggaaacttctggcagcccagtgtctactggaaggcccaagccgcttgccagaaagctgcgccccgcccaaaagcactgggttctgcagtccaggcccttcctcagctcccaggtccaggagaactgcaaggtcacctacttccacaggaagcactgggtccgcatccggcccctccgcaccactcctcccagctgggactacacccgcatctgcatccagagagagatggtccccgcccgcatccgcgtcctgagagagatggtccccgaggcctggaggtgctttcccaacaggctgccgctgctgagcaacatcaggcctgatttctccaaggctcccctggcctacgtgaagcggtggctttggaccgcccgccacccccacagcctgtccgcagcctggtgaccgtgaaaatcgccccgccagagagcagaggaagcccgacgcccaggccatctgccttcaggtctgtgatgagaaacggagtggcctgttccgttgtgcccaggtctaggccgctgagcagagccctcactcccaggcagagttgtctgaatccttcctggcggccgcctgctgccctgacgcctcaggcttgcctgcacctggaaggagcttcgccaggtgggccatgagcctctgagcacacccagcctgctgcccggctccaagagtcaggcccctgccaccacctcctgagcctccagccctcagcaccttcaccctactgaccgcggttctacccccacaccagccaccggccccaccggggcacttcccactgctccagccgaccactcagcgagccccaggcccacctctcctctcccttaaagcccttcccttgcccttgcccattcgctcctgccttctccctggggacaggaggcatgcttctccccagtttccgcaataaaatatttgttgttaataat

SEQ ID NO: 32597 - DNA, 1276 bp, Homo sapiens
cggaccagaggggtcttgcctgttccgagagaatggaagggtgcatccactctgggagagcgtggacctggttcctgggggcgatcgccagtcacccatcaacattcggtggagggacagtgtttatgatcccggcttaaaaccactgaccatctcttatgacccagccacctgcctccacgtctggaataatgggtactctttcctcgtggaatttgaagattctacagataaatcagctgcacttagtgcattggaacgcagtcaaatttgaaaactttgaggatgcagcactggaagaaaatggtttggctgtgataggagtatttttaaagatttcggaaacttctggcagcccagtgtctactggaaggcccaagccgcttgccagaaagctgcgccccgcccaaaagcactgggttctgcagtccaggcccttcctcagctcccaggtccaggagaactgcaaggtcacctacttccacaggaagcactgggtccgcatccggcccctccgcaccactcctcccagctgggactacacccgcatctgcatccagagagagatggtccccgcccgcatccgcgtcctgagagagatggtccccgaggcctggaggtgctttcccaacaggctgccgctgctgagcaacatcaggcctgatttctccaaggctcccctggcctacgtgaagcggtggctttggaccgcccgccacccccacagcctgtccgcagcctggtgaccgtgaaaatcgccccgccagagagcagaggaagcccgacgcccaggccatctgccttcaggtctgtgatgagaaacggagtggcctgttccgttgtgcccaggtctaggccgctgagcagagccctcactcccaggcagagttgtctgaatccttcctggcggccgcctgctgccctgacgcctcaggcttgcctgcacctggaaggagcttcgccaggtgggccatgagcctctgagcacacccagcctgctgcccggctccaagagtcaggcccctgccaccacctcctgagcctccagccctcagcaccttcaccctactgaccgcggttctacccccacaccagccaccggccccaccggggcacttcccactgctccagccgaccactcagcgagccccaggcccacctctcctctcccttaaagcccttcccttgcccttgcccattcgctcctgccttctccctggggacaggaggcatgcttctccccagtttccgcaataaaatatttgttgttaataat

SEQ ID NO: 32598 - DNA, 1487 bp, Homo sapiens
ggagcacatgttctcaggtcctcctgtgggctgtgtcacaggccatagtcacccatattggctcagaataaatctcttcaaatattttacagagttcgactcttttcgacaacacttggtttggcctagaaagtgcatccactctgggagagcgtggacctggttcctgggggcgatcgccagtcacccatcaacattcggtggagggacagtgtttatgatcccggcttaaaaccactgaccatctcttatgacccagccacctgcctccacgtctggaataatgggtactctttcctcgtggaatttgaagattctacagataaatcagtgatcaagggaggacccctggaacacaactaccgattgaagcagttccattttcactggggggccatcgatgcctggggttctgagcacaccgtggacagcaaatgcttcccagcagagctgcacttagtgcattggaacgcagtcaaatttgaaaactttgaggatgcagcactggaagaaaatggtttggctgtgataggagtatttttaaagatttcggaaacttctggcagcccagtgtctactggaaggcccaagccgcttgccagaaagctgcgccccgcccaaaagcactgggttctgcagtccaggcccttcctcagctcccaggtccaggagaactgcaaggtcacctacttccacaggaagcactgggtccgcatccggcccctccgcaccactcctcccagctgggactacacccgcatctgcatccagagagagatggtccccgcccgcatccgcgtcctgagagagatggtccccgaggcctggaggtgctttcccaacaggctgccgctgctgagcaacatcaggcctgatttctccaaggctcccctggcctacgtgaagcggtggctttggaccgcccgccacccccacagcctgtccgcagcctggtgaccgtgaaaatcgccccgccagagagcagaggaagcccgacgcccaggccatctgccttcaggtctgtgatgagaaacggagtggcctgttccgttgtgcccaggtctaggccgctgagcagagccctcactcccaggcagagttgtctgaatccttcctggcggccgcctgctgccctgacgcctcaggcttgcctgcacctggaaggagcttcgccaggtgggccatgagcctctgagcacacccagcctgctgcccggctccaagagtcaggcccctgccaccacctcctgagcctccagccctcagcaccttcaccctactgaccgcggttctacccccacaccagccaccggccccaccggggcacttcccactgctccagccgaccactcagcgagccccaggcccacctctcctctcccttaaagcccttcccttgcccttgcccattcgctcctgccttctccctggggacaggaggcatgcttctccccagtttccgcaataaaatatttgttgttaataat

SEQ ID NO: 32599 - DNA, 1265 bp, Homo sapiens
  misc_feature (15)..(15): n is a, c, g, or t
  misc_feature (21)..(21): n is a, c, g, or t
ggacggccaggactncagganaaagagagtgcatccactctgggagagcgtggacctggttcctgggggcgatcgccagtcacccatcaacattcggtggagggacagtgtttatgatcccggcttaaaaccactgaccatctcttatgacccagccacctgcctccacgtctggaataatgggtactctttcctcgtggaatttgaagattctacagataaatcaggctgcacttagtgcattggaacgcagtcaaatttgaaaactttgaggatgcagcactggaagaaaatggtttggctgtgataggagtatttttaaagatttcggaaacttctggcagcccagtgtctactggaaggcccaagccgcttgccagaaagctgcgccccgcccaaaagcactgggttctgcagtccaggcccttcctcagctcccaggtccaggagaactgcaaggtcacctacttccacaggaagcactgggtccgcatccggcccctccgcaccactcctcccagctgggactacacccgcatctgcatccagagagagatggtccccgcccgcatccgcgtcctgagagagatggtccccgaggcctggaggtgctttcccaacaggctgccgctgctgagcaacatcaggcctgatttctccaaggctcccctggcctacgtgaagcggtggctttggaccgcccgccacccccacagcctgtccgcagcctggtgaccgtgaaaatcgccccgccagagagcagaggaagcccgacgcccaggccatctgccttcaggtctgtgatgagaaacggagtggcctgttccgttgtgcccaggtctaggccgctgagcagagccctcactcccaggcagagttgtctgaatccttcctggcggccgcctgctgccctgacgcctcaggcttgcctgcacctggaaggagcttcgccaggtgggccatgagcctctgagcacacccagcctgctgcccggctccaagagtcaggcccctgccaccacctcctgagcctccagccctcagcaccttcaccctactgaccgcggttctacccccacaccagccaccggccccaccggggcacttcccactgctccagccgaccactcagcgagccccaggcccacctctcctctcccttaaagcccttcccttgcccttgcccattcgctcctgccttctccctggggacaggaggcatgcttctccccagtttccgcaataaaatatttgttgttaataat

SEQ ID NO: 32600 - DNA, 1378 bp, Homo sapiens
ggtaaaaaaaaaaaaaaaaaaaaaaaaaaaaaagcattgcggccgcctgctgccctgacgcctcaggcttgcctgcacctggaaggagcttcgccaggtgggccatgagcctctgagcacacccagcctgctgcccggctccaagagtcaggcccctgccaccacctcctgagcctccagccctcagcaccttcaccccatcaacattcggtggagggacagtgtttatgatcccggcttaaaaccactgaccatctcttatgacccagccacctgcctccacgtctggaataatgggtactctttcctcgtggaatttgaagattctacagataaatcagctgcacttagtgcattggaacgcagtcaaatttgaaaactttgaggatgcagcactggaagaaaatggtttggctgtgataggagtatttttaaagatttcggaaacttctggcagcccagtgtctactggaaggcccaagccgcttgccagaaagctgcgccccgcccaaaagcactgggttctgcagtccaggcccttcctcagctcccaggtccaggagaactgcaaggtcacctacttccacaggaagcactgggtccgcatccggcccctccgcaccactcctcccagctgggactacacccgcatctgcatccagagagagatggtccccgcccgcatccgcgtcctgagagagatggtccccgaggcctggaggtgctttcccaacaggctgccgctgctgagcaacatcaggcctgatttctccaaggctcccctggcctacgtgaagcggtggctttggaccgcccgccacccccacagcctgtccgcagcctggtgaccgtgaaaatcgccccgccagagagcagaggaagcccgacgcccaggccatctgccttcaggtctgtgatgagaaacggagtggcctgttccgttgtgcccaggtctaggccgctgagcagagccctcactcccaggcagagttgtctgaatccttcctggcggccgcctgctgccctgacgcctcaggcttgcctgcacctggaaggagcttcgccaggtgggccatgagcctctgagcacacccagcctgctgcccggctccaagagtcaggcccctgccaccacctcctgagcctccagccctcagcaccttcaccctactgaccgcggttctacccccacaccagccaccggccccaccggggcacttcccactgctccagccgaccactcagcgagccccaggcccacctctcctctcccttaaagcccttcccttgcccttgcccattcgctcctgccttctccctggggacaggaggcatgcttctccccagtttccgcaataaaatatttgttgttaataat

SEQ ID NO: 32601 - DNA, 1457 bp, Homo sapiens
gggactatttctactccacataatctgattattaagttcctgcaacttaactgggaactgatcaagatttcaagctaaagatggtggtgatgaacagcctgagggtcattcttcaagcctctccaggcaaattgctgtggagaaagttccagattccgagattcatgccagcgaggccctgcagcctctatacttgtacttacaaaacccggaaccgagccttgcatccactctgggagagcgtggacctggttcctgggggcgatcgccagtcacccatcaacattcggtggagggacagtgtttatgatcccggcttaaaaccactgaccatctcttatgacccagccacctgcctccacgtctggaataatgggtactctttcctcgtggaatttgaagattctacagataaatcagctgcacttagtgcattggaacgcagtcaaatttgaaaactttgaggatgcagcactggaagaaaatggtttggctgtgataggagtatttttaaagatttcggaaacttctggcagcccagtgtctactggaaggcccaagccgcttgccagaaagctgcgccccgcccaaaagcactgggttctgcagtccaggcccttcctcagctcccaggtccaggagaactgcaaggtcacctacttccacaggaagcactgggtccgcatccggcccctccgcaccactcctcccagctgggactacacccgcatctgcatccagagagagatggtccccgcccgcatccgcgtcctgagagagatggtccccgaggcctggaggtgctttcccaacaggctgccgctgctgagcaacatcaggcctgatttctccaaggctcccctggcctacgtgaagcggtggctttggaccgcccgccacccccacagcctgtccgcagcctggtgaccgtgaaaatcgccccgccagagagcagaggaagcccgacgcccaggccatctgccttcaggtctgtgatgagaaacggagtggcctgttccgttgtgcccaggtctaggccgctgagcagagccctcactcccaggcagagttgtctgaatccttcctggcggccgcctgctgccctgacgcctcaggcttgcctgcacctggaaggagcttcgccaggtgggccatgagcctctgagcacacccagcctgctgcccggctccaagagtcaggcccctgccaccacctcctgagcctccagccctcagcaccttcaccctactgaccgcggttctacccccacaccagccaccggccccaccggggcacttcccactgctccagccgaccactcagcgagccccaggcccacctctcctctcccttaaagcccttcccttgcccttgcccattcgctcctgccttctccctggggacaggaggcatgcttctccccagtttccgcaataaaatatttgttgttaataat

SEQ ID NO: 32602 - DNA, 1445 bp, Homo sapiens
gcagcttttctggcaaaccggcttggggccttccagtagaccactggggctgccagaagtttccgtaatctgatttatctgtagaatcttcaaattccacgaggaaagagtacccattattccagacgtggaggcaggtggctgggtcataagagatggtcagtggttttaagccgggatcataaacactgtccctccaccgaatgttgatgggtgactggcgatccgcccccaggaaccaggtccacgctctcccagagtggatgcactgagccagaacctcctcgttcgctcccggtacccgaggatcccgcacgcggccatcttggccacgccccctcacgtttagccacgtccctacgcagcaaacgtcatttcgtcattccaggttacgcccctatcagtccccattctgtccccgacccaggctgaaatctcgccactggccacgcttccccagcgcacggagtccacacctgctctgcgctctggctacacatctcctgtcgctgccacgcgcctgcacgctaacttgccgacgcctctgccctccgcctgctccaccatctttgttacgcccctcagagcaacaaggcacgcccacacgtaaggaccgcgccccccacgttcgaggcacgtctctgcgttccaactacgtcatgtccctacttcccttttcgcgccacctcccttgccggtcactactccgcagcccgcatctgcatccagagagagatggtccccgcccgcatccgcgtcctgagagagatggtccccgaggcctggaggtgctttcccaacaggctgccgctgctgagcaacatcaggcctgatttctccaaggctcccctggcctacgtgaagcggtggctttggaccgcccgccacccccacagcctgtccgcagcctggtgaccgtgaaaatcgccccgccagagagcagaggaagcccgacgcccaggccatctgccttcaggtctgtgatgagaaacggagtggcctgttccgttgtgcccaggtctaggccgctgagcagagccctcactcccaggcagagttgtctgaatccttcctggcggccgcctgctgccctgacgcctcaggcttgcctgcacctggaaggagcttcgccaggtgggccatgagcctctgagcacacccagcctgctgcccggctccaagagtcaggcccctgccaccacctcctgagcctccagccctcagcaccttcaccctactgaccgcggttctacccccacaccagccaccggccccaccggggcacttcccactgctccagccgaccactcagcgagccccaggcccacctctcctctcccttaaagcccttcccttgcccttgcccattcgctcctgccttctccctggggacaggaggcatgcttctccccagtttccgcaataaaatatttgttgttaataat

SEQ ID NO: 32603 - DNA, 1237 bp, Homo sapiens
gcagcttttctggcaaaccggcttggggccttccagtagaccactggggctgccagaagtttccgtaatctgatttatctgtagaatcttcaaattccacgaggaaagagtacccattattccagacgtggaggcaggtggctgggtcataagagatggtcagtggttttaagccgggatcataaacactgtccctccaccgaatgttgatgggtgactggcgatccgcccccaggaaccaggtccacgctctcccagagtggatgcactgctctgcgctctggctacacatctcctgtcgctgccacgcgcctgcacgctaacttgccgacgcctctgccctccgcctgctccaccatctttgttacgcccctcagagcaacaaggcacgcccacacgtaaggaccgcgccccccacgttcgaggcacgtctctgcgttccaactacgtcatgtccctacttcccttttcgcgccacctcccttgccggtcactactccgcagcccgcatctgcatccagagagagatggtccccgcccgcatccgcgtcctgagagagatggtccccgaggcctggaggtgctttcccaacaggctgccgctgctgagcaacatcaggcctgatttctccaaggctcccctggcctacgtgaagcggtggctttggaccgcccgccacccccacagcctgtccgcagcctggtgaccgtgaaaatcgccccgccagagagcagaggaagcccgacgcccaggccatctgccttcaggtctgtgatgagaaacggagtggcctgttccgttgtgcccaggtctaggccgctgagcagagccctcactcccaggcagagttgtctgaatccttcctggcggccgcctgctgccctgacgcctcaggcttgcctgcacctggaaggagcttcgccaggtgggccatgagcctctgagcacacccagcctgctgcccggctccaagagtcaggcccctgccaccacctcctgagcctccagccctcagcaccttcaccctactgaccgcggttctacccccacaccagccaccggccccaccggggcacttcccactgctccagccgaccactcagcgagccccaggcccacctctcctctcccttaaagcccttcccttgcccttgcccattcgctcctgccttctccctggggacaggaggcatgcttctccccagtttccgcaataaaatatttgttgttaataat

SEQ ID NO: 32604 - DNA, 1788 bp, Homo sapiens
ggccaggactggccagaaaagagaggtgtggaatgcatgcatccactctgggagagcgtggacctggttcctgggggcgatcgccagtcacccatcaacattcggtggagggacagtgtttatgatcccggcttaaaaccactgaccatctcttatgacccagccacctgcctccacgtctggaataatgggtactctttcctcgtggaatttgaagattctacagataaatcagctgcacttagtgcattggaacgcagtcaaatttgaaaactttgaggatgcagcactggaagaaaatggtttggctgtgataggagtatttttaaaggaaaattctcagtctcccttgaagaagtgaagcctccttctttatgcactggccactgtctaatacctcccagcaatactcagaggagactacctgctggaacctcactagaattgagagatcaaatggttttggctgttttcccactggagaatataaaaaatacacagttaattttagaaacaaaggctgggcatgattccatcctaagcagcaattcttcaggtagctgcccagaagggcctggagctcctctggaccactgctgatctccagatactccctgagaaccgtcacctcggcgtccaattcctgagtggttttcactactaaataatgactcagtgacccagtctcttggccaggacgctgttatggaatttgggtcgtttggcacttcctgcctggtgcccacctgtctagattactggacccaagtaggtccagtatctccctggtccagccctgtcttgagtccatcacctttatcattaagaagcagccagtagaggttgatgatgatcaggtacgttctctccacaattttcatctaaggaaatcctcgtctccccttttaaaacaaggctgggctcagactgtggcatcagttttaacatcttgtaatgcttatacatttttattgaagtgtaccaacgtcttatctcagtttggacatgaatttagagatatttcaaattagctagagagaagagttaaaacatagaagaacataagctttttacatctatatttgacagtgacatatgtttttattatacatgcattgtgtagattctctatgaaaattaagacccttttaaataaaaaaacgaaggctggaaatgggtgtattcaaaaccctttaaaatccttaagggagttttgctatagaatctcaggataaagacagactccgacaatattcatccagaaattttcatgtaagtcagttgtttgaaacttgggatttatttttctcttagaaactaagtctaagtggtggttactacatcagcacacaaaatcctgtttaattcataaactaaactgtaataataactgcgtttacttgttcatattgggtttttattgactaaaagcttccagcctctttttcatgcagccaggataacagtgataccaaaacctatcaaagattagaccatcctacccccaaaatataacaataggccaatatctctaaaaaatatgtaacaacagaaaaaaaagctaaataaaatagtagaaatagaatctagcagtgcattagaagaaatatatactttgtccaggtagggtttattccagtaatccacagatggttcagtactaagaatgatatacttacaattaatggatttcatcccatcaacaaatctatatgatcatttccatggatttcctaaaatacgttagacaaaacccaccatccctttaaaaatttttttaataaaaca

SEQ ID NO: 32605 - DNA, 1773 bp, Homo sapiens
ggctgacgagctttctcctagtgcatccactctgggagagcgtggacctggttcctgggggcgatcgccagtcacccatcaacattcggtggagggacagtgtttatgatcccggcttaaaaccactgaccatctcttatgacccagccacctgcctccacgtctggaataatgggtactctttcctcgtggaatttgaagattctacagataaatcaggctgcacttagtgcattggaacgcagtcaaatttgaaaactttgaggatgcagcactggaagaaaatggtttggctgtgataggagtatttttaaaggaaaattctcagtctcccttgaagaagtgaagcctccttctttatgcactggccactgtctaatacctcccagcaatactcagaggagactacctgctggaacctcactagaattgagagatcaaatggttttggctgttttcccactggagaatataaaaaatacacagttaattttagaaacaaaggctgggcatgattccatcctaagcagcaattcttcaggtagctgcccagaagggcctggagctcctctggaccactgctgatctccagatactccctgagaaccgtcacctcggcgtccaattcctgagtggttttcactactaaataatgactcagtgacccagtctcttggccaggacgctgttatggaatttgggtcgtttggcacttcctgcctggtgcccacctgtctagattactggacccaagtaggtccagtatctccctggtccagccctgtcttgagtccatcacctttatcattaagaagcagccagtagaggttgatgatgatcaggtacgttctctccacaattttcatctaaggaaatcctcgtctccccttttaaaacaaggctgggctcagactgtggcatcagttttaacatcttgtaatgcttatacatttttattgaagtgtaccaacgtcttatctcagtttggacatgaatttagagatatttcaaattagctagagagaagagttaaaacatagaagaacataagctttttacatctatatttgacagtgacatatgtttttattatacatgcattgtgtagattctctatgaaaattaagacccttttaaataaaaaaacgaaggctggaaatgggtgtattcaaaaccctttaaaatccttaagggagttttgctatagaatctcaggataaagacagactccgacaatattcatccagaaattttcatgtaagtcagttgtttgaaacttgggatttatttttctcttagaaactaagtctaagtggtggttactacatcagcacacaaaatcctgtttaattcataaactaaactgtaataataactgcgtttacttgttcatattgggtttttattgactaaaagcttccagcctctttttcatgcagccaggataacagtgataccaaaacctatcaaagattagaccatcctacccccaaaatataacaataggccaatatctctaaaaaatatgtaacaacagaaaaaaaagctaaataaaatagtagaaatagaatctagcagtgcattagaagaaatatatactttgtccaggtagggtttattccagtaatccacagatggttcagtactaagaatgatatacttacaattaatggatttcatcccatcaacaaatctatatgatcatttccatggatttcctaaaatacgttagacaaaacccaccatccctttaaaaatttttttaataaaaca

SEQ ID NO: 32606 - DNA, 679 bp, Homo sapiens
aagggtgtaaaaaagaaattcgaattcgcgggacggtcggcctcaggcggagtagggacgtgagcccaagggagggaggtggggtaggcagactagttgtgactggatgatcactgggcgaagggtggaaaagtggccacagatggtgaccgtgaaaatcgccccgccagagagcagaggaagcccgacgcccaggccatctgccttcaggtctgtgatgagaaacggagtggcctgttccgttgtgcccaggtctaggccgctgagcagagccctcactcccaggcagagttgtctgaatccttcctggcggccgcctgctgccctgacgcctcaggcttgcctgcacctggaaggagcttcgccaggtgggccatgagcctctgagcacacccagcctgctgcccggctccaagagtcaggcccctgccaccacctcctgagcctccagccctcagcaccttcaccctactgaccgcggttctacccccacaccagccaccggccccaccggggcacttcccactgctccagccgaccactcagcgagccccaggcccacctctcctctcccttaaagcccttcccttgcccttgcccattcgctcctgccttctccctggggacaggaggcatgcttctccccagtttccgcaataaaatatttgttgttaataat

SEQ ID NO: 32607 - DNA, 1389 bp, Homo sapiens
ggccaggactggccagaaaagagaggtgtggaatgcatgcatccactctgggagagcgtggacctggttcctgggggcgatcgccagtcacccatcaacattcggtggagggacagtgtttatgatcccggcttaaaaccactgaccatctcttatgacccagccacctgcctccacgtctggaataatgggtactctttcctcgtggaatttgaagattctacagataaatcagctgcacttagtgcattggaacgcagtcaaatttgaaaactttgaggatgcagcactggaagaaaatggtttggctgtgataggagtatttttaaaggaaaattctcagtctcccttgaagaagtgaagcctccttctttatgcactggccactgtctaatacctcccagcaatactcagaggagactacctgctggaacctcactagaattgagagatcaaatggttttggctgttttcccactggagaatataaaaaatacacagttaattttagaaacaaaggctgggcatgattccatcctaagcagcaattcttcaggtagctgcccagaagggcctggagctcctctggaccactgctgatctccagatactccctgagaaccgtcacctcggcgtccaattcctgagtggttttcactactaaataatgactcagtgacccagtctcttggccaggacgctgttatggaatttgggtcgtttggcacttcctgcctggtgcccacctgtctagattactggacccaagtaggtccagtatctccctggtccagccctgtcttgagtccatcacctttatcattaagaagcagccagtagaggttgatgatgatcaggtacgttctctccacaattttcatctaaggaaatcctcgtctccccttttaaaacaaggctgggctcagactgtggcatcagttttaacatcttgtaatgcttatacatttttattgaagtgtaccaacgtcttatctcagtttggacatgaatttagagatatttcaaattagctagagagaagagttaaaacatagaagaacataagctttttacatctatatttgacagtgacatatgtttttattatacatgcattgtgtagattctctatgaaaattaagacccttttaaataaaaaaacgaaggctggaaatgggtgtattcaaaaccctttaaaatccttaagggagttttgctatagaatctcaggataaagacagactccgacaatattcatccagaaattttcatgtaagtcagttgtttgaaacttgggatttatttttctcttagaaactaagtctaagtggtggttactacatcagcacacaaaatcctgtttaattcataaactaaactgtaataata

SEQ ID NO: 32608 - DNA, 982 bp, Homo sapiens
ggacagaaatggcattagtgtttagagaagattatgtatatatggctgtatgaacactgaaaattatgagggtcaacataaaatcagcattacaggtactaaaacataaatcctgatggctttcaccgttttcttaagagcaaaattgcaaaaagtgatattaacagtcatcctagacgaatatgagcaaatgatttgtttttccttaaaagagcctccaagtgtattgtgatcattttcacactgatcaaagagagcacccttctgtcaacaggtatctgcagttttcaggacctggcagaaattcttctatgttctgcctttaaaggtcaggtacaaaagcagagacagctgccaggcccctctgcccagagctaagtgtctgggaccatgagtgggaaggactgaggcttgagcctccttggtcctccagacagcatggggcgctacttgccccttctgcagctgcgcgcggcaaagctgtggcctggccgtggcctcctgccccatgcaacagttggtggacagaccgtacctggcacacggcgccttgtgcactttccaacattttgatgctaaccgtcgctagtcactgagccctgacatttgatctctggccttgaccgcagatttcggaaacttctggcagcccagtgtctactggaaggcccaagccgcttgccagaaagctgcgccccgcccaaaagcactgggttctgcagtccaggcccttcctcagctcccaggtccaggagaactgcaaggtcacctacttccacaggaagcactgggtccgcatccggcccctccgcaccactcctcccagctgggactacacccgcatctgcatccagagagagatggtccccgcccgcatccgccctctcctctcccttaaagcccttcccttgcccttgcccattcgctcctgcctgtctcactgggacaggagacatgcttctccccagttctctctcactga

SEQ ID NO: 32609 - DNA, 604 bp, Homo sapiens
atatatcatcccccccaccaccaaaaaaatatatatattttaaatgatataaaaatgcacagcccaatagagtggtcacaagccacatgtggcaattgagcacttgaaatgtgtctactgcagttctggaaccatttttcattttatttaattttaatttcaatttaagaacttaaatgaagcagggggcacctttcactgcaggcatgctgaccttgtcagcaaacagcctgctgatttgttctctaatttaattcagtaatgtttataaaattataaattacaagtttaagtgtaatttcagtcatgcagtttgtttttatgtaatcaccaggtagttaattttaattcacattctgttacagttgctacagtgagatgtccattgtttgtaatattttcttacttgtggttctttagctaggcaaacatcataaggagctacagaaattagtggatactttgccgtcaattaagcataaggtactatttgttttccttaattacttgaaatatacttttatgtttcaatctcagagcggagacattaccaaggcactttgaattgggaagtttaattaggtgaactgtattcagccttaga

SEQ ID NO: 32610 - DNA, 422 bp, Homo sapiens
cagtcacccatcaacattcggtggagggacagtgtttatgatcccggcttaaaaccactgaccatctcttatgacccagccacctgcctccacgtctggaataatgggtactctttcctcgtggaatttgaagattctacagataaatcagtgagggcaagatctggtggtcttgtaaggagttaaagaaacagtgtcatgttaacagaggacacatcaaactctctccatgatagtattgacctctttgtgagcaatggcatggaactcattggaatttaaaaaaaaattgtggtgaaatacacataatatgaaatttatcatcttaaccatttttaagaatacagtcaagtagtattatattaagtacatttccattagtgtacaatcatcaccaccatctatctccagaaatcctttca

SEQ ID NO: 32611 - DNA, 417 bp, Homo sapiens
tgagccactgcactcggtccaacagtcttgataataggctgacgagctttctcctagtgcatccactctgggagagcgtggacctggttcctgggggcgatcgccagtcacccatcaacattcggtggagggacagtgtttatgatcccggcttaaaaccactgaccatctcttatgacccagccacctgcctccacgtctggaataatgggtactctttcctcgtggaatttgaagattctacagataaatcaggtgagggcaagatctggtggtcttgtaaggagttaaagaaacagtgtcatgttaacagaggacacatcaaactctctccatgatagtattgacctctttgtgagcaatggcatggaactcattgatcttaactttttgaatgtgtgaaaaaaaattccttct

SEQ ID NO: 32612 - DNA, 385 bp, Homo sapiens
acaaaatcttagaataaccaattttaatgagaaattatagcaatttgcacaatataagattaatatacaaatgtcaattactgtcctatatatcagtaatgtagttagaatttgaaatttaaaaattcagtgacatttaggctagcaccaataacaatgaaattcttaggtacaaatataacaaaataaatataaatatagaatctatatgaagaaaccggcaaaactgtaaaaacatcaaagaagatctaaataaatggagagataatccacattcaagtaaagaaggcttcaacattgttaaaatgtcagtacttcccaactacatttacatattcaatgcaatcccaatcaaaattccacaaagttagtttgtggatattga

SEQ ID NO: 32613 - DNA, 807 bp, Homo sapiens
tgggggtcaagtgggcctccagacaccctgagctgcatggagaacagcaagggccttttgctcatctgcagtgtacagcactgcctctacttcatcttgatgctgctcctggtcagtcttctcggcacgctggggacctccttactcacagacccaattcctgttaaacaagttaagtgctgccaggtagggtgctctggggtggaccctgcagttctagggagtcactgaagaatagggaaattcctgcattgtctttggaaaggggagggtttgggggagcattggggtgggcagaaacaggcaggtacattttaaagggctcagcagagtgaaacaaagctgaactcaaccagatgtcctgcagcgatctgccaggtattcctttagatcgagaagtttggcttttaaaatgcaaattttccttggaagttttaaatccaccaaccttagtatgaattaatacaatcagggcactcccagctgttacccacccagggggaatgaagccaatggacattcagcccccactgtagtgcagtaggtgagagcatggcaggctctggagcagactgccaggatgccgatcctagccttgcccttactagtgtgtgtgatcccggatgaatatttaacttttctgtggctcagttaaatggatgtaataatatctacctcaaagatcagttatgaggattaaatgagttaatcaatgtaaagcacttagaacagtgtttcgcatatgtacgcctcatcttagtattagctgctgttattgttactattaataaacaatccttgaagagc

SEQ ID NO: 32614 - DNA, 375 bp, Homo sapiens
ggttgaaaaactacctattgggtactatgcttactaccaggacaagatcaactgtactccaaagctcagcatcacaccatatacctttgtaacaaatctgcacgtatatttcctgaatctaaaataaaagttaaaagaaaaagacattctttaacatttgccataattaggactattagcaacaaattttctcagcttttgagaaaatctttatttcactttcatttttcaaagatatttttcactacgtacagaattctacatctgtaagtccttttagtattttaaaggtgccccactgtaagtcttatttttactcttctgtgtataatgtttccatcttccctttgatttgccttcaaagtgttcttaata

SEQ ID NO: 32615 - DNA, 489 bp, Homo sapiens
agtattcggcatgaggtttttagacatcaatgaaaaagtttatgctgtaaccacacccaatttctatagtctcttttgtgaaaatatatttgcttcatcctgaaactaagaaattgctatctatctataacacatagccaaataaatgtgcattttataacttctctccagaagtactatttaatgtatcttaaaaatcaactcttgtactgaatatattaaggctgtttctggatgggagccagcgaatgctttgccaaaagacatctgcacacaagatgtccagcctgtgagtcaattctcctgattatcattcaggaatttgtctctctgagctggcataactatgtttgcctgcttggttcaatattgctggcattcttaacagaaggaatatggattgttttagaaaggtctctatatgttcagatagagcctttacctgaggtcccagctgactctatttaatacagaatggcacatagtctc

SEQ ID NO: 32616 - DNA, 410 bp, Homo sapiens
ctatgtttctagtgtagaatctggcacagaaaccacccatagcaggtgcgccacggacctgctttagctggaaggatcctttctacattccttccaccacctagtgagtggccacgttgatgatgagacctgggcctttaaaaatcctctttcaggtctccagccaaccctctccattcaactcagtttcacaaaccttttcttagcagccacccattcccaaggactgtagtgggtgccgcaggggagacagaggtgaaggagacacagtcctttctgctgattctgcggctgagtcagctgatagcctacgtctatttgccaagaatatgatcaactgagtgaaaacaacaaaataaaaaacgctgagttggggagatgactcgactcgggaggataatgagaatgtc

SEQ ID NO: 32617 - DNA, 562 bp, Homo sapiens
ttttttttctttagagggagtctggctctgtcacccaggctggagtgcagtggcgagatctcggctcactgcaaactctgcctcccgagttcaagcaattctcctgcctcagcctcctgagtagctgggattacaggcagacgccaccatgcccagctaatttttgtatttttagtagagacagggtttcaccattttttggtcaggctagtctcaaactcctgacctcatgatcctcccaccttggcctcccaaagtgctggtattacaggcatgagacaccgcgcctggcctgaatagaatctctttttaccccgagatcttctcaaaattttctgtccacctgcatgaacctggacctggtattttctaaccctgagacatagctgaggcctgagatttccctccatcactctcctgggttagattagttatttcctggattctgtgccttctctgttctcagaaccctcattttattggtgtatctgctcaagtaaactctccagggggagtgccttggacatgaacaccatttctctgcatcactgaagaaatcttt

SEQ ID NO: 32618 - DNA, 544 bp, Homo sapiens
gtgggaaatgggagagaataagggaagaaattcagtcctggagaagctttcagtagtctcataggaaacatctgtaggtctaaaggggaaaaccagtgtctgcaattgactagaatgcactgctagggcagggactgctggggcagggaaactactggggaaggggctgctaggtgctattgttattgataataataaatggcatttaccaaaacaaaaactaatatgttcctgaatctgcgctaagtgcctttatttatgtgaccttatataattcccacaagaactccatgtagttcttgaagttcatgactaataatgaactatgactgtgccctttatatagattggaaaattgaagctggaaagtgaaggagcctttgaagagcagaagcagaaggcttccagttcagatctgtctctctgcagagctctcctttgttctagccagtttccatcttcttggtgttgctaagacaagctgttactaagaggaggctatcctgactgacggctcatgctggtttgagggtccttctcttat

SEQ ID NO: 32619 - DNA, 377 bp, Homo sapiens
ggcctcgacagtgctgggactacaagtgtaagccaccgcgccccagccaagatatttgattttaaggaaaaataggaaaaatcaatttcaaagaaaatgtttaaagccatgccaactaagtatctccaagccaaagttgactatcttcaagccaaagttgacagacaggccaatgtactattttatttccttgactcctaaggcaatgtagggtggtaaaaagggcatggcctccgaaatctgagagacctcaatctggatcctctactggagagcttatgtaattaacccatgagcttcaatttcctcctctctcaaatgaagatagtaatatccaactctagaaggtttcatgattgttaaatgagaggtcgacg

SEQ ID NO: 32620 - DNA, 1525 bp, Homo sapiens
actctgaaaggatcctgaccaaaacgttcctggtagctgtctcaggataatggaatttgagattattctactttaattctttcatatagccttctaatttgctataataagcatggatgatttttattttggggagaaaaaagcaattgagattatatactgtcacttcccagtctttttttaaaagtcagcttccattctaaagatatgtttgcgttgaaacgattgttctctacctttctacatttaaaaaatatataatataatatactctgagtttcaccttcctaaaatactttagaaccataaagggaagcttgttttatcttcaaatagtttttgtggtctgtattttactggatattactatatggctcactagggtgtgcccatccaaaaagtcagctcaatgtcttggaaagataaagggttctagagtcaaacagcatggtttaaatcttgttttataattgttacatctctgacattgagcagatgactgaactacattgaatcgcaactaaaaaattcaaataatttctgcctttcaggtttatattagaaatagtatggaaaatttggtaaagtaactaaactaaaaacttttccaatatgagcatccattggatattctagataaaatattacagatataactagcatcctttaaaatgcatgattgagattagaaaaacagaaaaggatatttccaggggcaagacatgcaagaaataaaatagaactgggaactaaacaggtaaaccctgggatctaaatttgtggttggtatagtttggataagggagagccatcagttttggcaattgagtggcttgaatattcttgttcaccccaggagagatgtggctttgcaactctgcaaggtagtgtattgggactaacacttttaaaataaggattttaaatgagattttcaggacccctgaaacgacccctgaaaatctacatgtttggtgaaagggtgtactagggaaaaaatatgtatatgcatatgtctagctacctaccttaataccatgataattaacatgatttgatttaactgtcatcttactatctttgcctaggatctaagtggaaatttataaccattgtcttatacctcaaaagacttgatgtttgaatttatactgctcagtatggtgtgaaaatgcctgagctgaaaaattaagtgaaaaaaaaaaaaagattccaggttagtgatgttgcagggatacctagaaattaacgtaaaatcgctctgagggaggacatggacttgacccagggagcacatgattcccacagattaaaacccactgaatctgaaaattaaaaacatgaaaaaagtaaacaaggcatcaaaataagggtcagtaaacaacctaagggctttttactaaattttgactttggtgagaagtatacaaattagtattttagaataaacagaatgcaataacaacaaaaaataaataaaactagaaagtacaattttcacagttaagatgaacaaagaagagac

SEQ ID NO: 32621 - DNA, 508 bp, Homo sapiens
gcagtcatcctggcgggacatgcagaggggctgtcctctaaatggaacgttccagagactggcaaagggaaggctctagagctcctctgcagagtctccacgggctcccacaagcccaagagttgggggcagtagcatgccagatccagcgcatactggcttttgagagctgatggctaacttttcagtaatttttttgcaagccagctttaaaaaagttaacttatgaggccgggtgcagtggtgcctcacacctataatcccagtactttgggaggctgaggcgggtgatcacttgatgtcaggagttcgagaccagcctggccaacatggtgaaaccccatctctactaataatgcaaaaattagttgggcgtggtggcacgcgcatgtaatcccagctacctgggaggctgaggcaggagaatcacttgaacccaggaggcggaggttgtgccactgtactccaacctgggcaacagaatgaaactgtgtctcaaaaataaata

SEQ ID NO: 32622 - DNA, 394 bp, Homo sapiens
gtcggtgatggggaccgagtggactctctgggtcttcccccctctgaaaaggctcttcctggaaaagaagttggacacagttggggttttccttgactgcgaacacgggcagatatcattctacaatgtgaccgagatgtccctcatttacaatttctcccattgcgccttccaaggagctctcaggcctgtgttttccctctgtatcccaaatggagacacaagtccagactccctcaccatcttacaacatggtccttcttgtgatgctactgttagcccttaatcttctgtgtgtaaaatccaagaccacgagacaccagaaagttggagaacaagactttgaaagaatttgtgtaaactaacccaataaaaagcgttccaggaaaaaaag

SEQ ID NO: 32623 - DNA, 424 bp, Homo sapiens
caaaaaaaaaacaaaacaaaaaacagtaagtaaatctttactcttggacccacctgtattgtatcaaaagtgtgcctgtgtttctgtatagtcaggggttgaactggatttttagttaggtgggtacacatttgtgcagggaggattctccaaggtcatttgtttcacaggcttgttctgagggctgaatgtggagtgcgtatcctgctgtcagttgctcagtagatgggctctgcaattatacactgagtccctttccctgtcttggcattagaactgtgcttcagtactgccgatagtctgccctgcttgttaatgtattcagaggaggatttgagtcacttatcgatatggacaggtctccactaagccaaaccccaacgcagccaaggctgcgagacagctccctcagatagcggccgcc

SEQ ID NO: 32624 - DNA, 787 bp, Homo sapiens
gggaggccatgcatgggttggattggggagctcacaggagagaacctgctggctgggccaggcctgtgtggggcagggccggaggcaggcagcatgcgggaggcctggctagatctgcatggagcagatccatccaggtggtggctgtgagccaggagggagggactgaggcttctctggggcagggggtatggatttgcggctggatagcaggcacacttgactcccactcccaggaaaatgatattgtaggacagtcaggacacctggctcctggtcctgttgctgcctcgggacttgatatgtgactagccaagccggacccttccagtgtcattgtcttgctgatgcttggacatttgccttggagttgacccacctagggaccctctgaggacatttgtggacaatcctggagagtatgcctagggcccaggtgggcgggctctgcctatgaagcgaggggattccccagctccctgtcatctggcttttctcccagcggccagttcagtttctggctgtgccccccagggggcaccatctcacaccgcaatctgggccgctgctgggccaaggaatacttaatgttaagccttctttctcctggcccgccctgctggctcctgacttcctgcctaaaggcaaacaaggagtccaaagcccggatcctcctcccgggccttcttcctggtgaagagcgcattcccacccagcagggaacagaaaaaccagttccccgggtttccctccctgcctgggaatagcgaagtctggaaagttggca

SEQ ID NO: 32625 - DNA, 786 bp, Homo sapiens
tcatgcctgtcatcccagcactttgtgaggccgattctcctctatccaggagacgggtttcaccattttgccaggtttgtctcaaactcctcggcttaactgatccgcttgctttggccttccaaagtgctgggattacaggagtgagccaccacacgtagccagtcctggcattttgtagaaggatggccaacgcagcctgttgacccttcctggccatcacatgaaaatcagcgactcttccttcttacaaaactcggagcttctcaggataacttggtgaaacgtcccccgctgtgaacctcagtgagcccacctgtaatatacaggtgagggagaagaccagaaaagctcagtcagagtgacactgacccctgaaatgatgggcacaatggagtgtgtggcttttcctgtaggacagggaggtgcttagctgtaatttgaactttaaaggattccagtcctccgaaaaacaggattagactcaaatcaccttgaaccttatcatctcacggctttgacccacctacatggctccgtgtcccctgcaggcctcgccccggagctctacaatcctgtgtgcagttgtctccgcagctctctgctgggacatcaaacaggcatctccaccttcatgtgtctataagtgacttcctaaacccccaaacacattcccttacagtcctacacatctcagatgagggcgacagtgtacttctgggtgcttagctgaggttgacaccatgtattttaaatatggaaaataaattacattatttgtaaatg

SEQ ID NO: 32626 - DNA, 426 bp, Homo sapiens
tcggcctctgagcccactcttactgttggacatgtgatgtcgcaggctcgtcccatgctctccctgccccagccctcagatgctccatttcttggaggagacctggcgcctttgagtggagggtgacttaggcaccggatgtgttcaccactgccagggagcagcattcctgggcactgttaacagttaggaagcagacacgcatctctgcaccacacatggacacacacactcttctattctgtgtctgtatatcaaatccacaagtgcagcggggcatgccggcacacacctgaggtcccagccactcgggaggctgaggcagggggattgcttgagtctgggagttcagggccacagtgaacgtgaactatgcattcgtgaactatccattgcagcctgggcaacagagcaagaccctttttc

SEQ ID NO: 32627 - DNA, 383 bp, Homo sapiens
ccagcctgggagatccctgctctataaaaatgaaaaaattagccaggtggggtggcacatgcctgtggtaccagctacttaggaggctgaggtgggaggattgcttgagcccaggaggtcaaggctgcactgagctgtgatcctaccactgtgcgctccagcctgggcaacagaacaagaccctatctcaagaaataaaacagactatttccaaaggcgtgggctgggcttaagaaactaacaaggggctgggtttggtggctcacatttgtaatcccagtactttgggaggccgaggcaggcagatcacctgaggtcaggagtttgagaccagtgtggccaacatggcgaaaccccatcctattaaaaatacaaaaattagc

SEQ ID NO: 32628 - DNA, 371 bp, Homo sapiens
ttcactgctactcattttagatggccattttggtttcattaattgtttttgacctttcttccccttctcagttcccatccagaagaactttactaaaaagaaatattctgtatacagttcaatttattgagtaaagatattcagtagctttgtttttaagattcagaactggccgggcatggtggctcatgcctgtaatcccagcactttgggaggccaatgcaggtggatcacttgaggtcaggagttcgagaccccccctggccaacatgacgaaaccccatctctactaaaagtacaaaaatgagctgggcatagtggcaggtgccttgtaatcccagctatttgggaggctgaggcacgagaattgc

SEQ ID NO: 32629 - DNA, 572 bp, Homo sapiens
atgacaggcagtgcaggcagacatcattctgttcggctgaagttcaatgaatggcattgctgctctcaacctcttttgggtactatcccgcctaagaaaagcggggtgggagaatggaaatatatttgcattttcatgcatattaagtctcccacaaagatggctctttgttttcttacggtttgcaagctcctgaggactagaaatcggtgaagggggaggggagagcgagtgttctgagattgttcctcccatcccctcccaaagctaatctcgttctagcactgcactgcttttccaaactagctgttgtatgcagtcccattcatcccttctctccagaacttgacacctgtggctcctgcaagtggaaggcccgggaatgggaatgaagcggggtggtgggcagggaagcgttatgctcggagagcccttaaaattctcctggaggtcggcagcggcgcccgcctgtagcctccggcctagaggcttcgccgcccctcggactagaacacagcccggccgttgtgcttgcctccccttcccaggctgtgagacggcggccgcaccac

SEQ ID NO: 32630 - DNA, 527 bp, Homo sapiens
tgttactatcaaaaagtgggaaaatgatgaaataacaaaatgagataaaacaaagttttacaggaaaggaaataaaatcattgaacactacatggctcagatgtgaataataccgtagttaagcagtcataataatgtcaacattgaaaatgaatctcacagaactgataaaactaaattaggaggaatatttctaaactcattttacaagaccagcattaccctgataccaaagccagacaaggacactacaaaaatagaaatttacagaccaatatccctgatgaacataaatgcaagtcgtcaacaaaaccctagcaagctatattccacaacacattacaagactcattccccatgctcaagtgggatttatcctggggctgcaaggaaggttcaatatacacaaatcaacaaatgtgatacaccacattaacagaatgaataaaaatcatgatcatttaaatagatgcagagaaagcatctgacaagattcaacaccccttcataatgaaaaaacaaacaaa

SEQ ID NO: 32631 - DNA, 1767 bp, Homo sapiens
tgcagctggagcgcgggccgccgcggcgacatcttgctcaggaggaaagcgcgcgggagagcgagctgcgctttagctgctgcgccacgcgcgcctcgggcctgggcgcagaggatcggccgggcgcggcgggaaggaggctgcgggcagcgaggagcggctggcgctcgaggcggcggacggcaccatgtccccggggagcggggtgaagagcgagtacatgaagcgctaccaggagccgcgctgggaggagtacgggccgtgctaccgcgagctgctgcactaccgcctaggccgccggctgctggagcaggcgcacgcgccctggctctgggacgactggggcccggccggctcctcggaggactcggcgtcgtcagagtcgtcgggcgccgggggccccgcaccccggtgcgccccgccctcgcccccgccgcccgtagagccggcgacccaggaggaggcggaacggcgggcgcgcggggccccggaggagcaggacgcggaggccggggacgcggaggccgaggacgcggaggacgcggctctgccagcactgccagtgaaagatgtagaagataaacctgaacaacaaaccagaacaagagagactgacaaatcacccaccagtactgagcctcgacagcaaccaagtgccttatttgctagaggaaacaggaaagcggtcaaaagtccccaaagatcatcgagtaaaataaaagaaaacaagcatccatttgctctttatggctggggagaaaaacagaccgatacaggaagccagaagactcacaacgtctgtgcgtccgctcctgtgcacgagattcatgaatcagcattacgagccaagaacagaagacaggtggaaaaaaggaaactggttgctcaaaggcagcgagctcactctgtggatgtggagaagaacagaaagatgaaggcttcctcctcagagaacccgtggatgacagaatacatgaggtgctattcggcaagagcttaaagaaacacttgcgtggacagcctcttttaaaaagtgtaaatgactgaaaggaaaaacaaaacaaaaaccatcaaaagaaacggacacaggtttaagaaaccaactgattatgcaaggttttttttagggaatttgtaaaagattgttttattttgatgaatattggtcacctacctcggcagtagggcagacagttgaagccatagacatttggttatttatgaagataattccctaaatctttgatattcttataaggtttttgttttaaagcatcttaatcttttaagatactgacaccaaatgcctttaaatggcaacagatgcttacagttcagtattcttttcataagcttaggtagagcctattatcatcttgttctaaataactttccagattccatagctataagatcattccatcctacagcataagactcgttttccttatatgccgttttgtttgtgaaagaatatcaagtcaaaaatgagtgtcagcactactactgattccatgtataatgaaagtagaactttgctagttcctgaaaatttttaacttatttgtatttcagttcagcagcatctttatgtagattgtgatatttaagaattatctgggctgggcgagggtctctttttctctttcagtgatcatctaggcagttattatttaatagtttaatagctcaagtacattccaatagacgaagtgcacacaacacaatatgtgtgtacagtagtagtaaagtttcttttgagtagtc

SEQ ID NO: 32632 - DNA, 1667 bp, Homo sapiens
ggaaggactaaggagcattttcgggtggagtaactcaaacagcaacctcctgcagctgctggaggatgaccacaaatccagatctttccgtgaaggaaagcaaaattgagatgattggatttatcttgggggattgcggagaaagcccttagggtgtggtgctgtctatcttttaacattccagatgctaagtctcagaatcggagtagcagtggttgcttttgaataagcttggttcaatcttggtatatttgttgttgattttaaaatgagataaatggtttgaaaattatgctaacttgttcctgtatttctactttaagtggatcgtatgagttgagccataagtgaaaatgttactgtcttaagcattatgatttttcaacataaatattttaattatatataaatctgatttcaaagtattttcatctcatttatctcttttcaaaagcactgccagtgaaagatgtagaagataaacctgaacaacaaaccagaacaagagagactgacaaatcacccaccagtactgagcctcgacagcaaccaagtgccttatttgctagaggaaacaggaaagcggtcaaaagtccccaaagatcatcgagtaaaataaaagaaaacaagcatccatttgctctttatggctggggagaaaaacagaccgatacaggaagccagaagactcacaacgtctgtgcgtccgctcctgtgcacgagattcatgaatcagcattacgagccaagaacagaagacaggtggaaaaaaggaaactggttgctcaaaggcagcgagctcactctgtggatgtggagaagaacagaaagatgaaggcttcctcctcagagaacccgtggatgacagaatacatgaggtgctattcggcaagagcttaaagaaacacttgcgtggacagcctcttttaaaaagtgtaaatgactgaaaggaaaaacaaaacaaaaaccatcaaaagaaacggacacaggtttaagaaaccaactgattatgcaaggttttttttagggaatttgtaaaagattgttttattttgatgaatattggtcacctacctcggcagtagggcagacagttgaagccatagacatttggttatttatgaagataattccctaaatctttgatattcttataaggtttttgttttaaagcatcttaatcttttaagatactgacaccaaatgcctttaaatggcaacagatgcttacagttcagtattcttttcataagcttaggtagagcctattatcatcttgttctaaataactttccagattccatagctataagatcattccatcctacagcataagactcgttttccttatatgccgttttgtttgtgaaagaatatcaagtcaaaaatgagtgtcagcactactactgattccatgtataatgaaagtagaactttgctagttcctgaaaatttttaacttatttgtatttcagttcagcagcatctttatgtagattgtgatatttaagaattatctgggctgggcgagggtctctttttctctttcagtgatcatctaggcagttattatttaatagtttaatagctcaagtacattccaatagacgaagtgcacacaacacaatatgtgtgtacagtagtagtaaagtttcttttgagtagtc

SEQ ID NO: 32633 - DNA, 622 bp, Homo sapiens
gaggggcggggcggcctctgtgtcgtgtaccgggtcccgtaggctgcgggcagcgaggagcggctggcgctcgaggcggcggacggcaccatgtccccggggagcggggtgaagagcgagtacatgaagcgctaccaggagccgcgctgggaggagtacgggccgtgctaccgcgagctgctgcactaccgcctaggccgccggctgctggagcaggcgcacgcgccctggctctgggacgactggggcccggccggctcctcggaggactcggcgtcgtcagagtcgtcgggcgccgggggccccgcaccccggtgcgccccgccctcgcccccgccgcccgtagagccggcgacccaggaggaggcggaacggcgggcgcgcggggccccggaggagcaggacgcggaggccggggacgcggaggccgaggacgcggaggacgcggctctgccaggtacccggcccggaggggagcgcgaggggcctgcacgcagggacggtttgctctaagctctgagcagctgatctcttatttcttgcgccactcggggctggctcttccttttttttttttcggttgacagaatccgtctctcttgacaaaatagggaaggtggca

SEQ ID NO: 32634 - DNA, 435 bp, Homo sapiens
gatttttactaaaggggttttttaaaagaagtacttcagaatggaggaaaatgactccagaaggaagatagaagatataaaaatgaaaactgaatgagaaattactaaatctaaaaaaattataagatttacatttaaatttagattaaaaataataataacaatatctaatttggaaggagagttcattttaaataaaagaactaactccttctgactattttgctttgttattggaagttaggaggtgagtgatcagagttcaagtattctaagggccttgtattttcaggacaggtgtaaaaatattcataaactttggactttgttgcatatgcatggtaaaatttcaaatattcttatttaaagaataaaaataagactaaaaacaaaaaactttacaaaaatcacttgtatttctatttaaaagccaaa

SEQ ID NO: 32635 - DNA, 331 bp, Homo sapiens
attttggccaggctggtctccaactcctgacctcaggtgatccacccgcctcagtctcccaaagtgctgagattacaggtgtgagccaccgcaccctgcctgtaaagaagtattaatagatgccaatgaacttcctatgtctgaacaaggaaatgataagtatatacaagttttaggaattcagagaagtccatattattctcaggtcaacaaattatttgtacaaggaatcagaattacagattctttttttttagtggttagaattgctttcacaggacatggccacaatttctgaatccccacctgggcgttaattggccagatggcc

SEQ ID NO: 32636 - DNA, 304 bp, Homo sapiens
ggcatatgggatgtaagatgttctttcctatatatggtttccaaagggtgcccctatgatccattgtccccactgcccacaaatggctgacaaatatttattgggcacctactatgtgccaggcactgtgtaggtgctgaaaagtggccaagggccacccccgctgatgactccttgcattccctcccctcacaacaaagaactccactgtggggatgaagcgcttcttctagccactgctatcgctatttaagaaccctaaatctgtcacccataataaagctgatttgaagtgttacctttt

SEQ ID NO: 32637 - DNA, 414 bp, Homo sapiens
tcgacgcttttgaaaacttgggtaggaccagggcaaagtggtgtgtttaatccagttgcatcacagcctcaggacccctgggaggaccttttggctgtcctgggatgtggagcatgaggctgcagcggctccactcttccgcagcctgctgtgcgcgctggctgccgctggcccttcacgcacgacgttcactagggtggcacgcacagtcttccagtgggtccaaaccactgagctttgttgtagtatggcagatcattagctgctggattttgctttttgtgatgatgtatcaagtagcataccaccccagaccaggaaagtagaacatgttagataattttaaagaagggggctggacgcggtgactcacgcctgtaatcccagcactttgggaggccaaggcgggcggat

SEQ ID NO: 32638 - DNA, 549 bp, Homo sapiens
  misc_feature (2)..(2): n is a, c, g, or t
  misc_feature (28)..(28): n is a, c, g, or t
cnttattaaaggggctactgaatgtggnaaacccacacaggtcccccagttcattctagatgactttatccagaatgccgagcagcagagtgtaacatcgtagtaactcagcccagaagaatcagtgcggtttctgtggcagagcgagttgcatttgaaagaggagaagagcctggaaaaagctgtggctacagcgttcgatttgagtctatacttcctcgtcctcatgccagtataatgttttgtactgtaggtgtgctcctgagaaaattagaagcaggcattcgaggaatcagtcatgtaattgtagatgaaatacatgaaagagatattaatactgacttccttttggtagtactgcgtgatgttgttcaggcttatcctgaagttcgcattgttcttatgtctgctactattgataccagcatgttttgtgaatatttcttcaattgccccatcattgaagtttatgggaggacttacccagttcaagaatattttctggaagactgcattcagatgacccactttgttcctccaccaaaagac

SEQ ID NO: 32639 - DNA, 557 bp, Homo sapiens
ttgtgaaagttgagaactttttctagttctggtttattattatacttggtttctagactataacagatgaggagtaaaaaattagaagtgctacttgagaaatgcattttggtagggaaaagaaatgatgtccagcatcatgatagtaaaggagggttatatttctactgttagaagcaataatttataaacttagttatgaggctatttagtttgggaatcagtattcccagagctgaatcagtagttatagaatgttcattattaattgatgattttattaatgattctgaatcagagaatattgttatatttaacctatttcagaagggaaatgagcgtgtgatttagtttagaaggatttctattataattttttcttttaggttttgaggcctatggaaaatttatgcattggctgcataccttgtttttcaagggagtcacatgtataaagaagcttgagaataaagttcctgccttttgagtttctaacagttgtggggcatattattgattgaaaaattaggtgatgttttaacattatttaaacagat

SEQ ID NO: 32640 - DNA, 135 bp, Homo sapiens
atgttggaaatacttggaaaacacttgcttttcctaattataaaatcaacaggtgagaattccattaaacgtaatgagtgaggcagattcacacattcttcaattctttaataaaataacaaaaataacaaaact

SEQ ID NO: 32641 - DNA, 405 bp, Homo sapiens
aggtcagaggataccattttcataatgtttttctcacttttcatgaaatttgaagaagcttaatttttatattatgaaatatttgttggaaagtgtttctattttaaatcaagattatttttaaagctgggtgccatgactcatgcctgtaatctcagtgctttggaggccaaggtgggaggatcatctgagcccaggagtttgatatcagcctaggcaatatagcaagaatgcgtctctacaaaaaaatcaaaaagttagccaggtatggtagaacagcctgtagtcccagctcttgggaggccgaggcaggaggatcacttaagcccggaagtttgagactgcaataagctatgatcatgccactacactccaacctggacaacaaagcaagaccctgtcttt

SEQ ID NO: 32642 - DNA, 819 bp, Homo sapiens
cactgtgccacgggaccctggtctttgaaaccttggcgtgcgcgagaatttcccagtgagtttgttaaaatgcagattcctcgggtctgcgtagacagactgtgccccacgcttttctaagtcagttgtttctcgggctaccctttaagagacactgctggatggcctggtgaagaaaatacagaaacagatgggtacaagaactaagaaaacggctaagaaagtgttttggtcctgactactaccatttcgctctgtgatttggggcaattcacattggcttccctgccctttcttctttgtcaaaagacaaaatcacaacaaatttagttcaaagattttttttttcttaagagacggactctggcaatgttgcccaggctggaaggcagtggctattcacaggtgcggtcatagcaatcatggctatcacaggtgcatcctggaactcctggcctcaagtgatccttctgcctcagcctccggagtagctgggacttaaggtatgacagagccaaaactccaagtcatgtcagtagggcatgcccaatagaaaatgctttgacatctaacaacacccagaaccaatgattcctccctgtggtaccaagaagacctagacatgatcggaacctaaatgctggaactctttcaggagcaaagggtctgttgaccagaaagatccaggggtaaaatccacctcaacatacccgtgtagtcaaatttgacaccctccaatcagaccctgccaagccaaaattcctaatacgtttccttgccatctgtattagtctgttttcacgctgctgacaaagacat

SEQ ID NO: 32643 - DNA, 325 bp, Homo sapiens
gtgtccttgttaagtcttaaacatgccagtcatgttcccccttagggcctttacactggttgctccctctgtgtagaatgttcttccctcagatatccatatggcccactcccacacttctttcaagtcttggttcaaatgtgaccttctcattgaaacctaaactgatgtctgtattttaaattgcagtattcaatcttccccctcaccatcagcctatcttagtacttaaaatcctttttaccctactctgttttatttgtttcttttgagatggggtctcactctgttgtccaggctggagtgcagtggcaggatcacagct

SEQ ID NO: 32644 - DNA, 405 bp, Homo sapiens
tagaattatcagcaatccctcccttgattaaatccagttttatcttaattctcaaccttaaaactcatgagttagaaccttatgcttgacccctcccctccagaatactcattcttctcataagcttctgtatctgtgctaccttgattctttcctttcagctatttttgctttttcaggctcactaggcaaccatgtctttttaaaaaataatagctttattgaaaggtaattcacaaaccataaaattcacccttttaatttgttcatcctgtgattcttagtatattcacagaattgtgcaatgatcatcactatctaattccagaacagttctatcactccaagaagagactcttacaaacaaactgtggtacatccctctggcagaatactatttagcag

SEQ ID NO: 32645 - DNA, 1843 bp, Homo sapiens
actgtggcgtgggagcatctacaaactcctgtggcgagagctgctctgcttccttgggttctacatggcgctgagtgctgcctaccgctttgtgctgaccgaagggcagaagcgctacttcgagaagcttgtgatttattgtgaccagtatgccagcctcatccctgtctccttcgtgcttggcttttatgtgacgctggtggtgaaccgctggtggagccagtacctatgcatgccgctgcccgacgcgctcatgtgcgtggtggcgggcaccgtgcacggacgcgacgaccgcggccgcctctaccggcgcacactcatgcgctacgcagggctctcggccgtgctcatcctgcgctccgtcagcaccgcggtgttcaagcgcttccccaccatagaccacgtggtggaggctgggtttatgacccgcgaggagcgcaagaagtttgaaaacctgaactcatcctacaacaagtactgggtgccctgcgtctggttctccaacctggcggcacaggcccgacgcgagggccgcatccgcgacaacagcgcccttaagctgctgctcgaggagctgaatgtttttcggggcaaatgtggaatgctctttcactatgactggattagcgtacccctcgtgtacacgcaggtggtgaccatcgcactgtacagctacttcctggcttgcctcattggtcgccagttcctggacccggctcagggttacaaagaccacgacctagacctgtgtgtgcccatcttcaccctcttgcagttcttcttctacgccggctggctcaaggtagctgagcagctcatcaaccccttcggagaggacgatgatgactttgagaccaactttctgatcgatagaaacttccaggtgtccatgctggcagtggacgagatgtatgatgacctggctgtgctggagaaggacttgtactgggatgcagccgaggctcgcgccccatacacagcggctactgtcttccagctgcggcagccttccttccagggctccacctttgacatcacgctggccaaagaagacatgcagttccagcggctggacggcttggatggaccgatgggaggggcgcccggcgacttcctgcagcgcctcctgccggcgggcgcgggcatggtcgcgggaggcccgctggggcggcgcctgtcctttctactccgcaagaacagctgcgtgtcggaggcgtctactggggccagctgctcatgcgcggttgtccccgaaggcgcggccccggagtgcagctgcggggacccgctgctcgaccccggcctgccggagcccgaggccccgccccctgcgggtcccgaaccgcttaccctcatccctgggcctgtcgagcccttcagcatcgtgaccatgcccgggccccggggtccggcgccaccctggctgcccagccctattggcgaggaggaggagaatctggcctgagatcttagagcccagccccctaaggacagggaaccaggtccctgcacggcacccacgcaggtgtcccggtctgcataagcctcgtatgcctttgtaaagtccacctacacttttgaccagctctcgctgcccgcatgtgtttggcgctgtgctaggggcgggagttcttccagactcttggaccagcccgccctgaccaccagctctacttcccaacccccactgcctgagaggtctctatcagtgtcctgcctgaattctttccttcaagtgaagatgtgactgactacctcctcgagttgtcatgaggatgaaagaatggcattaaagcatttggtatacagtaggtgctcaataaattgctagtgatttttactc

SEQ ID NO: 32646 - DNA, 398 bp, Homo sapiens
agtggtctgaagggaaaagctgatgtgttttgtcccccaaaagggatagatggcctcaaaggaaaatgtcgcatttggattagatttgtggtaggggaggagtgacctgccaagggctccttgaataaacaaaactgttcctcaaagggctttgggtggaggtcatcaaagcaagttcacagaaagatcctcctccctggtaactctccagagatggctgactctttgcttacataggtagctcaggggtcccacttgaagtcagttgcccagaataagccagagcctgccccctcaagaattcaggaatgtggtttccaatgcaaataaaggctaaattgtagaaacagtgctggagtgtgttcaagccctccctctaggtcctctgagtcatttgg

SEQ ID NO: 32647 - DNA, 498 bp, Homo sapiens
atatttaatttagttttaaaaatcttttctagattgggttagttctttggtagagggaaattgaaatgcataatttcgaagccttctcttttatcctccagaatagtctcccttgaacagcattcataaatggtaggattataacccacctgctaccgagtgatctttgttttgaacctgccactttgtattaaaagcaaactttttggccgggtgcggtggctcatgcctgtaatcccagcactttgggaggctgaggttggcagatgacgaggtcaggagttcgagaccagcctgaccaacaaggtgaaaccccatctctactaaaaatacaaaaaattagccaggcctggtgctgcgcgcatgtaatcccagctactcgggaggctgaggcaggagaatcgcttgaacccaggaggcagaggttgcagtgagccaagatcatgccattgcactccagcctgggcgacagagcgagactccatctcaaaaaaaaaa

SEQ ID NO: 32648 - DNA, 372 bp, Homo sapiens
cctggaccaggcctaggcaagtggggagaaaaggaggaaaatgccccaacaatgataatctctcctttctaaaacttggtgtgaagcattgtcatccctgttgtcagtaacacaagctgtcattctgcagagctagtttagccattccctaacagacagctagttaatagtctcccttctgtggtctagcttcaattatctattcctcagacattgctggtgggaatgtaaaatgttacagccacttgaaaaacagtctgatagtttctcaaaatattaaacatagacttaccatgtgactgagcagttattcctaggtatatgtatttccaggtatagatcctaaagaaatgaaagcatacgttcaaacaa

SEQ ID NO: 32649 - DNA, 505 bp, Homo sapiens
aattagccttttcgcttcaaaaatttcaatgtcatgacagacaaaaactgagaaaacaaaaaggattaagggagcaaaaggacaaaataactaaatgcattcaatcatggacaggggaaaattattgggaaatggatgatatttgaatatgaactaagatgagatcacagtattttatcaaatttaaatttcctgaatttgatcattatatggggatatacaagagaacaatcctcatttttaggataaatacattcaagtattatttagggaaaaagacaaagtctacatctagctctcaaatgatcaagaaagaaataagtctacaacagtaacgtgtttgtatgtgtacgtaaacaaatgtaacatagtgttaacaattgtggaatctaagtaagggtatataagagtttaccaggccgggcacggtggctcacgtctgtaatcccagcactttgggaggctgaggcgggtttgagaccagcctggccaacatagtgaaacc

SEQ ID NO: 32650 - DNA, 302 bp, Homo sapiens
tttttaataacttttttctagactcttacttataggattcaattggactgcaaacattttaaaatttataatttaaatgtaaatttcagcttcaccctgtctgaataatcacagattgcatataagaagattcaaattaatgaggttttcttttctaagaactactaagctaatataagaaaaatgtatacatagtataaattaaaagaacatacgggtttggtttttttttttttttgagacggagtctcactctgttgcccaggctgcagtgcagtggtgtgaactcggctcactgcaac

SEQ ID NO: 32651 - DNA, 639 bp, Homo sapiens
gacatttttcacagaaatagaaatagtaatcctaaaattcatgatatcacagaagatactgaatatccaaagcaatcctaagcaaaaagaacaaaatgggagtcatcacactacctgaccttgaaatatactacaaagtgatggtaaccaaaacagcatggttcaggtattttttaaaaaccacacaaaccaatggaacaaaacagagagcccaggaataaatcccatttacagccaactgatttctaacaaaggcacaaagaacattcactgggaaaaggacagtctcttcaataaatggtgctgggacactggatattcatatgcagaagaatgaaagtagactcatctctcaccatacacaaaaatcaactcaaaacaccaagtatgctggctcatacctgtaatcttagctactcagaaggctgagttgtggctcacttgagtccaggagttcaggaccaagctgggcaatgtggtgagactatgtctctaaaaaataattaaaaagcaaaaacaaaaattgggaatgtatttttagggcaatttgaatctatgctctcaggataatcaactcaaaatggtttgaaagcttaaatgtaagagcaaaaactatgaaactacagaagaaaacatagg

SEQ ID NO: 32652 - DNA, 425 bp, Homo sapiens
tagagatgagggtctcactatgttgctcaggttggtcttgaactcctgggctcaagcaatcctcttgcctcggtctcccaaagtgctgagattataggcagaatccaccgtgcccggccctggggccatttaatgacacaaagtataacatcaaagcaggttaaaaaaaaaaaagatgcagttttgaaaaataagctcagaagaaaaagagtaaataatcagaaagccactgtagcctggtggttaagagcaagagtgaggctgggtgcggtggctcacgcctgtaattccaacactttaggaggctgaggtgggaggatcgcttgggcccaggaatttgagaccagcttggtcaacatagcaaaaccccatctctacaaaaaaacaaaaaaatatgctgtgtgtggtggtgcatgcctgtggtc

SEQ ID NO: 32653 - DNA, 101 bp, Homo sapiens
taaaagctaatgaaaggaattcatttcttaaagtgaaactcatatttctgatttttacatttcctttctcagagaaggaatgcaatggtttgaatgtttat

SEQ ID NO: 32654 - DNA, 484 bp, Homo sapiens
aatgctgaaactctatagcaattaaataactctccatttttccttcttccaagcccctggagccaccattctactttctgtctctatgaagtctgactgctctaggtacctcatgtaagtggaatcatacagtgtttgtctttttatgattggcttattttacttactataatggccttaaggctcatccatgttgtagcatgtgtcacaatttcctttttaaggtggaacaatatactccattgtaaatacacacaccactcatctgttgatgaacacttgggttgcttttgcctcttgtgaataaggctgctatgaatataagtgtacaactatctctttgggaccctgctttcgattcttttgggtaggaacccagaagggcactactggatcatatggtaattctgtgtttaattttgaggatcacttgaactcaggagtttgtggttccgtcgacgcggccgcgaatttagtagtagta

SEQ ID NO: 32655 - DNA, 527 bp, Homo sapiens
tacaagacccagcctgatcatagtgcttgggaagccatccctgactttctctgccaggttgtgtaaagatgcccccctgcagagcacccttcattgctctgtacatctcagacatgtaataactgttctattacatgtctttcttccccttagatctagggtctggagggcagagtctgtgctacacttttctgtttattcaactattcacaattgttggtacacagtaagcttgcaatacatacttttattgatatgtcataatattgtctaaggcaatgaatccccaccttagctgcatgttagaatcacccggacagcttttaaaaatcgaagtaacatcttggcacagtggcgggctgtagacccagcttcttgagaggctgagcggggaggattgcctgagctcagaattcgaatgtagcctgagcaacatagtaagacctcttggtctctgaaaaagaaagaaagaaagaaagaaagagagagagagaggaggggagagaggacagaaagagagcaaagag

SEQ ID NO: 32656 - DNA, 92 bp, Homo sapiens
agcttaatgggtatgtagtgcgtctaagattctcttgcacaagattaaaattgttgtacatgttaaatgtttccagatggagaggcctccac

SEQ ID NO: 32657 - DNA, 340 bp, Homo sapiens
acagtctataaccaagtaacttacctactaacttatctagttacttgttacttgttatctagtaacttgttacgttattgagcactcatttatagtacttgctctgagtctgtgaggaggaagtctttaggagaagcagggattatcagaacaatttacagttgtgctttaatggacaaaaccaaaacatgattacaatttgacaattttgtttatatatagtgcttagtatatttatataaactctctagagctgcactatctaaaatagcactagagacacgtggttatattagttggcttggactgccacaacaaaatacaatagactcgatgtctt

SEQ ID NO: 32658 - DNA, 504 bp, Homo sapiens
aactccggagcttaagtgatcctcctccctcagtctcccaagcagctaggactacaggctccagccaccatgcccagctaattttttgaatttttatagaatggggtctctatgctgcctaggctggtcttgaacttgtggcctcaagggatcctcccatctcagcctctcaaagtgctgggattataggtgtgagccactgcatctagcttgttaataatatcttgataacaaaaagacctcttaaagtgtttaaagtccataataaggccaggcatggtggcaggcacctgtggagctactcaggaggctgaagtgggacaattgctcgagcccaggagtttgaggctgcagtgagctatgttcgcaccactgcactcgagcctgggcaagagcgagtggaaaaaaggaaaaaaaaaagtctataatataaagtttattttttatcagagtacatttatttttagccagcctctaaactcatccagagccacatacacgctg

SEQ ID NO: 32659 - DNA, 1409 bp, Homo sapiens
ttggggatcctcactgagcacttgctggctgtcctgcaccctgcccggtgtgggtggggcgatcctggacatgctcccagacccaacttgcgcccagccttgcctctgtgcctgctctgtaggcatgtctcctccgcagagtcttgttggcaaaaagataccttttctaggaaaacacgttctctggagcaagttagctaaagtcagtttccagtttgtacctttcacatggtcttccccagactaaaaacagtgcatcttttacatgatatttttgtactgtttaaatcactaatgctaccagttatttttggtgaacttgtctctgtagagtggaggagataagggcatattaggtgcaaacaaaggggaggaggattgtgttaaaaaaataaaaataaaaaaatgatcaggatagggtgaggacagagtcctgatgtttttacccaacacatttattggcccattagtcaaacttttaataaaagagtatgaagccagcatcaaaaccaaccagttttgttgttgcccaacccaccttaatccacatttccattttgtctgagacacagtgtgaaggactctcagttgccatattaaaaatccagaaccttgacctgggcatggtggctcatggctgttatcccagcactttgggaggccaaggtgggcggattacctgaggtcaggagttcaagaccagcctggccaacatggtgaaaccctgtctctacaaaaattagccaggcatgatggtgggtgcctttaatcccagctacttgggaggctgaggtgggagaatcgcttgaacccgggaggtggaggttgcagtgagccaagatcgcaccactgcactccagcctgggcaacagaacgagactgtgtctcaaaaaaatccagaagctttatcccaggtctactggacttcctagaacaccaagaaaggaaagggaattcgcctgtcatgatttagaatcatgggggaatattgtactacccaaataatgagtgacaaaaaggtacctccttgtttttaagccacaacttgaagcagttagcaaggaggtctattttggtgagaaagttggtgggttccattttcaacatgtgattcaaattacttaatacaggctgggacagggagaatgtgagcagctgatattccagctgagattaggggtccatttgtagagatggttccagaagaccaaaactatggaaagaatgacagggtcaaagtggaggagctgccggggacatccagcagtcagagaatttctgaattgaaaacatggccaagcgcagtagctcatccttgtaatccccacactttgggagaccaaagcagaaggatcccttgaggccaggagttcatgaccagcctaggaaatacagcaagaccccgtctc

SEQ ID NO: 32660 - DNA, 213 bp, Homo sapiens
atgtccaacaacatggccaagattgccgaggcccgcaagacggtggaacagctgaagctggaggtgaacatcgaccgcatgaaggtgtcgcaggcagcagcggaactcctggctttctgcgagacgcatgccaaagatgacccgctggtgacgccagtacccgccgcggagaaccccttccgcgacaagcgcctcttttgtgttctgctctga

SEQ ID NO: 32661 - DNA, 510 bp, Homo sapiens
tgccagatcttgtacttttgcattggcaataggctgggcattaactcatgagcttggagaaaaatgacgatttgtcagggtaggttatggggagaatccctctataaggcaactgtagtacagtaatttaaagatgatttcaggtagtaaattcaggtttcctcagacagagaggggccagaatgcttctaccagtaagggagttttacgttatttgagggttcagtttctcagcttcaagtgtcctctacccaatttcagggtttcagtgtgtctccatcacttcctttatctaagcatcagagacctggtgaggataagcatttaacttgggctgcaattctgcaacccctgaaatccgactgtgggcctgatcctcagttttatcttcctcatagaggttttcagactttgcatcctagtttgagttagactgacaaagtcaacattcattttagggtcaacagaagcaaccagcttatcccacaatccttatattgactatgatct

SEQ ID NO: 32662 - DNA, 870 bp, Homo sapiens
agcggagggggtgtagtaatttgtcctcagaccacaaagagatggttttacatccctaactagctgcatagaaagctgggagctgaaccagcatgccatactgccacctacctacagcagcgctgacagttcttcagctcagcccgcaaaccagccagcatctgccctgtgcccggcaatgagcccgctccagctgggaatgcccaggtcctggtctaactgagaagcttgtagcaggggaactttgaacctggctgcctggaaacttggaagcaacccagatgtcttcagtaggtgaatggataaataaactgtggtgcatcccaatattggaatatgattcagcactaaaaagaaatgagctatcaagccatgaaaagatatggaggaaatttaaatgcacattatttaagttaaggaagacaatctgaaaaggctacaccctgtatgagtccaactctatgacaccctggaaaaggcaaaactacggagacaataaaaagatcaggggttgccaagggttggatgttggggagggatgaatagatagaacatagaggattcttcagacagtgaaactactctgtctgatactataatggtggatacacagtattatacaatcatccaaacccgtagaatgtacaacaccaagactgaacctccaactcctggggctcaagtgatcctctggctcagcctcccgagtagctgaaactattgggtgcacacgaccacatctggccaatttctacaacaatttactatagaggcaggatctcacctatgttgcccaggatagtctcaaactcctggcctcaagccatcctcctgcctcaaccttcaaaagtgctgggattgccaccaccc

SEQ ID NO: 32663 - DNA, 500 bp, Homo sapiens
agcggagggggtgtagtaatttgtcctcagaccacaaagagatggttttacatccctaactagctgcatagaaagctgggagctgaaccagcatgccatactgccacctacctacagcagcgctgacagttcttcagctcagcccgcaaaccagccagcatctgccctgtgcccggcaatgagcccgctccagctgggaatgcccaggtcctggtctaactgagaagcttgtagcaggggaactttgaacctggctgcctgggttgaaaatcacacaggatggaaagagaagtgttctgcaggcaacttctgctctcagcctggctgcagagctctctccttgggcaaaagccacagcacctgctctctccttaggggccagggagtgaagacaaagggaaaacacagcaagaaagaaagaaatgtgtgacctcaaagacaatccatccagacatatttgtgtgtggtatctacacattacatcgctgaaaaatgatgaa

SEQ ID NO: 32664 - DNA, 506 bp, Homo sapiens
gaaaagaagaaacgccctatagaaagaaaagcaatactgtttctattacacaaaaggatactgggacaagggacatctggagcccatgatgtgggcagctaagcaggctgcggctacagaacaactgcaggccacacagtcaggagccatcacagtcaccaagcgccaatcacacatgaccacctattaaaccacaatgacactaatcgctgtgccatctatacggaacactcccccacataaagcagccacagtccttatcaacagagatccagactgaaaaatccatctccccaagccctcactcagggaaaactactgcccagcaccttcccctcacaactttttgtttaaaacgaaatattcaagcataagctacttttaacttcccccttttacttaaaccaagtgttatgagattaatccccccaaattaaccagaatgtaatactacataataattacccagaaagcatgatattccagctactgggtatgttttaacg

SEQ ID NO: 32665 - DNA, 3724 bp, Homo sapiens
ccgccgcggtcacagccacccgcgggaagctcgtggccgggaccccgaggcgggagcgcgggctgggccgggctgggccacgcgcacgggctcggccgccgcccctgccggttgcataccctgtcctgagggcgcggcacggagtgcatgcgggccgctgccatgacgaccgccatcttggagcgcctgagcaccctgtcggtcagcgggcagcagctgcgccgcctgcccaagatcctggaggatgggcttcccaagatgccttgcactgtcccagaaacggatgtgccccagctcttccgggagccttacatccgcaccggctaccgccccacggggcacgagtggcgctactacttcttcagcctctttcagaaacacaacgaggtggtcaacgtctggacccatttactggcagccctggccgtcctcttgcgattctgggcctttgccgaggctgaggccttgccatgggcgtctacccactccctgcctctgctcctcttcatcctgtcgtcaatcacttacctcacctgcagccttctggcccacctgctgcagtccaagtcagagctctcccactacaccttctactttgtggactatgttggcgtgagcgtttaccaatatggcagtgctttggctcatttcttctacagctctgaccaggcctggtatgaccggttctggcttttcttcttgccagcagctgccttctgtggctggttatcttgtgctggctgttgctatgccaaatatcgttaccggaggccttatccagtcatgaggaagatctgtcaagtggtgccagcaggtctggcttttatcctagacatcagccctgtggcacaccgtgtggcgctctgtcacctggctggctgccaggagcaagcagcctggtaccacaccctccagatcctcttcttcctggttagcgcttatttcttctcctgccccgtgcctgagaagtacttcccgggttcctgtgacatcgtgggccatgggcatcagatcttccatgcatttctgtccatctgtacgctctcccagctggaggccatcctcctggactaccaggggcggcaggagatcttcctgcagcgccatggacccctatctgtccacatggcctgcctctccttcttcttcctggctgcctgcagtgctgccaccgcagcccttctgaggcacaaagtcaaggccagactgaccaagaaagattcctgaggctggcaagtggggcaacgtgtggaggaagcccctcataatttggagaaaacttgatacaatagaagctgacttttaaggcattggcttttaaattaatacatatatccaaggatatgttatagctgcagtgtttgaaagccaaaggatttaagagttttgttgttgttaataaaaggaatactccttttccttttggatcatagcttaacaaggcacaggaagggaagggatcttgactaagattcatgagacattgaattaaggagaatcatcttcatgcctgaaaatttagcaaaattccgactatggcctccaggggcaattcctaaaagctgaatggataataaaattggactggaaagtaagtaggtggctggtcctcaccctgttggaatggctatcctactatgctgttctttggtaatggaataaattgacccaaggaccgaatttcatttggatttcaaattgtccagagtggaaaagccttcaagatgacatgatgaattactcagttcatctgatttctggtccctcctttctcgacaactataatactaacccttttctcaggataactgtctacacctggcagttttctctgacgtgctgttcactcacatccctaccttgcatggtaatataaaggactaggaagcagtcatacttccaggaaatgcttggattcatgtggacattcaggaagcttattctcatataatactaatctaaacagtactagaaattacagtgccaagagccaccaggaggcccagccaataagcatagatactatatggtatcatgggacccatctattttttaccagtggactacaggattacttgagagttatcagggctgcctaacagaccaggagatctgggggttgcaccagggaatcgccatatttgaccagcatgttttaaaagctcttggtaggattagttggttctaaggatccctctagggacctcattatttcaagaggaacccaaagtccagcctcctacatagatgctgccccacgaaggacccacaaaactaacctagttcagggttctcaggcaggcagttctgcttcagcttagagcagaacccataaaatactcaagtactgggataggcaagcatgtgtgtttactgtggattggtccctgaaggctcctttgggtgagaacatgtgaaccaggcaccctggtttgtttggagcattgctgcccagaagcttctatgggataggtggtgcttgggattgatgtgttgtggccatgcagccctccctgaggattgacttctgcactaatccagtgaaggaggctgtgtcaaaagaagggctcagaagccctcttttcagaggcaatgattcctgtcagtatgaggtcccttagttactaaaaagggacatgatttaactccagtttgatgaacctcctccgagtttactttattgtcttcaaatcttttgttttcttcctttttgtgagatttgtgggttttgtgccttataaatggaaatgtatgaacacaatatatgctcatgtagaattttctgttctgggttattgggataagaaaaaatatatattgctcttcaactagtgaatgaaagaaacttcagaaagctagaattgcttatcaatcaaaagactttctcaatctattttggccacaaacaaacatattcaactgaagctttccaataatctttatatcaagaaagcatgcgtcttgtcagctacattgttttcttagatggatttctcctgttaatcctcaaatatctgaacttctgtgttacccaagtgtcttatacaagcttctggtgtctaggacaaatttatggcaaataaaattagcaaaactgaactgggttgaactgaacaagaggatgggggaattgtgcaaatacattgttagtagaaggtcaatttaaaatagggactagaaattatttgaagttttctttattacggattcaaagacttattttgaaagttggaaggagaagggagggaagagagcagaagggaagaaggtgtaagtcaagctcttgaatataactggtggtattgtgggcagagatctttagttcaaatccacgtattttttaaaagagagaaccggaggtagagcaatgatcagatgggtgcacagaccagtgccaatctgaacattgttaatggcctgtgacatgatgagcacaggaacaggcatgaagatattgccatacaattttaatttatacaagtattggcccctcaagtggttggaaattttttttttaatctctttttctgagacagggtcttactctgtcgcccaggctggagtgcagtgatgcaatcacggctcactgcagcctcgacctccccagctcaagcaatcctcccacctcagcctcctaagtacctggtactacaggcgcgtgccaccacacctggctaatttttgcattttttgtagagacagggttttgccacgttgcttaggc

SEQ ID NO: 32666 - DNA, 392 bp, Homo sapiens
acaaagcaaaagcaaaacatgcctgtagccacattaccccttcccgccaagacagtgtcacaggaaccatattcatttgcacacctagggcaaaaaccccagtcaaatataagaagtaatgatttccaagaccatgagcatcaggcaacaaaggacagtgatcctgagctatgagaaatgaaggaggcaagccctgtcattgccccagcttactgtcttgagagtttccaggctgtggtgccaggagggtggcctagatagccgacccagaggagagaattgcagaaagaaagatctccagagatgtgcccaccaccctgggacccagcagcgtactgaccagcccgtgtaagtaaccaagactggaggacaaaaagggggatgctaagatc

SEQ ID NO: 32667 - DNA, 347 bp, Homo sapiens
gaagggcctgagagtggacagagagacacaggcaagggagagggaggaaacaaaggggagggagaaaaacagccaaaagagttcatttaacttgagtttctctgtccaagaggaatgagccattgggaatatactggataccattgaatacttccagctgcaaaggatttatcagtgaggagctctcagctgctagtggcagagacctgatttaaaatcaggcttggctgggcatgatggctcacccctagactcccagcactttgggaggctgaggcaggaggattgcttgagcccaggagttttttgagacgagtctgggcaacacagtgagaccgcgactctac

SEQ ID NO: 32668 - DNA, 413 bp, Homo sapiens
tctgaaggcacacaaataatagcactggcaaatttgaatagtttcccttgttaccaaatctacgttcttatttctaatatggaacgattatttctagtatggagagaaatatggaatttctaatatggaagatttagcatggtgtgtcattgtaaaaatttaggcagttcttggataagtatgtccagccttccagagactataagtgtagtaatattagtgcctgttagtcatattgtgtatcttcctgatacccaattagatctctgattgttttttctttttaattaaaaggagctgaaagatgactcagttaagaagctggaaaataaaaccaggtctctgtaactgtgctgtcttattctgaactgaaagtctttctgcaataataatgatggtgataataaagctaa

SEQ ID NO: 32669 - DNA, 368 bp, Homo sapiens
tttttgacacagtatctcattctatcacccaggctggactgtaatggcaaaatcttggctcactgcagcctcgacctgagctcaagtgatcctcccacctcagcctcagcaccaccacccccccaacatcccattaggtgggaccacaggtgcatgccaccatgcccagctaattttgtatattttgaagagatggggtttcaccatgttacccaggctggtttggaactcctgggctcaagcaatctgcccacctcagcccaacaaagttctgggaatacaggtgtgagccacggagccaggcctataaatgcctttttcttttttaatctcaaaccacctaactcaaaacttcaaggaactagaaa

SEQ ID NO: 32670 - DNA, 517 bp, Homo sapiens
gctccctctactttttcctcgtcacctttcctaccctccctcaggccccaccaaagacacctagaagatttcataacacattcatactgagatcaccagagtcagtgcatctctgcttccggggataacaaaattttaactcaggatgaacccttaagggatcaagaccctagaggtagaatttagggttgggaacccctgaggcctcctcaaggaggcagctgtgctgcagtagaaaatgcctgaccaggctgggcatggtggctcaaacctgtaatactagcactttgggaggctgaagtgggtggattgcttgagctcaggaggtcgagaccagcctgggcaatatggtgaaaccctctctctaccaaaaatgcaaaaaattagctggtgcctgtagtcccagctactgggaggctaaggtggaaagattgcttgagccccagaggtggaagttgcagtgagccaagatcacgccactgcattccagcctgggtgacagagcaagacccatgtc

SEQ ID NO: 32671 - DNA, 649 bp, Homo sapiens
tcattaaccctcagacaacaaattaacttaatataggtatgtatcaaagcatgccaattcaagcaaaatacaattgaacaagcgttgcaagattataacacagcctctgatacactgtaacaatcaatctgtgttacttccaaaaggactgtgatccttttagactatataaagcaccactattttaaaaaaaaaacttccaattttggaatagttttttttttttcctccttaggatttaaaaaatccttggagaggcgggagaaggttaggcaatccgtgcttcaaatgcaatgcgcacacacatgcagccgtgtacttagttactgctgcaaacactgggcgacccagcgtagtcagtcagcactggggcaaggcttgacccattgtttttagtgagtatcaatgaataactggcatgcataagtcacctcttggtttgctgaggtcaggagcagccaaagattcttttggtggcagagtagaaaaaaaagaaaacatttgtaattaaaacagtcggctgaaaaggcaataaaggtaagtacacagaacaatgaaaactgcttacagaggcccaatcagccatacagcatgtccttacgccagtatctatgacaattccaaatggctgagaaatgtatgtaccaca

SEQ ID NO: 32672 - DNA, 378 bp, Homo sapiens
tgcctggagccaatccattgaaagtccatagatttcaggtgaagactctcaggcagtgactgtaaagaatgccaagattatacccaagacccatatatgcccctcacagcaacaataataaacagcccatctctgttcattagcatttttcttgaaaacagtcttgcctctgacaattatctatgtgtgaacttaagcaagactaaccttttccgagccccagttttttctctgtaaagtaggagtaataataccaaccttgcaagattgttgaaagtttagcaataataaatgtaaagttcctagcattatagtagggcactcattaaattacgtgtgtgtgtgttccttatcatttggaaaatacagaaaattaca

SEQ ID NO: 32673 - DNA, 274 bp, Homo sapiens
tggaacctctgctcttgggaaaggctttgatagctttctcttaaatactagtgttcctgatgggagaaatttaacctgaagcatcctctctgactgcaatgaaggtgttgtcctgttagaactgcactcagagcactgtaaagaattatataagtagccatcaccttaaccacatcctcaaacattttcaatgcaatctagcggagaatgattttctgaaagaatacatatctgattttataacagaaataaatggaaatatgatttgttttat

SEQ ID NO: 32674 - DNA, 426 bp, Homo sapiens
tttttttaagccatcaggtttgtggtaatttgttatgatggccccaggaaactaatataattgcattgcggttacgtcaaagaatgttcttgtttgcaggaaatacacactaaagtacataggagtgatagacataatgtcagcagcttaccctcaaacagttcaggtgttttgaactgtatttacacctctattataatttttaaattgttttgaaattttaaaactattttaaaacattactagagcagttgccagatcatggaggttagcaagattgcaatttcccaagaccactccaagccatgccttggtgatggcccagactccaaaggatatgggaatcacagagtataaataaagagtaataaatcaagtgttggagtttgccttccaatatgtgtctgcaattctagactatgcaaa

SEQ ID NO: 32675 - DNA, 3402 bp, Homo sapiens
cgcgggcttgcgggcaggggctgcagggaggaggagaggacccgcgcccgcgggggctgggcggaggcggggccgggcttccggacagaggccaatcgctgccctcggggcctccagcgccggctctgggccgaggcagccagagcgcggaagaggcctggaaatccacgcggattcccggagacggcgcctctgctctgcgggttcgtggcgaggaagtccacccactgctcccgggcgcaggtctgcaggtccgcgcccactgcccgcggcgccactgaccatgtcggagacagagtttcaccatggtgcccaggctggtctcgaactcctgaggtcaagcaattcacccacctcagcctcccaaagtgctggaatgacagtgactgatcaggcttttgtcacactagccaccaatgacatctactgccagggcgccctggtcctggggcagtcactgaggagacacaggctgacgaggaagctggtggtgttgatcactcctcaggtgtccagcctgctcagggtcatcctctcgaaggtgttcgatgaagtcattgaagtgaatctaatcgatagtgccgactacatccacctggcctttctgaagagacctgagctcgggctcaccctcaccaagcttcactgttggactctcactcactacagcaagtgtgtcttcctggatgcagacactctggtgctgtccaatgtcgatgagctgtttgacaggggagagttttctgcggccccggaccccggatggccggattgcttcaatagcggggtgtttgtcttccagccttctctccacacgcataaactcctgctacagcacgccatggaacacggcagctttgacggggcagaccaaggcttactgaatagtttcttcaggaactggtcgaccacagacatccacaagcacctgccgttcatctataacttgagtagtaacacgatgtacacttacagccctgccttcaagcaattcggttccagtgcaaaggtcgtccactttttggggtccatgaaaccttggaactacaagtacaatccacagagtggctcggtgttggagcaaggctcagtgtccagcagccagcaccaggcggcattccttcatctctggtggacggtctaccagaacaacgtgctgcccctttataaaagcgtccaagcgggggaagcacgcgcgtctcctggtcacacactttgccacagtgatgtgggggggccgtgtgcggattcagcctctggtgttggagagccgtgtgaaaattcaacacccagtgcgggcgtgccgtgtgcaaattcaccactgggttctaaccagcctgctcagggccttccggagccgacccagatagtggatgagaccctgtccctacctgaaggacgccgttcagaagatatgatagcttgtcctgaaactgagactcctgccgtgataacgtgtgacccactgtcccagccttcccctcagcctgcagacttcacagagactgaaaccatcttgcagccagcaaataaagtcgaaagtgtctcatccgaggaaaccttcgaaccaagccaggaactccctgctgaggctctcagggaccccagtctgcaggatgcactggaggtcgacctggccgtctctgtttcccagatctccatcgaagagaaggtgaaggaattgagccccgaggaagagaggaggaagtgggaggaaggccgtatcgactacatggggaaggacgcgtttgctcgcatccaggagaagctggaccggttcctgcagtaatccggcagctggtgggcgttgtgtgtagttagacaatgtcctgttgggtggtcctgttgcgtggagatctcctctggtcctttcaaagggaaacgctgttgaaccttgtgcctctatttatgcttaatccatttgagtgcctcacacaaaaaacgtagagtatagaaatccaccttaaagcccctcgccccaacttctccaccaacgccttctgggctttcttcagaggtcacttctacccttgaagctgtcggcaaaagcgagcagtaataacattctagtagactctcgatggtggtctccgctcttgcccgaaggacctctgaagtacgctggagctgtgttgtacaggtgctgtgagacctaccctattcagaattaaacctcactgcaaatttcctcccatcacgaagctaacaacactaatatacgtatttagcacctctgaggctttgccatggagacccatttctgtagggctaaggaaacatttagacgtggtgactgactttcatttggacttggcgaagtgtatctgagaaacacctcggctgtggtctctctgctttaaatcctaacaggacttcctagagcgttgacagaaattctactcgtggacgttgggaagaaagattgtaggtggcttggggaatgtgggtggcttagaggatctaaaccgattcacttcctggttgagaagcaacgagggcttgctctaaatcgtttagaggataacaggatctagagatgctctctgcttgacaacaaaagtcagggtgcagtcggtccacccttgactgctcttggcttggtctctaccctcactacctcagttctcaataacttagtgaatcactgccctcctcaaagccatttccactcagctctttccagagaattctcagttttatgagacgggaaactttatttcacgagaaagcctcattgtcagaagtatcttcattcaatgggcacaatatgctgtgtatctcaccaggtagctgtcaggggccaccgagagtgtcgttaaaaatgggcatcgttgtaataaaggaggaaagtgcgacttttgaaatgtttggaaggtttatttctcatgcacattccagggaaaagcagagagtaaattagagacgggataggaaggccgtgggagaactcgatcctagcctgtgtcagctggatgtgtttacgtggagaggcgtggccactttttaggtcacctgaagcagtttagcctttggatagaggaacctgcctgaatttatggcattagtggtggcatttttttgtgtacaagatgtgggtgatggaggggctgtttctttttccgtgtgggtggttaataatcgtcagtctcggagggcgatgctcgtaggatatttcaggtgagtcagggttggatggtcatcggctttcagagggagaccacgggaatgttcagggaaacaatgtcagcttctctgaggaccagaattcatgttcacgggcagtgatgagttggcttatggagtgagtccagtctggaattccgccgtgcattctagcctgtatcatctcatttggacaaatgctggcacgttgaaattaaaatgttaaaaaacaaaaaaaag

SEQ ID NO: 32676 - DNA, 3273 bp, Homo sapiens
ggggaggcaacatatctaggtagaggccgggtgttaatcggccgtcgggtggtgtcccgggggcgttgtcgttgctgggcgcatgggtgttaagacgcagcggggtcgcaggtgactgtggggaggacagggggtcaaggggcccctggccagagggcacgaggctgacctggagcgccaaggaggaagtgcggggcgtggaggtcgcaggggcatcgggggaggcaggggccccgtggggcgcaggtgacatggagtgggtaggaggccgggggtgacaccggcggggcctgcagccgagggtgtcgagactgccacgctgtcgcccccaggcctggaaatccacgcggattcccggagacggcgcctctgctctgcgggttcgtggcgaggaagtccacccactgctcccgggcgcaggtctgcaggtccgcgcccactgcccgcggcgccactgaccatgtcggtgactgatcaggcttttgtcacactagccaccaatgacatctactgccagggcgccctggtcctggggcagtcactgaggagacacaggctgacgaggaagctggtggtgttgatcactcctcaggtgtccagcctgctcagggtcatcctctcgaaggtgttcgatgaagtcattgaagtgaatctaatcgatagtgccgactacatccacctggcctttctgaagagacctgagctcgggctcaccctcaccaagcttcactgttggactctcactcactacagcaagtgtgtcttcctggatgcagacactctggtgctgtccaatgtcgatgagctgtttgacaggggagagttttctgcggccccggaccccggatggccggattgcttcaatagcggggtgtttgtcttccagccttctctccacacgcataaactcctgctacagcacgccatggaacacggcagctttgacggggcagaccaaggcttactgaatagtttcttcaggaactggtcgaccacagacatccacaagcacctgccgttcatctataacttgagtagtaacacgatgtacacttacagccctgccttcaagcaattcggttccagtgcaaaggtcgtccactttttggggtccatgaaaccttggaactacaagtacaatccacagagtggctcggtgttggagcaaggctcagtgtccagcagccagcaccaggcggcattccttcatctctggtggacggtctaccagaacaacgtgctgcccctttataaaagcgtccaagcgggggaagcacgcgcgtctcctggtcacacactttgccacagtgatgtgggggggccgtgtgcggattcagcctctggtgttggagagccgtgtgaaaattcaacacccagtgcgggcgtgccgtgtgcaaattcaccactgggttctaaccagcctgctcagggccttccggagccgacccagatagtggatgagaccctgtccctacctgaaggacgccgttcagaagatgtcgacctggccgtctctgtttcccagatctccatcgaagagaaggtgaaggaattgagccccgaggaagagaggaggaagtgggaggaaggccgtatcgactacatggggaaggacgcgtttgctcgcatccaggagaagctggaccggttcctgcagtaatccggcagctggtgggcgttgtgtgtagttagacaatgtcctgttgggtggtcctgttgcgtggagatctcctctggtcctttcaaagggaaacgctgttgaaccttgtgcctctatttatgcttaatccatttgagtgcctcacacaaaaaacgtagagtatagaaatccaccttaaagcccctcgccccaacttctccaccaacgccttctgggctttcttcagaggtcacttctacccttgaagctgtcggcaaaagcgagcagtaataacattctagtagactctcgatggtggtctccgctcttgcccgaaggacctctgaagtacgctggagctgtgttgtacaggtgctgtgagacctaccctattcagaattaaacctcactgcaaatttcctcccatcacgaagctaacaacactaatatacgtatttagcacctctgaggctttgccatggagacccatttctgtagggctaaggaaacatttagacgtggtgactgactttcatttggacttggcgaagtgtatctgagaaacacctcggctgtggtctctctgctttaaatcctaacaggacttcctagagcgttgacagaaattctactcgtggacgttgggaagaaagattgtaggtggcttggggaatgtgggtggcttagaggatctaaaccgattcacttcctggttgagaagcaacgagggcttgctctaaatcgtttagaggataacaggatctagagatgctctctgcttgacaacaaaagtcagggtgcagtcggtccacccttgactgctcttggcttggtctctaccctcactacctcagttctcaataacttagtgaatcactgccctcctcaaagccatttccactcagctctttccagagaattctcagttttatgagacgggaaactttatttcacgagaaagcctcattgtcagaagtatcttcattcaatgggcacaatatgctgtgtatctcaccaggtagctgtcaggggccaccgagagtgtcgttaaaaatgggcatcgttgtaataaaggaggaaagtgcgacttttgaaatgtttggaaggtttatttctcatgcacattccagggaaaagcagagagtaaattagagacgggataggaaggccgtgggagaactcgatcctagcctgtgtcagctggatgtgtttacgtggagaggcgtggccactttttaggtcacctgaagcagtttagcctttggatagaggaacctgcctgaatttatggcattagtggtggcatttttttgtgtacaagatgtgggtgatggaggggctgtttctttttccgtgtgggtggttaataatcgtcagtctcggagggcgatgctcgtaggatatttcaggtgagtcagggttggatggtcatcggctttcagagggagaccacgggaatgttcagggaaacaatgtcagcttctctgaggaccagaattcatgttcacgggcagtgatgagttggcttatggagtgagtccagtctggaattccgccgtgcattctagcctgtatcatctcatttggacaaatgctggcacgttgaaattaaaatgttaaaaaacaaaaaaaag

SEQ ID NO: 32677 - DNA, 3030 bp, Homo sapiens
cgcgggcttgcgggcaggggctgcagggaggaggagaggacccgcgcccgcgggggctgggcggaggcggggccgggcttccggacagaggccaatcgctgccctcggggcctccagcgccggctctgggccgaggcagccagagcgcggaagaggcctggaaatccacgcggattcccggagacggcgcctctgctctgcgggttcgtggcgaggaagtccacccactgctcccgggcgcaggtctgcagccaccaatgacatctactgccagggcgccctggtcctggggcagtcactgaggagacacaggctgacgaggaagctggtggtgttgatcactcctcaggtgtccagcctgctcagggtcatcctctcgaaggtgttcgatgaagtcattgaagtgaatctaatcgatagtgccgactacatccacctggcctttctgaagagacctgagctcgggctcaccctcaccaagcttcactgttggactctcactcactacagcaagtgtgtcttcctggatgcagacactctggtgctgtccaatgtcgatgagctgtttgacaggggagagttttctgcggccccggaccccggatggccggattgcttcaatagcggggtgtttgtcttccagccttctctccacacgcataaactcctgctacagcacgccatggaacacggcagctttgacggggcagaccaaggcttactgaatagtttcttcaggaactggtcgaccacagacatccacaagcacctgccgttcatctataacttgagtagtaacacgatgtacacttacagccctgccttcaagcaattcggttccagtgcaaaggtcgtccactttttggggtccatgaaaccttggaactacaagtacaatccacagagtggctcggtgttggagcaaggctcagtgtccagcagccagcaccaggcggcattccttcatctctggtggacggtctaccagaacaacgtgctgcccctttataaaagcgtccaagcgggggaagcacgcgcgtctcctggtcacacactttgccacagtgatgtgggggggccgtgtgcggattcagcctctggtgttggagagccgtgtgaaaattcaacacccagtgcgggcgtgccgtgtgcaaattcaccactgggttctaaccagcctgctcagggccttccggagccgacccagatagtggatgagaccctgtccctacctgaaggacgccgttcagaagatgtcgacctggccgtctctgtttcccagatctccatcgaagagaaggtgaaggaattgagccccgaggaagagaggaggaagtgggaggaaggccgtatcgactacatggggaaggacgcgtttgctcgcatccaggagaagctggaccggttcctgcagtaatccggcagctggtgggcgttgtgtgtagttagacaatgtcctgttgggtggtcctgttgcgtggagatctcctctggtcctttcaaagggaaacgctgttgaaccttgtgcctctatttatgcttaatccatttgagtgcctcacacaaaaaacgtagagtatagaaatccaccttaaagcccctcgccccaacttctccaccaacgccttctgggctttcttcagaggtcacttctacccttgaagctgtcggcaaaagcgagcagtaataacattctagtagactctcgatggtggtctccgctcttgcccgaaggacctctgaagtacgctggagctgtgttgtacaggtgctgtgagacctaccctattcagaattaaacctcactgcaaatttcctcccatcacgaagctaacaacactaatatacgtatttagcacctctgaggctttgccatggagacccatttctgtagggctaaggaaacatttagacgtggtgactgactttcatttggacttggcgaagtgtatctgagaaacacctcggctgtggtctctctgctttaaatcctaacaggacttcctagagcgttgacagaaattctactcgtggacgttgggaagaaagattgtaggtggcttggggaatgtgggtggcttagaggatctaaaccgattcacttcctggttgagaagcaacgagggcttgctctaaatcgtttagaggataacaggatctagagatgctctctgcttgacaacaaaagtcagggtgcagtcggtccacccttgactgctcttggcttggtctctaccctcactacctcagttctcaataacttagtgaatcactgccctcctcaaagccatttccactcagctctttccagagaattctcagttttatgagacgggaaactttatttcacgagaaagcctcattgtcagaagtatcttcattcaatgggcacaatatgctgtgtatctcaccaggtagctgtcaggggccaccgagagtgtcgttaaaaatgggcatcgttgtaataaaggaggaaagtgcgacttttgaaatgtttggaaggtttatttctcatgcacattccagggaaaagcagagagtaaattagagacgggataggaaggccgtgggagaactcgatcctagcctgtgtcagctggatgtgtttacgtggagaggcgtggccactttttaggtcacctgaagcagtttagcctttggatagaggaacctgcctgaatttatggcattagtggtggcatttttttgtgtacaagatgtgggtgatggaggggctgtttctttttccgtgtgggtggttaataatcgtcagtctcggagggcgatgctcgtaggatatttcaggtgagtcagggttggatggtcatcggctttcagagggagaccacgggaatgttcagggaaacaatgtcagcttctctgaggaccagaattcatgttcacgggcagtgatgagttggcttatggagtgagtccagtctggaattccgccgtgcattctagcctgtatcatctcatttggacaaatgctggcacgttgaaattaaaatgttaaaaaacaaaaaaaag

SEQ ID NO: 32678 - DNA, 3096 bp, Homo sapiens
cgcgggcttgcgggcaggggctgcagggaggaggagaggacccgcgcccgcgggggctgggcggaggcggggccgggcttccggacagaggccaatcgctgccctcggggcctccagcgccggctctgggccgaggcagccagagcgcggaagaggcctggaaatccacgcggattcccggagacggcgcctctgctctgcgggttcgtggcgaggaagtccacccactgctcccgggcgcaggtctgcaggtccgcgcccactgcccgcggcgccactgaccatgtcggtgactgatcaggcttttgtcacactagccaccaatgacatctactgccagggcgccctggtcctggggcagtcactgaggagacacaggctgacgaggaagctggtggtgttgatcactcctcaggtgtccagcctgctcagggtcatcctctcgaaggtgttcgatgaagtcattgaagtgaatctaatcgatagtgccgactacatccacctggcctttctgaagagacctgagctcgggctcaccctcaccaagcttcactgttggactctcactcactacagcaagtgtgtcttcctggatgcagacactctggtgctgtccaatgtcgatgagctgtttgacaggggagagttttctgcggccccggaccccggatggccggattgcttcaatagcggggtgtttgtcttccagccttctctccacacgcataaactcctgctacagcacgccatggaacacggcagctttgacggggcagaccaaggcttactgaatagtttcttcaggaactggtcgaccacagacatccacaagcacctgccgttcatctataacttgagtagtaacacgatgtacacttacagccctgccttcaagcaattcggttccagtgcaaaggtcgtccactttttggggtccatgaaaccttggaactacaagtacaatccacagagtggctcggtgttggagcaaggctcagtgtccagcagccagcaccaggcggcattccttcatctctggtggacggtctaccagaacaacgtgctgcccctttataaaagcgtccaagcgggggaagcacgcgcgtctcctggtcacacactttgccacagtgatgtgggggggccgtgtgcggattcagcctctggtgttggagagccgtgtgaaaattcaacacccagtgcgggcgtgccgtgtgcaaattcaccactgggttctaaccagcctgctcagggccttccggagccgacccagatagtggatgagaccctgtccctacctgaaggacgccgttcagaagatgtcgacctggccgtctctgtttcccagatctccatcgaagagaaggtgaaggaattgagccccgaggaagagaggaggaagtgggaggaaggccgtatcgactacatggggaaggacgcgtttgctcgcatccaggagaagctggaccggttcctgcagtaatccggcagctggtgggcgttgtgtgtagttagacaatgtcctgttgggtggtcctgttgcgtggagatctcctctggtcctttcaaagggaaacgctgttgaaccttgtgcctctatttatgcttaatccatttgagtgcctcacacaaaaaacgtagagtatagaaatccaccttaaagcccctcgccccaacttctccaccaacgccttctgggctttcttcagaggtcacttctacccttgaagctgtcggcaaaagcgagcagtaataacattctagtagactctcgatggtggtctccgctcttgcccgaaggacctctgaagtacgctggagctgtgttgtacaggtgctgtgagacctaccctattcagaattaaacctcactgcaaatttcctcccatcacgaagctaacaacactaatatacgtatttagcacctctgaggctttgccatggagacccatttctgtagggctaaggaaacatttagacgtggtgactgactttcatttggacttggcgaagtgtatctgagaaacacctcggctgtggtctctctgctttaaatcctaacaggacttcctagagcgttgacagaaattctactcgtggacgttgggaagaaagattgtaggtggcttggggaatgtgggtggcttagaggatctaaaccgattcacttcctggttgagaagcaacgagggcttgctctaaatcgtttagaggataacaggatctagagatgctctctgcttgacaacaaaagtcagggtgcagtcggtccacccttgactgctcttggcttggtctctaccctcactacctcagttctcaataacttagtgaatcactgccctcctcaaagccatttccactcagctctttccagagaattctcagttttatgagacgggaaactttatttcacgagaaagcctcattgtcagaagtatcttcattcaatgggcacaatatgctgtgtatctcaccaggtagctgtcaggggccaccgagagtgtcgttaaaaatgggcatcgttgtaataaaggaggaaagtgcgacttttgaaatgtttggaaggtttatttctcatgcacattccagggaaaagcagagagtaaattagagacgggataggaaggccgtgggagaactcgatcctagcctgtgtcagctggatgtgtttacgtggagaggcgtggccactttttaggtcacctgaagcagtttagcctttggatagaggaacctgcctgaatttatggcattagtggtggcatttttttgtgtacaagatgtgggtgatggaggggctgtttctttttccgtgtgggtggttaataatcgtcagtctcggagggcgatgctcgtaggatatttcaggtgagtcagggttggatggtcatcggctttcagagggagaccacgggaatgttcagggaaacaatgtcagcttctctgaggaccagaattcatgttcacgggcagtgatgagttggcttatggagtgagtccagtctggaattccgccgtgcattctagcctgtatcatctcatttggacaaatgctggcacgttgaaattaaaatgttaaaaaacaaaaaaaag

SEQ ID NO: 32679 - DNA, 3453 bp, Homo sapiens
tatggttattgttttctttttttaatgaaactagatcactgcttacaaaaccctgcacaagccctcctgcccatccccttcacagttcccttggctcagcctctcctgtctcacaggaactgcaacaaaatgggtgtggaacagccaccaccacgtccattgaacgacaggaaggaagaggccctgggctcccaccctgggccttaagagggtgacagttcttccttccacatccgttcccatggggcctggagttgcatggatgagggtggtccatgccaccatggttctcaggccaccactcagaccagagaaagttgacaaagacaacgaagacttccaaaagtgtatccattcacaccggaattctgcgggttcgtggcgaggaagtccacccactgctcccgggcgcaggtctgcaggtccgcgcccactgcccgcggcgccactgaccatgtcggccaccaatgacatctactgccagggcgccctggtcctggggcagtcactgaggagacacaggctgacgaggaagctggtggtgttgatcactcctcaggtgtccagcctgctcagggtcatcctctcgaaggtgttcgatgaagtcattgaagtgaatctaatcgatagtgccgactacatccacctggcctttctgaagagacctgagctcgggctcaccctcaccaagcttcactgttggactctcactcactacagcaagtgtgtcttcctggatgcagacactctggtgctgtccaatgtcgatgagctgtttgacaggggagagttttctgcggccccggaccccggatggccggattgcttcaatagcggggtgtttgtcttccagccttctctccacacgcataaactcctgctacagcacgccatggaacacggcagctttgacggggcagaccaaggcttactgaatagtttcttcaggaactggtcgaccacagacatccacaagcacctgccgttcatctataacttgagtagtaacacgatgtacacttacagccctgccttcaagcaattcggttccagtgcaaaggtcgtccactttttggggtccatgaaaccttggaactacaagtacaatccacagagtggctcggtgttggagcaaggctcagtgtccagcagccagcaccaggcggcattccttcatctctggtggacggtctaccagaacaacgtgctgcccctttataaaagcgtccaagcgggggaagcacgcgcgtctcctggtcacacactttgccacagtgatgtgggggggccgtgtgcggattcagcctctggtgttggagagccgtgtgaaaattcaacacccagtgcgggcgtgccgtgtgcaaattcaccactgggttctaaccagcctgctcagggccttccggagccgacccagatagtggatgagaccctgtccctacctgaaggacgccgttcagaagatatgatagcttgtcctgaaactgagactcctgccgtgataacgtgtgacccactgtcccagccttcccctcagcctgcagacttcacagagactgaaaccatcttgcagccagcaaataaagtcgaaagtgtctcatccgaggaaaccttcgaaccaagccaggaactccctgctgaggctctcagggaccccagtctgcaggatgcactggaggtcgacctggccgtctctgtttcccagatctccatcgaagagaaggtgaaggaattgagccccgaggaagagaggaggaagtgggaggaaggccgtatcgactacatggggaaggacgcgtttgctcgcatccaggagaagctggaccggttcctgcagtaatccggcagctggtgggcgttgtgtgtagttagacaatgtcctgttgggtggtcctgttgcgtggagatctcctctggtcctttcaaagggaaacgctgttgaaccttgtgcctctatttatgcttaatccatttgagtgcctcacacaaaaaacgtagagtatagaaatccaccttaaagcccctcgccccaacttctccaccaacgccttctgggctttcttcagaggtcacttctacccttgaagctgtcggcaaaagcgagcagtaataacattctagtagactctcgatggtggtctccgctcttgcccgaaggacctctgaagtacgctggagctgtgttgtacaggtgctgtgagacctaccctattcagaattaaacctcactgcaaatttcctcccatcacgaagctaacaacactaatatacgtatttagcacctctgaggctttgccatggagacccatttctgtagggctaaggaaacatttagacgtggtgactgactttcatttggacttggcgaagtgtatctgagaaacacctcggctgtggtctctctgctttaaatcctaacaggacttcctagagcgttgacagaaattctactcgtggacgttgggaagaaagattgtaggtggcttggggaatgtgggtggcttagaggatctaaaccgattcacttcctggttgagaagcaacgagggcttgctctaaatcgtttagaggataacaggatctagagatgctctctgcttgacaacaaaagtcagggtgcagtcggtccacccttgactgctcttggcttggtctctaccctcactacctcagttctcaataacttagtgaatcactgccctcctcaaagccatttccactcagctctttccagagaattctcagttttatgagacgggaaactttatttcacgagaaagcctcattgtcagaagtatcttcattcaatgggcacaatatgctgtgtatctcaccaggtagctgtcaggggccaccgagagtgtcgttaaaaatgggcatcgttgtaataaaggaggaaagtgcgacttttgaaatgtttggaaggtttatttctcatgcacattccagggaaaagcagagagtaaattagagacgggataggaaggccgtgggagaactcgatcctagcctgtgtcagctggatgtgtttacgtggagaggcgtggccactttttaggtcacctgaagcagtttagcctttggatagaggaacctgcctgaatttatggcattagtggtggcatttttttgtgtacaagatgtgggtgatggaggggctgtttctttttccgtgtgggtggttaataatcgtcagtctcggagggcgatgctcgtaggatatttcaggtgagtcagggttggatggtcatcggctttcagagggagaccacgggaatgttcagggaaacaatgtcagcttctctgaggaccagaattcatgttcacgggcagtgatgagttggcttatggagtgagtccagtctggaattccgccgtgcattctagcctgtatcatctcatttggacaaatgctggcacgttgaaattaaaatgttaaaaaacaaaaaaaag

SEQ ID NO: 32680 - DNA, 3309 bp, Homo sapiens
cgcgggcttgcgggcaggggctgcagggaggaggagaggacccgcgcccgcgggggctgggcggaggcggggccgggcttccggacagaggccaatcgctgccctcggggcctccagcgccggctctgggccgaggcagccagagcgcggaagaggcctggaaatccacgcggattcccggagacggcgcctctgctctgcgggttcgtggcgaggaagtccacccactgctcccgggcgcaggtctgcaggtccgcgcccactgcccgcggcgccactgaccatgtcggtgactgatcaggcttttgtcacactagccaccaatgacatctactgccagggcgccctggtcctggggcagtcactgaggagacacaggctgacgaggaagctggtggtgttgatcactcctcaggtgtccagcctgctcagggtcatcctctcgaaggtgttcgatgaagtcattgaagtgaatctaatcgatagtgccgactacatccacctggcctttctgaagagacctgagctcgggctcaccctcaccaagcttcactgttggactctcactcactacagcaagtgtgtcttcctggatgcagacactctggtgctgtccaatgtcgatgagctgtttgacaggggagagttttctgcggccccggaccccggatggccggattgcttcaatagcggggtgtttgtcttccagccttctctccacacgcataaactcctgctacagcacgccatggaacacggcagctttgacggggcagaccaaggcttactgaatagtttcttcaggaactggtcgaccacagacatccacaagcacctgccgttcatctataacttgagtagtaacacgatgtacacttacagccctgccttcaagcaattcggttccagtgcaaaggtcgtccactttttggggtccatgaaaccttggaactacaagtacaatccacagagtggctcggtgttggagcaaggctcagtgtccagcagccagcaccaggcggcattccttcatctctggtggacggtctaccagaacaacgtgctgcccctttataaaagcgtccaagcgggggaagcacgcgcgtctcctggtcacacactttgccacagtgatgtgggggggccgtgtgcggattcagcctctggtgttggagagccgtgtgaaaattcaacacccagtgcgggcgtgccgtgtgcaaattcaccactgggttctaaccagcctgctcagggccttccggagccgacccagatagtggatgagaccctgtccctacctgaaggacgccgttcagaagatatgatagcttgtcctgaaactgagactcctgccgtgataacgtgtgacccactgtcccagccttcccctcagcctgcagacttcacagagactgaaaccatcttgcagccagcaaataaagtcgaaagtgtctcatccgaggaaaccttcgaaccaagccaggaactccctgctgaggctctcagggaccccagtctgcaggatgcactggaggtcgacctggccgtctctgtttcccagatctccatcgaagagaaggtgaaggaattgagccccgaggaagagaggaggaagtgggaggaaggccgtatcgactacatggggaaggacgcgtttgctcgcatccaggagaagctggaccggttcctgcagtaatccggcagctggtgggcgttgtgtgtagttagacaatgtcctgttgggtggtcctgttgcgtggagatctcctctggtcctttcaaagggaaacgctgttgaaccttgtgcctctatttatgcttaatccatttgagtgcctcacacaaaaaacgtagagtatagaaatccaccttaaagcccctcgccccaacttctccaccaacgccttctgggctttcttcagaggtcacttctacccttgaagctgtcggcaaaagcgagcagtaataacattctagtagactctcgatggtggtctccgctcttgcccgaaggacctctgaagtacgctggagctgtgttgtacaggtgctgtgagacctaccctattcagaattaaacctcactgcaaatttcctcccatcacgaagctaacaacactaatatacgtatttagcacctctgaggctttgccatggagacccatttctgtagggctaaggaaacatttagacgtggtgactgactttcatttggacttggcgaagtgtatctgagaaacacctcggctgtggtctctctgctttaaatcctaacaggacttcctagagcgttgacagaaattctactcgtggacgttgggaagaaagattgtaggtggcttggggaatgtgggtggcttagaggatctaaaccgattcacttcctggttgagaagcaacgagggcttgctctaaatcgtttagaggataacaggatctagagatgctctctgcttgacaacaaaagtcagggtgcagtcggtccacccttgactgctcttggcttggtctctaccctcactacctcagttctcaataacttagtgaatcactgccctcctcaaagccatttccactcagctctttccagagaattctcagttttatgagacgggaaactttatttcacgagaaagcctcattgtcagaagtatcttcattcaatgggcacaatatgctgtgtatctcaccaggtagctgtcaggggccaccgagagtgtcgttaaaaatgggcatcgttgtaataaaggaggaaagtgcgacttttgaaatgtttggaaggtttatttctcatgcacattccagggaaaagcagagagtaaattagagacgggataggaaggccgtgggagaactcgatcctagcctgtgtcagctggatgtgtttacgtggagaggcgtggccactttttaggtcacctgaagcagtttagcctttggatagaggaacctgcctgaatttatggcattagtggtggcatttttttgtgtacaagatgtgggtgatggaggggctgtttctttttccgtgtgggtggttaataatcgtcagtctcggagggcgatgctcgtaggatatttcaggtgagtcagggttggatggtcatcggctttcagagggagaccacgggaatgttcagggaaacaatgtcagcttctctgaggaccagaattcatgttcacgggcagtgatgagttggcttatggagtgagtccagtctggaattccgccgtgcattctagcctgtatcatctcatttggacaaatgctggcacgttgaaattaaaatgttaaaaaacaaaaaaaag

SEQ ID NO: 32681 - DNA, 2620 bp, Homo sapiens
gcttcatcgaacaccttcgagaggatgaccctgagcaggctggacacctgaggagtgatcaacaccaccagcttcactgttggactctcactcactacagcaagtgtgtcttcctggatgcagacactctggtgctgtccaatgtcgatgagctgtttgacaggggagagttttctgcggccccggaccccggatggccggattgcttcaatagcggggtgtttgtcttccagccttctctccacacgcataaactcctgctacagcacgccatggaacacggcagctttgacggggcagaccaaggcttactgaatagtttcttcaggaactggtcgaccacagacatccacaagcacctgccgttcatctataacttgagtagtaacacgatgtacacttacagccctgccttcaagcaattcggttccagtgcaaaggtcgtccactttttggggtccatgaaaccttggaactacaagtacaatccacagagtggctcggtgttggagcaaggctcagtgtccagcagccagcaccaggcggcattccttcatctctggtggacggtctaccagaacaacgtgctgcccctttataaaagcgtccaagcgggggaagcacgcgcgtctcctggtcacacactttgccacagtgatgtgggggggccgtgtgcggattcagcctctggtgttggagagccgtgtgaaaattcaacacccagtgcgggcgtgccgtgtgcaaattcaccactgggttctaaccagcctgctcagggccttccggagccgacccagatagtggatgagaccctgtccctacctgaaggacgccgttcagaagatgtcgacctggccgtctctgtttcccagatctccatcgaagagaaggtgaaggaattgagccccgaggaagagaggaggaagtgggaggaaggccgtatcgactacatggggaaggacgcgtttgctcgcatccaggagaagctggaccggttcctgcagtaatccggcagctggtgggcgttgtgtgtagttagacaatgtcctgttgggtggtcctgttgcgtggagatctcctctggtcctttcaaagggaaacgctgttgaaccttgtgcctctatttatgcttaatccatttgagtgcctcacacaaaaaacgtagagtatagaaatccaccttaaagcccctcgccccaacttctccaccaacgccttctgggctttcttcagaggtcacttctacccttgaagctgtcggcaaaagcgagcagtaataacattctagtagactctcgatggtggtctccgctcttgcccgaaggacctctgaagtacgctggagctgtgttgtacaggtgctgtgagacctaccctattcagaattaaacctcactgcaaatttcctcccatcacgaagctaacaacactaatatacgtatttagcacctctgaggctttgccatggagacccatttctgtagggctaaggaaacatttagacgtggtgactgactttcatttggacttggcgaagtgtatctgagaaacacctcggctgtggtctctctgctttaaatcctaacaggacttcctagagcgttgacagaaattctactcgtggacgttgggaagaaagattgtaggtggcttggggaatgtgggtggcttagaggatctaaaccgattcacttcctggttgagaagcaacgagggcttgctctaaatcgtttagaggataacaggatctagagatgctctctgcttgacaacaaaagtcagggtgcagtcggtccacccttgactgctcttggcttggtctctaccctcactacctcagttctcaataacttagtgaatcactgccctcctcaaagccatttccactcagctctttccagagaattctcagttttatgagacgggaaactttatttcacgagaaagcctcattgtcagaagtatcttcattcaatgggcacaatatgctgtgtatctcaccaggtagctgtcaggggccaccgagagtgtcgttaaaaatgggcatcgttgtaataaaggaggaaagtgcgacttttgaaatgtttggaaggtttatttctcatgcacattccagggaaaagcagagagtaaattagagacgggataggaaggccgtgggagaactcgatcctagcctgtgtcagctggatgtgtttacgtggagaggcgtggccactttttaggtcacctgaagcagtttagcctttggatagaggaacctgcctgaatttatggcattagtggtggcatttttttgtgtacaagatgtgggtgatggaggggctgtttctttttccgtgtgggtggttaataatcgtcagtctcggagggcgatgctcgtaggatatttcaggtgagtcagggttggatggtcatcggctttcagagggagaccacgggaatgttcagggaaacaatgtcagcttctctgaggaccagaattcatgttcacgggcagtgatgagttggcttatggagtgagtccagtctggaattccgccgtgcattctagcctgtatcatctcatttggacaaatgctggcacgttgaaattaaaatgttaaaaaacaaaaaaaag

SEQ ID NO: 32682 - DNA, 3378 bp, Homo sapiens
ggggaggcaacatatctaggtagaggccgggtgttaatcggccgtcgggtggtgtcccgggggcgttgtcgttgctgggcgcatgggtgttaagacgcagcggggtcgcaggtgactgtggggaggacagggggtcaaggggcccctggccagagggcacgaggctgacctggagcgccaaggaggaagtgcggggcgtggaggtcgcaggggcatcgggggaggcaggggccccgtggggcgcaggtgacatggagtgggtaggaggccgggggtgacaccggcggggcctgcagccgagggtgtcgagactgccacgctgtcgcccccaggcctggaaatccacgcggattcccggagacggcgcctctgctctgcgggttcgtggcgaggaagtccacccactgctcccgggcgcaggtctgcaggtccgcgcccactgcccgcggcgccactgaccatgtcggtgactgatcaggcttttgtcacactagccaccaatgacatctactgccagggcgccctggtcctggggcagtcactgaggagacacaggctgacgaggaagctggtggtgttgatcactcctcaggtgtccagcctgctcagggtcatcctctcgaaggtgttcgatgaagtcattgaagtgaatctaatcgatagtgccgactacatccacctggcctttctgaagagacctgagctcgggctcaccctcaccaagcttcactgttggactctcactcactacagcaagtgtgtcttcctggatgcagacactctggtgctgtccaatgtcgatgagctgtttgacaggggagagttttctgcggccccggaccccggatggccggattgcttcaatagcggggtgtttgtcttccagccttctctccacacgcataaactcctgctacagcacgccatggaacacggcagctttgacggggcagaccaaggcttactgaatagtttcttcaggaactggtcgaccacagacatccacaagcacctgccgttcatctataacttgagtagtaacacgatgtacacttacagccctgccttcaagcaattcggttccagtgcaaaggtcgtccactttttggggtccatgaaaccttggaactacaagtacaatccacagagtggctcggtgttggagcaaggctcagtgtccagcagccagcaccaggcggcattccttcatctctggtggacggtctaccagaacaacgtgctgcccctttataaaagcgtccaagcgggggaagcacgcgcgtctcctggtcacacactttgccacagtgatgtgggggggccgtgtgcggattcagcctctggtgttggagagccgtgtgaaaattcaacacccagtgcgggcgtgccgtgtgcaaattcaccactgggttctaaccagcctgctcagggccttccggagccgacccagatagtggatgagaccctgtccctacctgaaggacgccgttcagaagatatgatagcttgtcctgaaactgagactcctgccgtgataacgtgtgacccactgtcccagccttcccctcagcctgcagacttcacagagactgaaaccatcttggtcgacctggccgtctctgtttcccagatctccatcgaagagaaggtgaaggaattgagccccgaggaagagaggaggaagtgggaggaaggccgtatcgactacatggggaaggacgcgtttgctcgcatccaggagaagctggaccggttcctgcagtaatccggcagctggtgggcgttgtgtgtagttagacaatgtcctgttgggtggtcctgttgcgtggagatctcctctggtcctttcaaagggaaacgctgttgaaccttgtgcctctatttatgcttaatccatttgagtgcctcacacaaaaaacgtagagtatagaaatccaccttaaagcccctcgccccaacttctccaccaacgccttctgggctttcttcagaggtcacttctacccttgaagctgtcggcaaaagcgagcagtaataacattctagtagactctcgatggtggtctccgctcttgcccgaaggacctctgaagtacgctggagctgtgttgtacaggtgctgtgagacctaccctattcagaattaaacctcactgcaaatttcctcccatcacgaagctaacaacactaatatacgtatttagcacctctgaggctttgccatggagacccatttctgtagggctaaggaaacatttagacgtggtgactgactttcatttggacttggcgaagtgtatctgagaaacacctcggctgtggtctctctgctttaaatcctaacaggacttcctagagcgttgacagaaattctactcgtggacgttgggaagaaagattgtaggtggcttggggaatgtgggtggcttagaggatctaaaccgattcacttcctggttgagaagcaacgagggcttgctctaaatcgtttagaggataacaggatctagagatgctctctgcttgacaacaaaagtcagggtgcagtcggtccacccttgactgctcttggcttggtctctaccctcactacctcagttctcaataacttagtgaatcactgccctcctcaaagccatttccactcagctctttccagagaattctcagttttatgagacgggaaactttatttcacgagaaagcctcattgtcagaagtatcttcattcaatgggcacaatatgctgtgtatctcaccaggtagctgtcaggggccaccgagagtgtcgttaaaaatgggcatcgttgtaataaaggaggaaagtgcgacttttgaaatgtttggaaggtttatttctcatgcacattccagggaaaagcagagagtaaattagagacgggataggaaggccgtgggagaactcgatcctagcctgtgtcagctggatgtgtttacgtggagaggcgtggccactttttaggtcacctgaagcagtttagcctttggatagaggaacctgcctgaatttatggcattagtggtggcatttttttgtgtacaagatgtgggtgatggaggggctgtttctttttccgtgtgggtggttaataatcgtcagtctcggagggcgatgctcgtaggatatttcaggtgagtcagggttggatggtcatcggctttcagagggagaccacgggaatgttcagggaaacaatgtcagcttctctgaggaccagaattcatgttcacgggcagtgatgagttggcttatggagtgagtccagtctggaattccgccgtgcattctagcctgtatcatctcatttggacaaatgctggcacgttgaaattaaaatgttaaaaaacaaaaaaaag

SEQ ID NO: 32683 - DNA, 1849 bp, Homo sapiens
ggggaggcaacatatctaggtagaggccgggtgttaatcggccgtcgggtggtgtcccgggggcgttgtcgttgctgggcgcatgggtgttaagacgcagcggggtcgcaggtgactgtggggaggacagggggtcaaggggcccctggccagagggcacgaggctgacctggagcgccaaggaggaagtgcggggcgtggaggtcgcaggggcatcgggggaggcaggggccccgtggggcgcaggtgacatggagtgggtaggaggccgggggtgacaccggcggggcctgcagccgagggtgtcgagactgccacgctgtcgcccccaggcctggaaatccacgcggattcccggagacggcgcctctgctctgcgggttcgtggcgaggaagtccacccactgctcccgggcgcaggtctgcaggtccgcgcccactgcccgcggcgccactgaccatgtcggtgactgatcaggcttttgtcacactagccaccaatgacatctactgccagggcgccctggtcctggggcagtcactgaggagacacaggctgacgaggaagctggtggtgttgatcactcctcaggtgtccagcctgctcagggtcatcctctcgaaggtgttcgatgaagtcattgaagtgaatctaatcgatagtgccgactacatccacctggcctttctgaagagacctgagctcgggctcaccctcaccaagcttcactgttggactctcactcactacagcaagtgtgtcttcctggatgcagacactctggtgctgtccaatgtcgatgagctgtttgacaggggagagttttctgcggccccggaccccggatggccggattgcttcaatagcggggtgtttgtcttccagccttctctccacacgcataaactcctgctacagcacgccatggaacacggcagctttgacggggcagaccaaggcttactgaatagtttcttcaggaactggtcgaccacagacatccacaagcacctgccgttcatctataacttgagtagtaacacgatgtacacttacagccctgccttcaagcaattcggttccagtgcaaaggtcgtccactttttggggtccatgaaaccttggaactacaagtacaatccacagagtggctcggtgttggagcaaggctcagtgtccagcagccagcaccaggcggcattccttcatctctggtggacggtctaccagaacaacgtgctgcccctttataaaagcgtccaagcgggggaagcacgcgcgtctcctggtcacacactttgccacagtgatgtgggggggccgtgtgcggattcagcctctggtgttggagagccgtgtgaaaattcaacacccagtgcgggcgtgccgtgtgcaaattcaccactgggttctaaccagcctgctcagggccttccggagccgacccagatagtggatgagaccctgtccctacctgaaggacgccgttcagaagatatgatagcttgtcctgaaactgagactcctgccgtgataacgtgtgacccactgtcccagccttcccctcagcctgcagacttcacagagactgaaaccatcttgcagccagcaaataaagtcgaaagtgtctcatccgaggaaaccttcgaaccaagccaggaactccctgctgaggctctcagggaccccagtctgcaggatgcactggaggtggtatccaaattcttccccttgcccaaggctcccggtgggggccatccaccgtcactgaggtcaactgcatgcacacaacagctgttaatttttcagcctcatttaacaaaaaataagaatcggcttccctcttcc

SEQ ID NO: 32684 - DNA, 462 bp, Homo sapiens
tgatgtttgtcgatttacttccactccaggcttttggttattttaaagtttatttgttttcaagcaatggtgatgacaaattggaagatttaaatgttgttatctccattatatctatcaggagtttaatatccctaggggatcttgttacaatgacaccagaaggaggtcagaacatatacatacatatatacacatattttatacatacatataaaatatcccttctctttttctttaagtagcaaaactcttcactgtaaaaaaattattccattgaggtaactgagttttctagacatagaggaatgatgtgtgaaaataacacaatttaaatctgtcatgtaataacttggatcagttttgaagaaatttgtcatgttcagtgcactgtttttctgggagacagatctacaatagttgatatttacgcagtattttcccattaaacctgataagaaa

SEQ ID NO: 32685 - DNA, 351 bp, Homo sapiens
ggaggcagaggttgtggtgtgcggagattgcgccactgtactccagcctgggcaacagagtaagactccatctcaaaaaaaaaaaaaaaaaagaaagaaaggaagggtggtgggtggaaaacagcatggagaagggaaacaagtgggccagagatgagttaaaaaaaatttttactgagtgaggaataggaaggaatttccataaactcaaaaaaagtgcatccatgaataatctgtaaaacatgatacttaacggtgaaactttagaacagtattaaacttagaataagctactatcgggccgggtgaggtgactcacacctgtagcattttgggatgccgagatgggga

SEQ ID NO: 32686 - DNA, 736 bp, Homo sapiens
atcagggagttttatgagaaaccctagctcctcagttccacagtgggtaactgtaattcactctaggtctgcgatatttcctgcctatccattttgttaactcttcaatgcattccacaaatgcctaagtattctttaataatggtgggtttttttttttgcatctatgaagttttttcaaattctttttaagtgacaaaacttgtacatgtgtatcgcacaatatttctagtcgacagcactgctttacagaatgtaaaccgtgcactcccaggaaaatgcagacacagcacgcctctttgggaccgcggtttatactttcgaagtgctcggagcccttcctccagaccgttctcccacaccccgctccagggtctctcccggagttacaggcctcgctgtaggccccgggaacccaacgcggtgtcagagaagtggggtcccctacgagggaccaggagatccgggcgggcagcagctgcggaagagccgcgcgaggcttcccagaacccggccggggcgggaagacgcaggagtggggaggcggaaccgggaccccgcagagcccgggtccctgcgccccacaagccttggcttccctgctagggccgggcaaggccgggtgcagggcgcggctccagggaggaagctccggggcgagcccaagacgcctcccgggcggtcggggcccagcggcggcgttcgcagtaggagccgggcaccgggcagcggccgc

SEQ ID NO: 32687 - DNA, 357 bp, Homo sapiens
gtatcttcataagaacctctagtgacctttatcagagaagtatgttaaccattaaccagctgtgtgacctcaggcaaattattaaacttgagacaaagctttctaattcaatgatttaagatattcagcaagttatcagtagtatttagagaacctacaggttcaggagaaaagcaggaagcctcaagagacccaatcccggaaataagcactaaagcagaaacagcttgcttatattaataagcctgacttcaaatattttcgccacattctcgaaattaacaactcattttgttcagatgaaattctaccaattaagagaattggcttattattttaaaatgtatattattctga

SEQ ID NO: 32688 - DNA, 753 bp, Homo sapiens
caatgagctgattatagttgagcaaattgtatgaaataaaatttgacaaaattagatgggactggattgtaggaaaaagtgataggctgacaaaaagtgcactttatattgcatgcaatgagatgaaatactcggaggtattttggttgttacaaagatggaggaagaggacactattagcatttaatgagaaaggatcagggaagtcagccatcccacaatgttcaggacagtttgcacatttaagaattgttccaaatcaccacatgacctagaatgacttgctggactttgatgatgtaggttaaaaaaaaaaagtgatcataatgatgtgagcatagacagtaactccattttgtgtatgaggcacttttttgttgttgttgttgttgttgttgttgttgttgttgttttgagacggagtttcgctcttgttgcccaggctgaaatgcagtggcaccatctaggctcactgtaactgaggcacctttaatatacactaagattttcaggaattcagttaccacaatattggaggaatgttaaagtttttgttcagaactttatcaggagtactccacccctttagaaaatcacgtaattgatggcagtgtcacttgtgctgtattggtgacgcaaatactcttcagtctgcagttgtaactgccacagtcacagtgcttgttgtatatatgtacaaagtaccatcagtgtgttatttattatagtaatagcctaaatattataaaattg

SEQ ID NO: 32689 - DNA, 384 bp, Homo sapiens
ggggcattaactctgcatctctcttctctgaaagtatttattttgtttctgagtccagcagtttttttgattctttctctttatatttttctgcattgctatgtgttggacgctggcatagtcttttaatgtatatatttactggttaatgttgacctttttttcataaagatgatatataatatatatataagtttatttgagactaaattgacttaggaaaaagacacaaatgaaagaaccatagtttatattaaaatgtaaaacgtgtttatcaaaaagcatcataaacagaattttaaaattatttgccacatatttaagcagacattaatttatttaatatatagagtacatttgttctaagaaaaacaaactctctag

SEQ ID NO: 32690 - DNA, 1075 bp, Homo sapiens
tcagttctgtgacgtgcccaaaatcacacgaagcgagttaatcacagacccagattttctcattcgcagtatgctgcatacttgtccatactaaattatctttaaacagtgacaaacatttaaaagcagatttgggagccacttgttttgctgtggagcctggaaggctgattcataaggaatttcaaataatggcagtgaccatggcctcattagccagcttggtccccctcagtatgacgaagaaactggactgagagaagaaccccaggttgaagagaactctctgtgttctgcacacctgtgctgctgaaaatacagacaccagtgaggccctaaagagagtaagcgaaccaggaagagaaaaaaatcacacagatgaatcctcgcagcctgaagggcatttggcacagaaggtgtctcaaaaagtcagctgagggaacatccagatgtcacgcaaaaggatgttttctcctgaatgaagacttacgatatagatgagagttatgaagtgactaaaatgagaagtaatagtaagatatggggaattagaatgaagtcaataacctcgaacttggcaactggaagtcctggctatttgggaaaagtagtcctttgttaaacttggacaagttgttccttttaatgtgccccatttccaaaaatattgaatttctttacctttcattcagcaaaagcagcagaaacttttgcttaaacgtttccttgtcttttgccacttggaggtgttgcttgaaatgctctcatcctccggggttacctttcgtcaaaggaagctgcatgaacgcatccgtcactcgcagctatttcagggctagcttgttttaagttaggggtgataacagatataggcagaactttgcaatgtaaatgtttagtcttatttgggcactgctgaatttgtttccgagcctcgtcttgtgattttaatttctggcttgtctcctgaaaacaacaaaaatgagctctttggttcacattttcagtggctttggtttgcagaaatcataaataaaagtaacttacatggaacagaacattttaacaaacaagg

SEQ ID NO: 32691 - DNA, 583 bp, Homo sapiens
gcttacattttctggttgaaaagtactgctctgttctattacattcatctgtttgcttatcctgtgtcaataccacactatctcaactgctgtaaattataatacgtctacatatcatggataagtctccaattttggtcatcttcttagagactgtcttagccattcttgatactttcatttccatatacattttagaatcagcttgtcagacttcacaataaacaaaactggctgtgatagtactgaattcataaatcaatttggaaagtactaatatctttacattactgagtcttcaataaacatagtatatccttctaattatttggttttttaaaagtctatcgatgtttatatctgtgttttattttggtagttttatacttttcattaggtatttttcatatccttctgtagattatttttcaaatctcactttctaattgttgataatttacagaaatacaattaatgtttatatactaaatttatacccaacaatatcactgaatatattttttagttttcagttttactgatctacaatattcaataaactgaacatgtttaaaggaaacag

SEQ ID NO: 32692 - DNA, 298 bp, Homo sapiens
catcctggtaggtatggtttcaattatgttactagattagattatattttttgattactagatgatttaacatcttttcctgtgtgtattagctcttctgttttccacttctatgtattactgtttaaatttgcttcaatgtgggattatggattgatttttagtctcttttaataagtaggaggaaagccctttactataactgtctaatttcactacatagcacacagtagtacagctgatttggggcattaactctgcatctctcttctctgaaagtatttattttgtttctgag

SEQ ID NO: 32693 - DNA, 347 bp, Homo sapiens
aactatcaggatttgtgaaaaatacaaggtacaaaatcacgcagtttataaaccacagattgtcttgttattcccatcagtgaaaagaagctgatatttgtttgtgtttgtttttgtttttgtttttgagacggagctcggctctgtcgcccaggctggagtgcagtggcgccattttggctcactgcaagctccgcctcccggttcacgccattctcatgcctcagcctcccaagtagctgggactacaggcgtccgccaccatgcccggctaattttttgtatttttagtagagacaagagtttcaccgtgttagccaggatggtctcatctcctgatcttgtga

SEQ ID NO: 32694 - DNA, 398 bp, Homo sapiens
cgtcgaagtcaagattgatcagaggtgaaacctgaatttgcacagagaaacaatgtggtatacacagagatagcctcctatgacttcatctacatttttaaaagcagtcatatgggctggacagagtggctcatgcctgtaatcccaacactttgggaggccgaggcgggcagatcatgagatcaggagttcaagaccagcctggctaacatggtgaaaccttgtctctactaaagatacaaaaaattagtcaggtgtggtggtgtgcgcctgtaatcccatctactcaggaggctgaggcaagagaatcacttgaacccaggaggcagaggttgcagtaagccaggatcgtgccatttgcactcgagctggggcgacagggcgagactccgtcttaa

SEQ ID NO: 32695 - DNA, 522 bp, Homo sapiens
cgcgtattcagactcagaagaaaagctttaaagatcaagtatcctgacatgtccacaaatctttgtatttaaagataagcttgagataagtaagctaaactagattcaccaaagacagagttaagcctaagcttctttctagaataaagatgagagaaatgaaatcaggaagggtgcaatgttatcattataaagaagagcttattaccacaacattatgggggcagctgtttcattaattcctaaggctgaatgcaggagcccatctaaacactgcatttgtcataagtcatacagatgaacaccgtactccaaacatggctgaccgaagtacttagtttctttacagtttctccctgggtgatctcatccgttctgtgaccttaaatcctttctagatattgataaactcttaaatttacatccttagctcagacctctcctctgagccctgatttacagatctaacttcttgctttacatcacttcttggaaatctaacatatttaaaacagcttttgc

SEQ ID NO: 32696 - DNA, 412 bp, Homo sapiens
ccctttcccacatttgtggggcggaacccgtccctccctcttggaccctgcgcgctgccgggcccgggctagtgcttccctctcgagcccctgcagtgcaccttcccggggttccccggatgcgggcaccgtctgcgttcagcttgacccctttttctccagcattcctttctccttctgttacaccactactcacagtgtagcagctgcaacaatgcttagcacccaaggagccgcctccaggcgctgtagaggcgcgggggtatagctcagtggtagagcatttgactgcagatcaagaggtccctggttcaaatccgggtgccccctcaatggcttggtttttccttccccttgttaaccatctgtttttcattcttgactcacattttaacattgggtcctgactaaa

SEQ ID NO: 32697 - DNA, 413 bp, Homo sapiens
gaaaacaatttagtatcatctataacctggcaatactacttctaggtatatattctgagaaacgctttacatttaaaaattattgaggacctcagggagcttcagtttatatgagttatattttttgaaattttccatattaaaaattaaaactgactgggtgtggtggttcatgcctgtaatccagcattttgggaggccaaggtgcgaggatcactttaggccaggagtttgagaccagcctgggcaacgtagtaagaccccatctctacaaaaaaatttttaaaaatagctgggcttggtggcatgcacctgtagtcctagctactagggagactgaggcaagaggatcacttgagcctaggagttcaaggctgcagtgagctatgattgtgcctttgcactccagcctg

SEQ ID NO: 32698 - DNA, 379 bp, Homo sapiens
acagtcattcaccaaatctgtaagaaaacatcatgagctgtttccaggctgaattagagctatgacttcatgcagctgcctcactttcagacaagacagtttcagtcagatgatcttgctggccagaaaaggggagaaactctcctatcaacaagctactggccattggccaacctggtcatctctcaatagtgacgcaggtttagagctactcctggaaaagcagctgtcttcaaaggatatgaaatgagctcatgcatgaaataagacttgagcagagatgtgattctgtttatgtaattgctttaattaataccctctccataagccattccagtatattttgcttatgaaaattaatacttttaatgttatgaga

SEQ ID NO: 32699 - DNA, 1143 bp, Homo sapiens
  misc_feature (502)..(502): n is a, c, g, or t
atggcgtcccttcctgtcctgcagaaggagagcgtgttccagtcgggagcccatgcctacagaatccctgccctgctctacctgcctgggcagcagtccctgctggccttcgcggaacagcgggcaagcaagaaggatgagcacgcagagctgattgtcctgcgcagaggagactacgacgcacccacccaccaggttcagtggcaagctcaggaggtggtggcccaggcccggctggatggccaccggtccatgaacccatgccccttgtatgacgcgcagacggggaccctcttcctcttcttcattgccatccctgggcaagtcacggagcaacagcagctgcagaccagggccaatgtgacgcggctgtgccaagtcaccagcactgaccacgggaggacctggagctcccccagagacctcactgatgcggccatcggcccagcctaccgggagtggtccacctttgcagtgggcccggggcattgtttgcagcttnacgacagggcccggagcctggtggtgcccgcctacgcctaccggaaacttcaccccatccaaaggccgatcccctctgccttctgcttcctcagccatgaccatgggcgcacgtgggcgcgagggcactttgtggcccaggacaccctggagtgccaggtggccgaagtcgagactggggagcagagggtggtgaccctcaacgcgagaagccacctccgagccagggtccaggcccagagcaccaatgacgggcttgatttccaggagtctcagctggtgaagaagctggtggagccgccgccccagggctgccaggggagcgtcatcagcttccccagcccccgctcggggcctggctccccagcccagtggctgctctacactcaccccacacactcctggcagagggccgacctgggtgcctacctcaacccgcgacctccagcccctgaggcctggtcagagccggtactgctggccaagggcagctgtgcctactcagacctccagagcatgggcaccggccctgatgggtcccccttgtttgggtgtctgtacgaagccaatgattacgaggagattgtctttctcatgttcaccctgaagcaagccttcccagctgagtacctgcctcagtga

SEQ ID NO: 32700 - DNA, 1947 bp, Homo sapiens
taatttttaatccttttcaaatgtttgtgccatttacatttgatataatattaaaagcagtattattgaggtattagacagtaaaccgtgacacagactagctgtgaagtagagattgggcaggacctacaggtcctctgatacactgtgaacgcgtcactcttctgcccaacttcatagcctcctcttgctggcctcctatctgtatgcttggttgcctctgccctgacttctctgtagcccttgcttctttttcttctttctgcttcctctttgatcccaatggaaggttctcaaaaaaacagttaagtggtagtatttattttttccccagaaactgcaagagatatcacaagcattgccttatttaatttatgacaacctggaaagtaacgatgagattctgaaaggttaaagacctcgcgcagtcacacagtatggcggcagagctaggtctgtgtggctccaaagcccaagctctgaatccatcttctgttctgcttcacttccttgtatcctcatgtgctctgttgcctgtcttcccttaccctacgaagctccccatcttagagagacctttcttttactctgttccttttcattcctttgatattttgtctccttcccttcttccttaaattttgaatacatgtagtttaagcttgtactcttcatttgtttccattccttcttgagtctttttccattttctgtctctactactaaaactgcttgctttaaatttaccatggccttgccaccagatccccctctcgatttctgtactatgtacaacttgaatgtagtactacatttgagaatgtttttttagaaatatagataataaaatccttcacagtgccaaaaaagctaattaatatttggtgtattgttattttttcttggcagttctttttaaagcttgattttattcataacgtataagcaatgttgtcttctgcttgtttcacttaaaggaatagcatttttcatattgctgcataattttcatatctgttataatgattatataatactgcatccccaaaactaccattcacttaatttgaataatttactgtatgaatgaacattatggctgtttcccttttaaattgatgctatgataattctttgaattggcctattaatcatattagagttaatttttaattagagaagctgtagtagatctaacgtgggccagtacctatcagagtggtggtggaaatggaaggaagccagattacactgggaagatagcagggtttgtgtcagattaattataaggagtgagaagagaatagttgaaaatggagctctaaatggcatcagttttattgcttttggctataagttgagatgccaccttcaaccattaacttaaaaacacaacaccttgtttacttttgctttacgcatatttgaaaatttacttctagatattctgcctcacatttctagttaggatacctccttcctatagaattttgcactgttggctctattgtttcaaaaaccaaaaacaagcatattattccactaccaccagcacctcccccccacatatttagaccagcagtctgggttttgcccagtgagctcctttcctactttgcaatgtaaaggtcaggttctcatgagatctctggcaggctggtgttgggccaggcgccatggctcacacatgtaatcccaacactttgggaggccaaggcaggaggatccttgagcaccaaagttcaagatcagtctgggcaacacagggaaatcccatctctacaaaacagaaaaaaggtagcagggtgtggtggtgcgcacctgtagtcccagctactcgggaggctgaggtgggaagatagcttgaatctgggaggttgaggctgcagtgagctgtggttgctgtactctagcctgggccacagagcaagatcctgactaaaaaat

SEQ ID NO: 32701 - DNA, 556 bp, Homo sapiens
gcctttagcattctcattgcagaatttaccgtagcagatattaactcactcttagggtagagactaactttaattagaagcagtacaatattatttctagtttacttataccattttgatgtgatatgctgatggtaatacccttagcccttcccacagtgtgtgtatcctctcttaaaaggcacatcaaagagctgagttagctttccatataatcctatattgaattagtagaagcatcaagatgttcaaagaagcttcaacaactttctaactgacatttgttgttctttgggtcctatagattattcttggtcttgaaagcttagtaggtgtcactcagcatacatttagacagtgtttccaggagcattagagatgaaaaaaggaattttctagttacacaatattctgttcactttttgataaaatctaatatagattatttacgtagatggattataaaatttaggcagtagattttagtctaaaagtcaaatcataatatgaggcactgtgatctgggaataaaggaaactttaatattcatgagcca

SEQ ID NO: 32702 - DNA, 483 bp, Homo sapiens
agtgaaagacccccataaggaagattataagatactgatgaaagaaactgaacaggatacaaagggaaagacatcccaagctcatggatcagaataattaatattgttaaagtggcagtactctccaaagcaatctacagattcagtgcaatctgtatcaaaatacgagtgacattcaaaacagaatgtcactggaagaaaaaaatctggataggcaaggtggctcacgcctgtaatcccaccactttagaaaaccaaggcaggagatcacttgaggccaggagtttgagactgtcatagtgagatctctctacaaaaaaatgcaagaactagccaggtgtggtgtcgtgcacctatagtccaagctacttgggagactaaggtgtggggatcacttgatccaggagtttgaggttacagtgagctatgaccgctactgcactccagcccaggcaacagaacaagaccctgtttcaaaaaaaa

SEQ ID NO: 32703 - DNA, 614 bp, Homo sapiens
acataatattctatagagtattaaatgagatactagccctaggcaggtcccattttcttatcaacttctagaaactgtcataaagaggactgcatctcccacagcaacactgtaattgggagttgtattcctcatcaaggacaagatggcaacggtgatatgggagggggacagggaagtgctgggtagagaagggcagggtcactggcaagggctccaccctcaggcttgtgcccatggacctaatgagaacaaggactcctgtcttcttgcccaaatgttgcattttccaagaccactctggcctgccatgccacccattctgtgcctataaaaaccctgagaccccagcgggcacacacacaagcggctggacgtcaagaggaacacactggcagaagaacacatcgaaagacgctggcaggccattgatggtggaacgattcggacgccaagggaaattcggccaaggacagtaggagatcccggctgctgagcagccagactccagaggaagactaccttcccatgctatcccccttctggctccccagccatctgctgagagctacttccaccactcaataaatcttgcattcattctccaaaaaaaa

SEQ ID NO: 32704 - DNA, 3039 bp, Homo sapiens
tcactttcgagagtgccgtctatttgccacacacttccctgatgaaatgtctggatttggactaaagaaaaaaggaaaggctagcagtcatccaacagaatcatgagacagactttgccttgtatctacttttgggggggccttttgccctttgggatgctgtgtgcatcctccaccaccaagtgcactgttagccatgaagttgctgactgcagccacctgaagttgactcaggtacccgatgatctacccacaaacataacagtgttgaaccttacccataatcaactcagaagattaccagccgccaacttcacaaggtatagccagctaactagcttggatgtaggatttaacaccatctcaaaactggagccagaattgtgccagaaacttcccatgttaaaagttttgaacctccagcacaatgagctatctcaactttctgataaaacctttgccttctgcacgaatttgactgaactccatctcatgtccaactcaatccagaaaattaaaaataatccctttgtcaagcagaagaatttaatcacattagatctgtctcataatggcttgtcatctacaaaattaggaactcaggttcagctggaaaatctccaagagcttctattatcaaacaataaaattcaagcgctaaaaagtgaagaactggatatctttgccaattcatctttaaaaaaattagagttgtcatcgaatcaaattaaagagttttctccagggtgttttcacgcaattggaagattatttggcctctttctgaacaatgtccagctgggtcccagccttacagagaagctatgtttggaattagcaaacacaagcattcggaatctgtctctgagtaacagccagctgtccaccaccagcaatacaactttcttgggactaaagtggacaaatctcactatgctcgatctttcctacaacaacttaaatgtggttggtaacgattcctttgcttggcttccacaactagaatatttcttcctagagtataataatatacagcatttgttttctcactctttgcacgggcttttcaatgtgaggtacctgaatttgaaacggtcttttactaaacaaagtatttcccttgcctcactccccaagattgatgatttttcttttcagtggctaaaatgtttggagcaccttaacatggaagataatgatattccaggcataaaaagcaatatgttcacaggattgataaacctgaaatacttaagtctatccaactcctttacaagtttgcgaactttgacaaatgaaacatttgtatcacttgctcattctcccttacacatactcaacctaaccaagaataaaatctcaaaaatagagagtgatgctttctcttggttgggccacctagaagtacttgacctgggccttaatgaaattgggcaagaactcacaggccaggaatggagaggtctagaaaatattttcgaaatctatctttcctacaacaagtacctgcagctgactaggaactcctttgccttggtcccaagccttcaacgactgatgctccgaagggtggcccttaaaaatgtggatagctctccttcaccattccagcctcttcgtaacttgaccattctggatctaagcaacaacaacatagccaacataaatgatgacatgttggagggtcttgagaaactagaaattctcgatttgcagcataacaacttagcacggctctggaaacacgcaaaccctggtggtcccatttatttcctaaagggtctgtctcacctccacatccttaacttggagtccaacggctttgacgagatcccagttgaggtcttcaaggatttatttgaactaaagatcatcgatttaggattgaataatttaaacacacttccagcatctgtctttaataatcaggtgtctctaaagtcattgaaccttcagaagaatctcataacatccgttgagaagaaggttttcgggccagctttcaggaacctgactgagttagatatgcgctttaatccctttgattgcacgtgtgaaagtattgcctggtttgttaattggattaacgagacccataccaacatccctgagctgtcaagccactacctttgcaacactccacctcactatcatgggttcccagtgagactttttgatacatcatcttgcaaagacagtgccccctttgaactctttttcatgatcaataccagtatcctgttgatttttatctttattgtacttctcatccactttgagggctggaggatatctttttattggaatgtttcagtacatcgagttcttggtttcaaagaaatagacagacagacagaacagtttgaatatgcagcatatataattcatgcctataaagataaggattgggtctgggaacatttctcttcaatggaaaaggaagaccaatctctcaaattttgtctggaagaaagggactttgaggcgggtgtttttgaactagaagcaattgttaacagcatcaaaagaagcagaaaaattatttttgttataacacaccatctattaaaagacccattatgcaaaagattcaaggtacatcatgcagttcaacaagctattgaacaaaatctggattccattatattggttttccttgaggagattccagattataaactgaaccatgcactctgtttgcgaagaggaatgtttaaatctcactgcatcttgaactggccagttcagaaagaacggataggtgcctttcgtcataaattgcaagtagcacttggatccaaaaactctgtacattaaatttatttaaatattcaattagcaaaggagaaactttctcaatttaaaaagttctatggcaaatttaagttttccataaaggtgttataatttgtttattcatatttgtaaatgattatattctatcacaattacatctcttctaggaaaatgtgtctccttatttcaggcctatttttgacaattgacttaattttacccaaaataaaacatataagcacg

SEQ ID NO: 32705 - DNA, 3217 bp, Homo sapiens
tcactttcgagagtgccgtctatttgccacacacttccctgatgaaatgtctggatttggactaaagaaaaaaggaaaggctagcagtcatccaacagaatcatgagacagactttgccttgtatctacttttgggggggccttttgccctttgggatgctgtgtgcatcctccaccaccaagtgcactgttagccatgaagttgctgactgcagccacctgaagttgactcaggtacccgatgatctacccacaaacataacagtgttgaaccttacccataatcaactcagaagattaccagccgccaacttcacaaggtatagccagctaactagcttggatgtaggatttaacaccatctcaaaactggagccagaattgtgccagaaacttcccatgttaaaagttttgaacctccagcacaatgagctatctcaactttctgataaaacctttgccttctgcacgaatttgactgaactccatctcatgtccaactcaatccagaaaattaaaaataatccctttgtcaagcagaagaatttaatcacattagatctgtctcataatggcttgtcatctacaaaattaggaactcaggttcagctggaaaatctccaagagcttctattatcaaacaataaaattcaagcgctaaaaagtgaagaactggatatctttgccaattcatctttaaaaaaattagagttgtcatcgaatcaaattaaagagttttctccagggtgttttcacgcaattggaagattatttggcctctttctgaacaatgtccagctgggtcccagccttacagagaagctatgtttggaattagcaaacacaagcattcggaatctgtctctgagtaacagccagctgtccaccaccagcaatacaactttcttgggactaaagtggacaaatctcactatgctcgatctttcctacaacaacttaaatgtggttggtaacgattcctttgcttggcttccacaactagaatatttcttcctagagtataataatatacagcatttgttttctcactctttgcacgggcttttcaatgtgaggtacctgaatttgaaacggtcttttactaaacaaagtatttcccttgcctcactccccaagattgatgatttttcttttcagtggctaaaatgtttggagcaccttaacatggaagataatgatattccaggcataaaaagcaatatgttcacaggattgataaacctgaaatacttaagtctatccaactcctttacaagtttgcgaactttgacaaatgaaacatttgtatcacttgctcattctcccttacacatactcaacctaaccaagaataaaatctcaaaaatagagagtgatgctttctcttggttgggccacctagaagtacttgacctgggccttaatgaaattgggcaagaactcacaggccaggaatggagaggtctagaaaatattttcgaaatctatctttcctacaacaagtacctgcagctgactaggaactcctttgccttggtcccaagccttcaacgactgatgctccgaagggtggcccttaaaaatgtggatagctctccttcaccattccagcctcttcgtaacttgaccattctggatctaagcaacaacaacatagccaacataaatgatgacatgttggagggtcttgagaaactagaaattctcgatttgcagcataacaacttagcacggctctggaaacacgcaaaccctggtggtcccatttatttcctaaagggtctgtctcacctccacatccttaacttggagtccaacggctttgacgagatcccagttgaggtcttcaaggatttatttgaactaaagatcatcgatttaggattgaataatttaaacacacttccagcatctgtctttaataatcaggtgtctctaaagtcattgaaccttcagaagaatctcataacatccgttgagaagaaggttttcgggccagctttcaggaacctgactgagttagatatgcgctttaatccctttgattgcacgtgtgaaagtattgcctggtttgttaattggattaacgagacccataccaacatccctgagctgtcaagccactacctttgcaacactccacctcactatcatgggttcccagtgagactttttgatacatcatcttgcaaagacagtgccccctttgaactctttttcatgatcaataccagtatcctgttgatttttatctttattgtacttctcatccactttgagggctggaggatatctttttattggaatgtttcagtacatcgagttcttggtttcaaagaaatagacagacagacagaacagtttgaatatgcagcatatataattcatgcctataaagataaggattgggtctgggaacatttctcttcaatggaaaaggaagaccaatctctcaaattttgtctggaagaaagggactttgaggcgggtgtttttgaactagaagcaattgttaacagcatcaaaagaagcagaaaaattatttttgttataacacaccatctattaaaagacccattatgcaaaagattcaaggtacatcatgcagttcaacaagctattgaacaaaatctggattccattatattggttttccttgaggagattccagattataaactgaaccatgcactctgtttgcgaagaggaatgtttaaatctcactgcatcttgaactggccagttcagaaagaacggataggtgcctttcgtcataaattgcaagtagcacttggatccaaaaactctgtacattaaatttatttaaatattcaattagcaaaggagaaactttctcaatttaaaaagttctatggcaaatttaagttttccataaaggtgttataatttgtttattcatatttgtaaatgattatattctatcacaattacatctcttctaggaaaatgtgtctccttatttcaggcctatttttgacaattgacttaattttacccaaaataaaacatataagcacgtaagaacattgtctactgattaatatacaatcagccactgagcctatgacagcttaaggagtttgaaaacattcctcattttaagaaaagttagaggtatatgagggtttgtgatgatctttttgtattttggatgcacttagaatgaaagataattgtttcaatgggtataatgcta

SEQ ID NO: 32706 - DNA, 2712 bp, Homo sapiens
gacacaaccaggaactgccccaggagtgacttcacgagcagtttattcattgcaattgttctcatggtgataaagaaaaagtaccaggagatggatcctggactggaaggtcagagaagcctccctgaaaaggtggcatctaagctgaggctgtgaatgctgagcagaagttagcccgtggccaggggaggtcagaggctggagtaagaggtgggcgctgcaggaaccgattttctccagggtgttttcacgcaattggaagattatttggcctctttctgaacaatgtccagctgggtcccagccttacagagaagctatgtttggaattagcaaacacaagcattcggaatctgtctctgagtaacagccagctgtccaccaccagcaatacaactttcttgggactaaagtggacaaatctcactatgctcgatctttcctacaacaacttaaatgtggttggtaacgattcctttgcttggcttccacaactagaatatttcttcctagagtataataatatacagcatttgttttctcactctttgcacgggcttttcaatgtgaggtacctgaatttgaaacggtcttttactaaacaaagtatttcccttgcctcactccccaagattgatgatttttcttttcagtggctaaaatgtttggagcaccttaacatggaagataatgatattccaggcataaaaagcaatatgttcacaggattgataaacctgaaatacttaagtctatccaactcctttacaagtttgcgaactttgacaaatgaaacatttgtatcacttgctcattctcccttacacatactcaacctaaccaagaataaaatctcaaaaatagagagtgatgctttctcttggttgggccacctagaagtacttgacctgggccttaatgaaattgggcaagaactcacaggccaggaatggagaggtctagaaaatattttcgaaatctatctttcctacaacaagtacctgcagctgactaggaactcctttgccttggtcccaagccttcaacgactgatgctccgaagggtggcccttaaaaatgtggatagctctccttcaccattccagcctcttcgtaacttgaccattctggatctaagcaacaacaacatagccaacataaatgatgacatgttggagggtcttgagaaactagaaattctcgatttgcagcataacaacttagcacggctctggaaacacgcaaaccctggtggtcccatttatttcctaaagggtctgtctcacctccacatccttaacttggagtccaacggctttgacgagatcccagttgaggtcttcaaggatttatttgaactaaagatcatcgatttaggattgaataatttaaacacacttccagcatctgtctttaataatcaggtgtctctaaagtcattgaaccttcagaagaatctcataacatccgttgagaagaaggttttcgggccagctttcaggaacctgactgagttagatatgcgctttaatccctttgattgcacgtgtgaaagtattgcctggtttgttaattggattaacgagacccataccaacatccctgagctgtcaagccactacctttgcaacactccacctcactatcatgggttcccagtgagactttttgatacatcatcttgcaaagacagtgccccctttgaactctttttcatgatcaataccagtatcctgttgatttttatctttattgtacttctcatccactttgagggctggaggatatctttttattggaatgtttcagtacatcgagttcttggtttcaaagaaatagacagacagacagaacagtttgaatatgcagcatatataattcatgcctataaagataaggattgggtctgggaacatttctcttcaatggaaaaggaagaccaatctctcaaattttgtctggaagaaagggactttgaggcgggtgtttttgaactagaagcaattgttaacagcatcaaaagaagcagaaaaattatttttgttataacacaccatctattaaaagacccattatgcaaaagattcaaggtacatcatgcagttcaacaagctattgaacaaaatctggattccattatattggttttccttgaggagattccagattataaactgaaccatgcactctgtttgcgaagaggaatgtttaaatctcactgcatcttgaactggccagttcagaaagaacggataggtgcctttcgtcataaattgcaagtagcacttggatccaaaaactctgtacattaaatttatttaaatattcaattagcaaaggagaaactttctcaatttaaaaagttctatggcaaatttaagttttccataaaggtgttataatttgtttattcatatttgtaaatgattatattctatcacaattacatctcttctaggaaaatgtgtctccttatttcaggcctatttttgacaattgacttaattttacccaaaataaaacatataagcacgtaagaacattgtctactgattaatatacaatcagccactgagcctatgacagcttaaggagtttgaaaacattcctcattttaagaaaagttagaggtatatgagggtttgtgatgatctttttgtattttggatgcacttagaatgaaagataattgtttcaatgggtataatgcta

SEQ ID NO: 32707 - DNA, 625 bp, Homo sapiens
agcggcaccaagacacaaccaggaactgccccaggagtgacttcacgagcagtttattcattgcaattgttctcatggtgataaagaaaaagtaccaggagatggatcctggactggaaggtcagagaagcctccctgaaaaggtggcatctaagctgaggctgtgaatgctgagcagaagttagcccgtggccaggggaggtcagaggctggagtaagaggtgggcgctgcaggaaccgagtaaggaaggactcgtgcattacaggaagggggagaaatgctctgcccatgggatgtggtgaagggtgagcggagatggagtaaagaactgcatctggccgggtgcagcggctcaggcctataatcccagcactttgggaggctgaggcgggcggatcatgaggtcaggagttcaagaccagcctggcctacacggtgaaaccccgactctactaaaaatacaaaacttagctggacgtggtggcgcatgcctgtaatcccagctactcgggaggctgaggcaggagaattgcttgaactgaggaggtggagtttgcagtgagctgagattgcactgctgtactccagcctgggcgacagagcgagactccgtctcaaaaaaaa

SEQ ID NO: 32708 - DNA, 542 bp, Homo sapiens
taaattctgctcctgggaacagttcccttaagcagttcctgatttttgcatctttaacacttcttttaaattaattatcatctaattttttaacatatctgtactttcccatctctcaagtttcttagactctactgaggtcagggttgagatatataaggcttctctgattcaagggcactggggaagaccagtgcaatgttgcgacagaggtatccatttctatatacagtcggccccattttaactcactgtaacaccagatacatttatataatgtgaggctttctccttcagagcaacaggatattctgtgaggtatttggcagtgataattagaaactgcaggtaaacaatgttgctgccagttccgcatctgaaagtagaactcccaagtcattggtgtactggggaggtgctgacagttaaaacctgcttagatgggcatggggggagaagtaccccaaagttgagggagctcacatcaatcctaagctaacatattcacccccaacacatgccccatctttttaaaaaaaaaa

SEQ ID NO: 32709 - DNA, 920 bp, Homo sapiens
aaacacaattgtgtattgtcatgaggcatccctgattaacccaggttgtagtagaacaagcccagagctgatgctttctcttagaaaccagagagatgaatgtgactgacgtttttctttctccctctcatttttcttttttttaagagacaggatcttgctctgctgcccaggctagagtgcagtggtgcgatcatagctcactgcaacctccaactcctggcctcaagagatcctcccatttcagcctcccaaagtgctggggttataggcatgagtcactgcaccaggcaagacttggtttatctgtaaaacggagagaatagttacagtcttgtgaaggtcccaaacctgtgttgtctagtacaatagccactagctccctgtggatgcttaaatgtaaacgttttagaacgaaagcttcagttcttcagtggcactggccacaagttaagggcttgataactgcaggtggctggtggctacggcattggacagcacagaagagaacttcccattatggaaaaaggttctgtgggacagggctggtgtgaggcaggtacagtgcccagtccttggttaggacatgtaaggccagctgtgattataattatgatcatgatcctgattcttcgtgaactcccaaatctaggcccattacaagggtgagggaagtgagaagagggctttgaaaaaagaaagaagaaaagacaaaataattgtggagtttttgctggtgaagagatgagaactgaggtagcacaacctcagctccccactgcagaacagaagaaagagacttcagggaaaaacagtcttgctctgtcactcaggctggagtgcaatggcacaatcacagctcactgtagcctcaaactcccaggctcaagcaatcctcctgcctcagcctcctgagtagg

SEQ ID NO: 32710 - DNA, 339 bp, Homo sapiens
ggaatgctttgtcggtaaggggtcacatgcaagttgcaaatacaaggatgtacaaatgcccaggaaagacctgggaaggtcctatgtgtccacctcagattgaccttgagcctctgcacaagcaggaagtgatagccaagatagaggtgtccactgcctgacttgaatgttgaaggcatgcccgaacaagcacataaagcttccagcaaagactaggatagttattagtttcaggcatttaaggatatctcagttcaataattagacagctaataagctaactcagcagagactttagtgactacatatgtatgacaaagaatgcagattttacagaat

SEQ ID NO: 32711 - DNA, 210 bp, Homo sapiens
atatggccatccccaccacacctcaccctcaacccacttccacctccggaggaggaagcttttcagtagcttcacaagagttggctttgcaggcctgcgtgagctcaatagaagaactggctgacactggctgctgcgccccggaggctctctctttccagaaatgccaagttcttgagcaaggagctgccaccattacagcaccacata

SEQ ID NO: 32712 - DNA, 346 bp, Homo sapiens
caaccttactcatggactcaggtcacatgaaatgatatttatctctgataatagaccttatcttgaagtctactttgtttactattacgaatattgccactccagttttcttatgattagtgtttacatgatacactttctgcagtttcacctttcatggtttcagttacccatggccaatagtggttcaaaaatattaaatggagaattccagaaataaacaattaaattttaaacggcatgctgttctcatagcatgatgaagtctcatagtgtccttcccaggatgtgaagcaccccttgaccagcatatcagcactgtacaggctgcctgccagttggtcac

SEQ ID NO: 32713 - DNA, 469 bp, Homo sapiens
gcctgcatgtctgccaagttcaagacctggtttggccctggggatctaggaatatccaaatgagacagaccttgaatctcagggttggttgagtttcagggtggtgacatgagatttatggcttgaatctcacagagttgtgacatgaaaagtattctctccacttggagaagtgtttcctcatgtctcccactggcttgggtaaaatattacctgtgatgatttcaccccgctttgctctgacttcacactcatgaagaagtcgctattgactacgcagcttcctaacatcctggcttggggaatgggaggtgccctggttgggaatgagagttctccaggcactgaagatggagagcatttattctatcttaattggcactagagaaggcatcagtctcttgtgcatctgtgagttcatcaatcttcctgatacctgtcgattctggacctcccaagatccaatttc

SEQ ID NO: 32714 - DNA, 463 bp, Homo sapiens
ctgacgggccagtgagcgggcgtcgggagtgggcggatgcgttggggttcgggtcgtgggtgttgaggcggagaggaaggcgtggtgtggcgtctccaggtgattgcgattgggggaaggtagaggagccagagaacgactcagccgtttcgggggaagaggaagttggacaacatcggctgttttagtgctttttatttttccccaattcagcagagaatattttcaaggggggtgagttataatgacctatcgcgttttactgagcccagttccactcccgcccttccttggctttgtagggtctcccctccgctccctcggaagcgcttctaagaaggtgggcagagggggggaggtttgctaccaacagctcatgaataattcatgagccccgcccttcgtcaggaagccccgcccctccggatcgcgctgacgcacgctgcgtttaccaaacttaagg

SEQ ID NO: 32715 - DNA, 3281 bp, Homo sapiens
gcccactaggggggaggaaggaggcggggtggggaggttgttggatttagagccgggcggagaccgctgagactcattcctcaggaacaagggtcgggtgtcaaggagaccttttcacaccagctcccgtcccccgcctacggtgggtgggatcgcgcggcagagacaaaggagatcagtagggccggacatagctgcgcagggaagtagggtgtcagtttggggtggtgggcttttgcgggggctgtgggggggttatatttaaactcccagagccgttaagttggttcgtagtctgatgcgcgcgcaaccagggtggtggcggagtgcgcatgcgtggttcccgggcgaagggaacgcgcgctcaccgtgcgcgctcgcggccgggtggtagtggcggaggagaaaggggtcggcgcacgcgcggttgagtcctcgagtagttcgggtctcgcgggcctcttgttttggtctcgcgggctagtagggcgcacttggcggggaggcgcttgggcgcgagactaggcgtgaagagcagagctgcgcgcgcactcgggaaaggggggaagggagcagggtccaggcagggggggttaggccccctgatccccctcgttaccccgactggcacggaataaggggaggaaatgatcgagatggcggcggagaaggagccgtttctggtgccggccccgccgccgccgctcaaagatgagtcgggcggagggggcggccccacggtgccaccgcaccaagaggccgcctctggggagctccgcggcgggacggagcgtggtccgggtcgttgcgcgccatctgcggggtccccagccgctgcggtcggtcgggaaagccccggggccgcggccacctcctccagtggtccccaggcgcagcagcaccgagggggcggcccccaggcgcagtcgcatggggaggcccgcctgtcggatcccccggggcgagccgctcccccggacgtgggggaggagcgccggggagggggcgggacagagctgggtccccctgctcctcctcgaccccgcaatggctatcagccccaccggccacctggggggggcgggggcaagaggagaaatagctgtaatgtagggggaggcgggggaggcttcaaacatccggccttcaagaggcgcaggcgggtgaattcggactgtgactctgtgttaccctccaacttcctcctggggggcaatatctttgatcccctgaacctgaatagcctcctggatgaggaagtgagccgcactctcaacgcggagacccctaagtcatccccccttccggccaaagggcgagatccggtggagatcctcatccccaaagatattactgacccgctcagtctcaatacttgcactgatgagggccatgtagttcttgcttcgccactcaagactggtcggaagcggcatagacaccggggacagcaccaccagcagcagcaggcagccggagggagtgagagtcaccccgtgccgcccacagcccctctcacccccttactccacggggagggcgcctcacagcagccgcggcacaggggccagaaccgggatgccccccaaccctatgaactcaacacagccatcaactgcagggatgaagtggtgtctccccttccatctgctctgcagggtccctcaggctccctatcagcccctccagctgcctcagttatctctgcacccccatcttcctcctcccgacatcgcaaacgtcgcaggacttccagcaagtcggaggcaggggctaggggtggaggccagggttccaaggaaaagggccgagggagttggggaggccgccaccaccaccaccacccactgcctgcagcaggcttcaaaaagcaacagcgcaagttccagtatgggaattattgcaaatactatgggtaccgcaatccttcctgtgaggatgggcgccttcgggtgttgaagcctgagtggtttcggggccgggacgtcctagatctgggctgcaatgtgggccatctgaccctgagcattgcctgcaagtggggcccgtcccgcatggtgggcctggatatcgattcccggctcatccattctgcccgccaaaacatccgacactacctttccgaggagctgcgtctcccaccccagactttggaaggggacccgggggcagagggtgaggaagggaccaccaccgttcgaaagaggagctgcttcccagcctcgctgactgccagccggggtcccatcgctgccccccaagtgcccttggatggagcggacacatcagtcttccccaacaatgttgtcttcgtcacgggtaattatgtgctggatcgagatgacctggtggaggcccaaacacctgagtatgatgtggtgctctgcctcagcctcaccaagtgggtgcatctgaactggggagacgagggcctgaagcgcatgtttcgccggatctaccggcacctacgccctgggggcatcctggtcctagagccccaaccctggtcgtcgtatggcaagagaaagactcttacagaaacgatctacaagaactactaccgaatccaattgaagccagagcagttcagttcctacctgacatccccagacgtgggcttctccagctatgagcttgtggccacaccccacaacacctctaaaggcttccagcgtcctgtgtacctgttccacaaggcccgatcccccagccactaagtggccccctaaacagaaagtgtgaagaggctgccctcgctgctcataaggacctgggggaagaggaaagtgtcccaaggtctttcctttctgactccaaaaatagtttcctttcttggatctgcaaagaaagcttttcttccgtcgctgcctcagcctcctccctatgcctctggcacctgcgcagcaaggctggctgtgctggagtcaccatcatcttcctctcccccagcctcccaggctggatggcatggactgtttgctgacctctgttctcttagggcatgggaggtgggaggatatcaaattctctagccctttcctcctattctcccaaggagagagattcccatttctcctcggccattgtacctagctcttgtccctagctgcatttcagtggaccatggatagagggactgagggttagacggggaagactggcagggaggcacgcaggtactgtgaaaatccttccctttgccctcccccagtgggagagggggttgggttttcaatgtgagaacagcacaataaacttgatgtctagggcagtggccccca

SEQ ID NO: 32716 - DNA, 3321 bp, Homo sapiens
gcccactaggggggaggaaggaggcggggtggggaggttgttggatttagagccgggcggagaccgctgagactcattcctcaggaacaagggtcgggtgtcaaggagaccttttcacaccagctcccgtcccccgcctacggtgggtgggatcgcgcggcagagacaaaggagatcagtagggccggacatagctgcgcagggaagtagggtgtcagtttggggtggtgggcttttgcgggggctgtgggggggttatatttaaactcccagagccgttaagttggttcgtagtctgatgcgcgcgcaaccagggtggtggcggagtgcgcatgcgtggttcccgggcgaagggaacgcgcgctcaccgtgcgcgctcgcggccgggtggtagtggcggaggagaaaggggtcggcgcacgcgcggttgagtcctcgagtagttcgggtctcgcgggcctcttgttttggtctcgcgggctagtagggcgcacttggcggggaggcgcttgggcgcgagactaggcgtgaagagcagagctgcgcgcgcactcgggaaaggggggaagggagcagggtccaggcagggggggttaggccccctgatccccctcgttaccccgactggcacggaataaggggaggaaatgatcgagatggcggcggagaaggagccgtttctggtgccggccccgccgccgccgctcaaagatgagtcgggcggagggggcggccccacggtgccaccgcaccaagaggccgcctctggggagctccgcggcgggacggagcgtggtccgggtcgttgcgcgccatctgcggggtccccagccgctgcggtcggtcgggaaagccccggggccgcggccacctcctccagtggtccccaggcgcagcagcaccgagggggcggcccccaggcgcagtcgcatggggaggcccgcctgtcggatcccccggggcgagccgctcccccggacgtgggggaggagcgccggggagggggcgggacagagctgggtccccctgctcctcctcgaccccgcaatggctatcagccccaccggccacctggggggggcgggggcaagaggagaaatagctgtaatgtagggggaggcgggggaggcttcaaacatccggccttcaagaggcgcaggcgggtgaattcggactgtgactctgtgttaccctccaacttcctcctggggggcaatatctttgatcccctgaacctgaatagcctcctggatgaggaagtgagccgcactctcaacgcggagacccctaagtcatccccccttccggccaaagggcgagatccggtggagatcctcatccccaaagatattactgacccgctcagtctcaatacttgcactgatgagggccatgtagttcttgcttcgccactcaagactggtcggaagcggcatagacaccggggacagcaccaccagcagcagcaggcagccggagggagtgagagtcaccccgtgccgcccacagcccctctcacccccttactccacggggagggcgcctcacagcagccgcggcacaggggccagaaccgggatgccccccaaccctatgaactcaacacagccatcaactgcagggatgaagtggtgtctccccttccatctgctctgcagggtccctcaggctccctatcagcccctccagctgcctcagttatctctgcacccccatcttcctcctcccgacatcgcaaacgtcgcaggacttccagcaagtcggaggcaggggctaggggtggaggccagggttccaaggaaaagggccgagggagttggggaggccgccaccaccaccaccacccactgcctgcagcaggcttcaaaaagcaacagcgcaagttccagtatgggaattattgcaaatactatgggtaccgcaatccttcctgtgaggatgggcgccttcgggtgttgaagcctgagtggtttcggggccgggacgtcctagatctgggctgcaatgtgggccatctgaccctgagcattgcctgcaagtggggcccgtcccgcatggtgggcctggatatcgattcccggctcatccattctgcccgccaaaacatccgacactacctttccgaggagctgcgtctcccaccccagactttggaaggggacccgggggcagagggtgaggaagggaccaccaccgttcgaaagaggagctgcttcccagcctcgctgactgccagccggggtcccatcgctgccccccaagtgcccttggatggagcggacacatcagtcttccccaacaatgttgtcttcgtcacgggtaattatgtgctggatcgagatgacctggtggaggcccaaacacctgagtatgatgtggtgctctgcctcagcctcaccaagtgggtgcatctgaactggggagacgagggcctgaagcgcatgtttcgccggatctaccggcacctacgccctgggggcatcctggtcctagagccccaaccctggtcgtcgtatggcaagagaaagactcttacagaaacgatctacaagaactactaccgaatccaattgaagccagagcagttcagttcctacctgacatccccagacgtgggcttctccagctatgagcttgtggccacaccccacaacacctctaaaggcttccagcgtcctgtgtacctgttccacaaggcccgatcccccagccactaagtggccccctaaacagaaagtgtgaagaggctgccctcgctgctcataaggacctgggggaagaggaaagtgtcccaaggtctttcctttctgactccaaaaatagtttcctttcttggatctgcaaagaaagcttttcttccgtcgctgcctcagcctcctccctatgcctctggcacctgcgcagcaaggctggctgtgctggagtcaccatcatcttcctctcccccagcctcccaggctggatggcatggactgtttgctgacctctgttctcttagggcatgggaggtgggaggatatcaaattctctagccctttcctcctattctcccaaggagagagattcccatttctcctcggccattgtacctagctcttgtccctagctgcatttcagtggaccatggatagagggactgagggttagacggggaagactggcagggaggcacgcaggtactgtgaaaatccttccctttgccctcccccagtgggagagggggttgggttttcaatgtgagaacagcacaataaacttgatgtctagggcagtggcccccaaaaaaaaaaaaaaaaaaaaaaaaaaaaaaaaaaaaaaaac

SEQ ID NO: 32717 - DNA, 3227 bp, Homo sapiens
gcccactaggggggaggaaggaggcggggtggggaggttgttggatttagagccgggcggagaccgctgagactcattcctcaggaacaagggtcgggtgtcaaggagaccttttcacaccagctcccgtcccccgcctacggtgggtgggatcgcgcggcagagacaaaggagatcagtagggccggacatagctgcgcagggaagtagggtgtcagtttggggtggtgggcttttgcgggggctgtgggggggttatatttaaactcccagagccgttaagttggttcgtagtctgatgcgcgcgcaaccagggtggtggcggagtgcgcatgcgtggttcccgggcgaagggaacgcgcgctcaccgtgcgcgctcgcggccgggtggtagtggcggaggagaaaggggtcggcgcacgcgcggttgagtcctcgagtagttcgggtctcgcgggcctcttgttttggtctcgcgggctagtagggcgcacttggcggggaggcgcttgggcgcgagactaggcgtgaagagcagagctgcgcgcgcactcgggaaaggggggaagggagcagggtccaggcagggggggttaggccccctgatccccctcgttaccccgactggcacggaataaggggaggaaatgatcgagatggcggcggagaaggagccgtttctggtgccggccccgccgccgccgctcaaagatgagtcgggcggagggggcggccccacggtgccaccgcaccaagaggccgcctctggggagctccgcggcgggacggagcgtggtccgggtcgttgcgcgccatctgcggggtccccagccgctgcggtcggtcgggaaagccccggggccgcggccacctcctccagtggtccccaggcgcagcagcaccgagggggcggcccccaggcgcagtcgcatggggaggcccgcctgtcggatcccccggggcgagccgctcccccggacgtgggggaggagcgccggggagggggcgggacagagctgggtccccctgctcctcctcgaccccgcaatggctatcagccccaccggccacctggggggggcgggggcaagaggagaaatagctgtaatgtagggggaggcgggggaggcttcaaacatccggccttcaagaggcgcaggcgggtgaattcggactgtgactctgtgttaccctccaacttcctcctggggggcaatatctttgatcccctgaacctgaatagcctcctggatgaggaagtgagccgcactctcaacgcggagacccctaagtcatccccccttccggccaaagggcgagatccggtggagatcctcatccccaaagatattactgacccgctcagtctcaatacttgcactgatgagggccatgtagttcttgcttcgccactcaagactggtcggaagcggcatagacaccggggacagcaccaccagcagcagcaggcagccggagggagtgagagtcaccccgtgccgcccacagcccctctcacccccttactccacggggagggcgcctcacagcagccgcggcacaggggccagaaccgggatgccccccaaccctatgaactcaacacagccatcaactgcagggatgaagtggtgtctccccttccatctgctctgcagggtccctcaggctccctatcagcccctccagctgcctcagttatctctgcacccccatcttcctcctcccgacatcgcaaacgtcgcaggacttccagcaagtcggaggcaggggctaggggtggaggccagggttccaaggaaaagggccgagggagttggggaggccgccaccaccaccaccacccactgcctgcagcaggcttcaaaaagcaacagcgcaagttccagtatgggaattattgcaaatactatgggtaccgcaatccttcctgtgaggatgggcgccttcgggtgttgaagcctgagtggtttcggggccgggacgtcctagatctgggctgcaatgtgggccatctgaccctgagcattgcctgcaagtggggcccgtcccgcatggtgggcctggatatcgattcccggctcatccattctgcccgccaaagggacccgggggcagagggtgaggaagggaccaccaccgttcgaaagaggagctgcttcccagcctcgctgactgccagccggggtcccatcgctgccccccaagtgcccttggatggagcggacacatcagtcttccccaacaatgttgtcttcgtcacgggtaattatgtgctggatcgagatgacctggtggaggcccaaacacctgagtatgatgtggtgctctgcctcagcctcaccaagtgggtgcatctgaactggggagacgagggcctgaagcgcatgtttcgccggatctaccggcacctacgccctgggggcatcctggtcctagagccccaaccctggtcgtcgtatggcaagagaaagactcttacagaaacgatctacaagaactactaccgaatccaattgaagccagagcagttcagttcctacctgacatccccagacgtgggcttctccagctatgagcttgtggccacaccccacaacacctctaaaggcttccagcgtcctgtgtacctgttccacaaggcccgatcccccagccactaagtggccccctaaacagaaagtgtgaagaggctgccctcgctgctcataaggacctgggggaagaggaaagtgtcccaaggtctttcctttctgactccaaaaatagtttcctttcttggatctgcaaagaaagcttttcttccgtcgctgcctcagcctcctccctatgcctctggcacctgcgcagcaaggctggctgtgctggagtcaccatcatcttcctctcccccagcctcccaggctggatggcatggactgtttgctgacctctgttctcttagggcatgggaggtgggaggatatcaaattctctagccctttcctcctattctcccaaggagagagattcccatttctcctcggccattgtacctagctcttgtccctagctgcatttcagtggaccatggatagagggactgagggttagacggggaagactggcagggaggcacgcaggtactgtgaaaatccttccctttgccctcccccagtgggagagggggttgggttttcaatgtgagaacagcacaataaacttgatgtctagggcagtggccccca

SEQ ID NO: 32718 - DNA, 3361 bp, Homo sapiens
gcccactaggggggaggaaggaggcggggtggggaggttgttggatttagagccgggcggagaccgctgagactcattcctcaggaacaagggtcgggtgtcaaggagaccttttcacaccagctcccgtcccccgcctacggtgggtgggatcgcgcggcagagacaaaggagatcagtagggccggacatagctgcgcagggaagtagggtgtcagtttggggtggtgggcttttgcgggggctgtgggggggttatatttaaactcccagagccgttaagttggttcgtagtctgatgcgcgcgcaaccagggtggtggcggagtgcgcatgcgtggttcccgggcgaagggaacgcgcgctcaccgtgcgcgctcgcggccgggtggtagtggcggaggagaaaggggtcggcgcacgcgcggttgagtcctcgagtagttcgggtctcgcgggcctcttgttttggtctcgcgggctagtagggcgcacttggcggggaggcgcttgggcgcgagactaggcgtgaagagcagagctgcgcgcgcactcgggaaaggggggaagggagcagggtccaggcagggggggttaggccccctgatccccctcgttaccccgactggcacggaataaggggaggaaatgatcgagatggcggcggagaaggagccgtttctggtgccggccccgccgccgccgctcaaagatgagtcgggcggagggggcggccccacggtgccaccgcaccaagaggccgcctctggggagctccgcggcgggacggagcgtggtccgggtcgttgcgcgccatctgcggggtccccagccgctgcggtcggtcgggaaagccccggggccgcggccacctcctccagtggtccccaggcgcagcagcaccgagggggcggcccccaggcgcagtcgcatggggaggcccgcctgtcggatcccccggggcgagccgctcccccggacgtgggggaggagcgccggggagggggcgggacagagctgggtccccctgctcctcctcgaccccgcaatggctatcagccccaccggccacctggggggggcgggggcaagaggagaaatagctgtaatgtagggggaggcgggggaggcttcaaacatccggccttcaagaggcgcaggcgggtgaattcggactgtgactctgtgttaccctccaacttcctcctggggggcaatatctttgatcccctgaacctgaatagcctcctggatgaggaagtgagccgcactctcaacgcggagacccctaagtcatccccccttccggccaaagggcgagatccggtggagatcctcatccccaaagatattactgacccgctcagtctcaatacttgcactgatgagggccatgtagttcttgcttcgccactcaagactggtcggaagcggcatagacaccggggacagcaccaccagcagcagcaggcagccggagggagtgagagtcaccccgtgccgcccacagcccctctcacccccttactccacggggagggcgcctcacagcagccgcggcacaggggccagaaccgggatgccccccaaccctatgaactcaacacagccatcaactgcagggatgaagtggtgtctccccttccatctgctctgcagggtccctcaggctccctatcagcccctccagctgcctcagttatctctgcacccccatcttcctcctcccgacatcgcaaacgtcgcaggacttccagcaagtcggaggcaggggctaggggtggaggccagggttccaaggaaaagggccgagggagttggggaggccgccaccaccaccaccacccactgcctgcagcaggcttcaaaaagcaacagcgcaagttccagtatgggaattattgcaaatactatgggtaccgcaatccttcctgtgaggatgggcgccttcgggtgttgaagcctgagtggtttcggggccgggacgtcctagatctgggctgcaatgtgggccatctgaccctgagcattgcctgcaagtggggcccgtcccgcatggtgggcctggatatcgattcccggctcatccattctgcccgccaaaacatccgacactacctttccgaggagctgcgtctcccaccccagactttggaaggggacccgggggcagagggtgaggaagggaccaccaccgttcgaaagaggagctgcttcccagcctcgctgactgccagccggggtcccatcgctgccccccaagtgcccttggatggagcggacacatcagtcttccccaacaatgttgtcttcgtcacgggtaattatgtgctggatcgagatgacctggtggaggcccaaacacctgagtatgatgtggtgctctgcctcagcctcaccaagtgggtgcatctgaactggggagacgagggcctgaagcgcatgtttcgccggatctaccggcacctacgccctgggggcatcctggtcctagagccccaaccctggtcgtcgtatggcaagagaaagactcttacagaaacgatctacaagaactactaccgaatccaattgaagccagagcagttcagttcctacctgacatccccagacgtgggcttctccagctatgagcttgtggccacaccccacaacacctctaaaggcttccagcgtcctgtgtacctgttccacaaggcccgatcccccagccactaagtggccccctaaacagaaagtgtgaagaggctgccctcgctgctcataaggacctgggggaagaggaaagtgtcccaaggtctttcctttctgactccaaaaatagtttcctttcttggatctgcaaagaaagcttttcttccgtcgctgcctcagcctcctccctatgcctctggcacctgcgcagcaaggctggctgtgctggagtcaccatcatcttcctctcccccagcctcccaggctggatggcatggactgtttgctgacctctgttctcttagggcatgggaggtgggaggatatcaaattctctagccctttcctcctattctcccaaggagagagattcccatttctcctcggccattgtacctagctcttgtccctagctgcatttcagtggaccatggatagagggactgagggttagacggggaagactggcagggaggcacgcaggtactgtgaaaatccttccctttgccctcccccagtgggagagggggttgggttttcaatgtgagaacagcacaataaacttgatgtctagggcagtggcccccaaaaaaaaaaaaaaaaaaaaaaaaaaaaaaaaaaaaaaaaaaaaaaaaaaaaaaaaaaaaaaaaaaaaaaaaaaaaaaaac

SEQ ID NO: 32719 - DNA, 3290 bp, Homo sapiens
  misc_feature (3267)..(3267): n is a, c, g, or t
  misc_feature (3269)..(3269): n is a, c, g, or t
gcccactaggggggaggaaggaggcggggtggggaggttgttggatttagagccgggcggagaccgctgagactcattcctcaggaacaagggtcgggtgtcaaggagaccttttcacaccagctcccgtcccccgcctacggtgggtgggatcgcgcggcagagacaaaggagatcagtagggccggacatagctgcgcagggaagtagggtgtcagtttggggtggtgggcttttgcgggggctgtgggggggttatatttaaactcccagagccgttaagttggttcgtagtctgatgcgcgcgcaaccagggtggtggcggagtgcgcatgcgtggttcccgggcgaagggaacgcgcgctcaccgtgcgcgctcgcggccgggtggtagtggcggaggagaaaggggtcggcgcacgcgcggttgagtcctcgagtagttcgggtctcgcgggcctcttgttttggtctcgcgggctagtagggcgcacttggcggggaggcgcttgggcgcgagactaggcgtgaagagcagagctgcgcgcgcactcgggaaaggggggaagggagcagggtccaggcagggggggttaggccccctgatccccctcgttaccccgactggcacggaataaggggaggaaatgatcgagatggcggcggagaaggagccgtttctggtgccggccccgccgccgccgctcaaagatgagtcgggcggagggggcggccccacggtgccaccgcaccaagaggccgcctctggggagctccgcggcgggacggagcgtggtccgggtcgttgcgcgccatctgcggggtccccagccgctgcggtcggtcgggaaagccccggggccgcggccacctcctccagtggtccccaggcgcagcagcaccgagggggcggcccccaggcgcagtcgcatggggaggcccgcctgtcggatcccccggggcgagccgctcccccggacgtgggggaggagcgccggggagggggcgggacagagctgggtccccctgctcctcctcgaccccgcaatggctatcagccccaccggccacctggggggggcgggggcaagaggagaaatagctgtaatgtagggggaggcgggggaggcttcaaacatccggccttcaagaggcgcaggcgggtgaattcggactgtgactctgtgttaccctccaacttcctcctggggggcaatatctttgatcccctgaacctgaatagcctcctggatgaggaagtgagccgcactctcaacgcggagacccctaagtcatccccccttccggccaaagggcgagatccggtggagatcctcatccccaaagatattactgacccgctcagtctcaatacttgcactgatgagggccatgtagttcttgcttcgccactcaagactggtcggaagcggcatagacaccggggacagcaccaccagcagcagcaggcagccggagggagtgagagtcaccccgtgccgcccacagcccctctcacccccttactccacggggagggcgcctcacagcagccgcggcacaggggccagaaccgggatgccccccaaccctatgaactcaacacagccatcaactgcagggatgaagtggtgtctccccttccatctgctctgcagggtccctcaggctccctatcagcccctccagctgcctcagttatctctgcacccccatcttcctcctcccgacatcgcaaacgtcgcaggacttccagcaagtcggaggcaggggctaggggtggaggccagggttccaaggaaaagggccgagggagttggggaggccgccaccaccaccaccacccactgcctgcagcaggcttcaaaaagcaacagcgcaagttccagtatgggaattattgcaaatactatgggtaccgcaatccttcctgtgaggatgggcgccttcgggtgttgaagcctgagtggtttcggggccgggacgtcctagatctgggctgcaatgtgggccatctgaccctgagcattgcctgcaagtggggcccgtcccgcatggtgggcctggatatcgattcccggctcatccattctgcccgccaaaacatccgacactacctttccgaggagctgcgtctcccaccccagactttggaaggggacccgggggcagagggtgaggaagggaccaccaccgttcgaaagaggagctgcttcccagcctcgctgactgccagccggggtcccatcgctgccccccaagtgcccttggatggagcggacacatcagtcttccccaacaatgttgtcttcgtcacgggtaattatgtgctggatcgagatgacctggtggaggcccaaacacctgagtatgatgtggtgctctgcctcagcctcaccaagtgggtgcatctgaactggggagacgagggcctgaagcgcatgtttcgccggatctaccggcacctacgccctgggggcatcctggtcctagagccccaaccctggtcgtcgtatggcaagagaaagactcttacagaaacgatctacaagaactactaccgaatccaattgaagccagagcagttcagttcctacctgacatccccagacgtgggcttctccagctatgagcttgtggccacaccccacaacacctctaaaggcttccagcgtcctgtgtacctgttccacaaggcccgatcccccagccactaagtggccccctaaacagaaagtgtgaagaggctgccctcgctgctcataaggacctgggggaagaggaaagtgtcccaaggtctttcctttctgactccaaaaatagtttcctttcttggatctgcaaagaaagcttttcttccgtcgctgcctcagcctcctccctatgcctctggcacctgcgcagcaaggctggctgtgctggagtcaccatcatcttcctctcccccagcctcccaggctggatggcatggactgtttgctgacctctgttctcttagggcatgggaggtgggaggatatcaaattctctagccctttcctcctattctcccaaggagagagattcccatttctcctcggccattgtacctagctcttgtccctagctgcatttcagtggaccatggatagagggactgagggttagacggggaagactggcagggaggcacgcaggtactgtgaaaatccttccctttgccctcccccagtgggagagggggttgggttttcataaatcgtggagaaataaacccacaagggaacntntattgtcctatggcaggtcat

SEQ ID NO: 32720 - DNA, 3323 bp, Homo sapiens
gcccactaggggggaggaaggaggcggggtggggaggttgttggatttagagccgggcggagaccgctgagactcattcctcaggaacaagggtcgggtgtcaaggagaccttttcacaccagctcccgtcccccgcctacggtgggtgggatcgcgcggcagagacaaaggagatcagtagggccggacatagctgcgcagggaagtagggtgtcagtttggggtggtgggcttttgcgggggctgtgggggggttatatttaaactcccagagccgttaagttggttcgtagtctgatgcgcgcgcaaccagggtggtggcggagtgcgcatgcgtggttcccgggcgaagggaacgcgcgctcaccgtgcgcgctcgcggccgggtggtagtggcggaggagaaaggggtcggcgcacgcgcggttgagtcctcgagtagttcgggtctcgcgggcctcttgttttggtctcgcgggctagtagggcgcacttggcggggaggcgcttgggcgcgagactaggcgtgaagagcagagctgcgcgcgcactcgggaaaggggggaagggagcagggtccaggcagggggggttaggccccctgatccccctcgttaccccgactggcacggaataaggggaggaaatgatcgagatggcggcggagaaggagccgtttctggtgccggccccgccgccgccgctcaaagatgagtcgggcggagggggcggccccacggtgccaccgcaccaagaggccgcctctggggagctccgcggcgggacggagcgtggtccgggtcgttgcgcgccatctgcggggtccccagccgctgcggtcggtcgggaaagccccggggccgcggccacctcctccagtggtccccaggcgcagcagcaccgagggggcggcccccaggcgcagtcgcatggggaggcccgcctgtcggatcccccggggcgagccgctcccccggacgtgggggaggagcgccggggagggggcgggacagagctgggtccccctgctcctcctcgaccccgcaatggctatcagccccaccggccacctggggggggcgggggcaagaggagaaatagctgtaatgtagggggaggcgggggaggcttcaaacatccggccttcaagaggcgcaggcgggtgaattcggactgtgactctgtgttaccctccaacttcctcctggggggcaatatctttgatcccctgaacctgaatagcctcctggatgaggaagtgagccgcactctcaacgcggagacccctaagtcatccccccttccggccaaagggcgagatccggtggagatcctcatccccaaagatattactgacccgctcagtctcaatacttgcactgatgagggccatgtagttcttgcttcgccactcaagactggtcggaagcggcatagacaccggggacagcaccaccagcagcagcaggcagccggagggagtgagagtcaccccgtgccgcccacagcccctctcacccccttactccacggggagggcgcctcacagcagccgcggcacaggggccagaaccgggatgccccccaaccctatgaactcaacacagccatcaactgcagggatgaagtggtgtctccccttccatctgctctgcagggtccctcaggctccctatcagcccctccagctgcctcagttatctctgcacccccatcttcctcctcccgacatcgcaaacgtcgcaggacttccagcaagtcggaggcaggggctaggggtggaggccagggttccaaggaaaagggccgagggagttggggaggccgccaccaccaccaccacccactgcctgcagcaggcttcaaaaagcaacagcgcaagttccagtatgggaattattgcaaatactatgggtaccgcaatccttcctgtgaggatgggcgccttcgggtgttgaagcctgagtggtttcggggccgggacgtcctagatctgggctgcaatgtgggccatctgaccctgagcattgcctgcaagtggggcccgtcccgcatggtgggcctggatatcgattcccggctcatccattctgcccgccaaaacatccgacactacctttccgaggagctgcgtctcccaccccagactttggaaggggacccgggggcagagggtgaggaagggaccaccaccgttcgaaagaggagctgcttcccagcctcgctgactgccagccggggtcccatcgctgccccccaagtgcccttggatggagcggacacatcagtcttccccaacaatgttgtcttcgtcacgggtaattatgtgctggatcgagatgacctggtggaggcccaaacacctgagtatgatgtggtgctctgcctcagcctcaccaagtgggtgcatctgaactggggagacgagggcctgaagcgcatgtttcgccggatctaccggcacctacgccctgggggcatcctggtcctagagccccaaccctggtcgtcgtatggcaagagaaagactcttacagaaacgatctacaagaactactaccgaatccaattgaagccagagcagttcagttcctacctgacatccccagacgtgggcttctccagctatgagcttgtggccacaccccacaacacctctaaaggcttccagcgtcctgtgtacctgttccacaaggcccgatcccccagccactaagtggccccctaaacagaaagtgtgaagaggctgccctcgctgctcataaggacctgggggaagaggaaagtgtcccaaggtctttcctttctgactccaaaaatagtttcctttcttggatctgcaaagaaagcttttcttccgtcgctgcctcagcctcctccctatgcctctggcacctgcgcagcaaggctggctgtgctggagtcaccatcatcttcctctcccccagcctcccaggctggatggcatggactgtttgctgacctctgttctcttagggcatgggaggtgggaggatatcaaattctctagccctttcctcctattctcccaaggagagagattcccatttctcctcggccattgtacctagctcttgtccctagctgcatttcagtggaccatggatagagggactgagggttagacggggaagactggcagggaggcacgcaggtactgtgaaaatccttccctttgccctcccccagtgggagagggggttgggttttcacgtttattcaggacactaacctctatcttgtagggctgtggttcttcaaaggacccagaccctaatattccgggggggtccacgtccca

SEQ ID NO: 32721 - DNA, 1765 bp, Homo sapiens
gcccactaggggggaggaaggaggcggggtggggaggttgttggatttagagccgggcggagaccgctgagactcattcctcaggaacaagggtcgggtgtcaaggagaccttttcacaccagctcccgtcccccgcctacgggtccctcaggctccctatcagcccctccagctgcctcagttatctctgcacccccatcttcctcctcccgacatcgcaaacgtcgcaggacttccagcaagtcggaggcaggggctaggggtggaggccagggttccaaggaaaagggccgagggagttggggaggccgccaccaccaccaccacccactgcctgcagcaggcttcaaaaagcaacagcgcaagttccagtatgggaattattgcaaatactatgggtaccgcaatccttcctgtgaggatgggcgccttcgggtgttgaagcctgagtggtttcggggccgggacgtcctagatctgggctgcaatgtgggccatctgaccctgagcattgcctgcaagtggggcccgtcccgcatggtgggcctggatatcgattcccggctcatccattctgcccgccaaaacatccgacactacctttccgaggagctgcgtctcccaccccagactttggaaggggacccgggggcagagggtgaggaagggaccaccaccgttcgaaagaggagctgcttcccagcctcgctgactgccagccggggtcccatcgctgccccccaagtgcccttggatggagcggacacatcagtcttccccaacaatgttgtcttcgtcacgggtaattatgtgctggatcgagatgacctggtggaggcccaaacacctgagtatgatgtggtgctctgcctcagcctcaccaagtgggtgcatctgaactggggagacgagggcctgaagcgcatgtttcgccggatctaccggcacctacgccctgggggcatcctggtcctagagccccaaccctggtcgtcgtatggcaagagaaagactcttacagaaacgatctacaagaactactaccgaatccaattgaagccagagcagttcagttcctacctgacatccccagacgtgggcttctccagctatgagcttgtggccacaccccacaacacctctaaaggcttccagcgtcctgtgtacctgttccacaaggcccgatcccccagccactaagtggccccctaaacagaaagtgtgaagaggctgccctcgctgctcataaggacctgggggaagaggaaagtgtcccaaggtctttcctttctgactccaaaaatagtttcctttcttggatctgcaaagaaagcttttcttccgtcgctgcctcagcctcctccctatgcctctggcacctgcgcagcaaggctggctgtgctggagtcaccatcatcttcctctcccccagcctcccaggctggatggcatggactgtttgctgacctctgttctcttagggcatgggaggtgggaggatatcaaattctctagccctttcctcctattctcccaaggagagagattcccatttctcctcggccattgtacctagctcttgtccctagctgcatttcagtggaccatggatagagggactgagggttagacggggaagactggcagggaggcacgcaggtactgtgaaaatccttccctttgccctcccccagtgggagagggggttgggttttcaatgtgagaacagcacaataaacttgatgtctagggcagtggccccca

SEQ ID NO: 32722 - DNA, 1886 bp, Homo sapiens
ctgacgggccagtgagcgggcgtcgggagtgggcggatgcgttggggttcgggtcgtgggtgttgaggcggagaggaaggcgtggtgtggcgtctccaggtgattgcgattgggggaaggtagaggagccagagaacgactcagccgtttcgggggaagaggaagttggacaacatcggctgttttagtgctttttatttttccccaattcagcagagaatattttcaagggggtggtgtctccccttccatctgctctgcagggtccctcaggctccctatcagcccctccagctgcctcagttatctctgcacccccatcttcctcctcccgacatcgcaaacgtcgcaggacttccagcaagtcggaggcaggggctaggggtggaggccagggttccaaggaaaagggccgagggagttggggaggccgccaccaccaccaccacccactgcctgcagcaggcttcaaaaagcaacagcgcaagttccagtatgggaattattgcaaatactatgggtaccgcaatccttcctgtgaggatgggcgccttcgggtgttgaagcctgagtggtttcggggccgggacgtcctagatctgggctgcaatgtgggccatctgaccctgagcattgcctgcaagtggggcccgtcccgcatggtgggcctggatatcgattcccggctcatccattctgcccgccaaaacatccgacactacctttccgaggagctgcgtctcccaccccagactttggaaggggacccgggggcagagggtgaggaagggaccaccaccgttcgaaagaggagctgcttcccagcctcgctgactgccagccggggtcccatcgctgccccccaagtgcccttggatggagcggacacatcagtcttccccaacaatgttgtcttcgtcacgggtaattatgtgctggatcgagatgacctggtggaggcccaaacacctgagtatgatgtggtgctctgcctcagcctcaccaagtgggtgcatctgaactggggagacgagggcctgaagcgcatgtttcgccggatctaccggcacctacgccctgggggcatcctggtcctagagccccaaccctggtcgtcgtatggcaagagaaagactcttacagaaacgatctacaagaactactaccgaatccaattgaagccagagcagttcagttcctacctgacatccccagacgtgggcttctccagctatgagcttgtggccacaccccacaacacctctaaaggcttccagcgtcctgtgtacctgttccacaaggcccgatcccccagccactaagtggccccctaaacagaaagtgtgaagaggctgccctcgctgctcataaggacctgggggaagaggaaagtgtcccaaggtctttcctttctgactccaaaaatagtttcctttcttggatctgcaaagaaagcttttcttccgtcgctgcctcagcctcctccctatgcctctggcacctgcgcagcaaggctggctgtgctggagtcaccatcatcttcctctcccccagcctcccaggctggatggcatggactgtttgctgacctctgttctcttagggcatgggaggtgggaggatatcaaattctctagccctttcctcctattctcccaaggagagagattcccatttctcctcggccattgtacctagctcttgtccctagctgcatttcagtggaccatggatagagggactgagggttagacggggaagactggcagggaggcacgcaggtactgtgaaaatccttccctttgccctcccccagtgggagagggggttgggttttcaatgtgagaacagcacaataaacttgatgtctagggcagtggccccca

SEQ ID NO: 32723 - DNA, 1825 bp, Homo sapiens
gcccactaggggggaggaaggaggcggggtggggaggttgttggatttagagccgggcggagaccgctgagactcattcctcaggaacaagggtcgggtgtcaaggagaccttttcacaccagctcccgtcccccgcctacggtgggtgggatcgcgcggcagagacaaaggagatcagtagggccggacatagctgcgcagggtccctcaggctccctatcagcccctccagctgcctcagttatctctgcacccccatcttcctcctcccgacatcgcaaacgtcgcaggacttccagcaagtcggaggcaggggctaggggtggaggccagggttccaaggaaaagggccgagggagttggggaggccgccaccaccaccaccacccactgcctgcagcaggcttcaaaaagcaacagcgcaagttccagtatgggaattattgcaaatactatgggtaccgcaatccttcctgtgaggatgggcgccttcgggtgttgaagcctgagtggtttcggggccgggacgtcctagatctgggctgcaatgtgggccatctgaccctgagcattgcctgcaagtggggcccgtcccgcatggtgggcctggatatcgattcccggctcatccattctgcccgccaaaacatccgacactacctttccgaggagctgcgtctcccaccccagactttggaaggggacccgggggcagagggtgaggaagggaccaccaccgttcgaaagaggagctgcttcccagcctcgctgactgccagccggggtcccatcgctgccccccaagtgcccttggatggagcggacacatcagtcttccccaacaatgttgtcttcgtcacgggtaattatgtgctggatcgagatgacctggtggaggcccaaacacctgagtatgatgtggtgctctgcctcagcctcaccaagtgggtgcatctgaactggggagacgagggcctgaagcgcatgtttcgccggatctaccggcacctacgccctgggggcatcctggtcctagagccccaaccctggtcgtcgtatggcaagagaaagactcttacagaaacgatctacaagaactactaccgaatccaattgaagccagagcagttcagttcctacctgacatccccagacgtgggcttctccagctatgagcttgtggccacaccccacaacacctctaaaggcttccagcgtcctgtgtacctgttccacaaggcccgatcccccagccactaagtggccccctaaacagaaagtgtgaagaggctgccctcgctgctcataaggacctgggggaagaggaaagtgtcccaaggtctttcctttctgactccaaaaatagtttcctttcttggatctgcaaagaaagcttttcttccgtcgctgcctcagcctcctccctatgcctctggcacctgcgcagcaaggctggctgtgctggagtcaccatcatcttcctctcccccagcctcccaggctggatggcatggactgtttgctgacctctgttctcttagggcatgggaggtgggaggatatcaaattctctagccctttcctcctattctcccaaggagagagattcccatttctcctcggccattgtacctagctcttgtccctagctgcatttcagtggaccatggatagagggactgagggttagacggggaagactggcagggaggcacgcaggtactgtgaaaatccttccctttgccctcccccagtgggagagggggttgggttttcaatgtgagaacagcacaataaacttgatgtctagggcagtggccccca

SEQ ID NO: 32724 - DNA, 3393 bp, Homo sapiens
gcccactaggggggaggaaggaggcggggtggggaggttgttggatttagagccgggcggagaccgctgagactcattcctcaggaacaagggtcgggtgtcaaggagaccttttcacaccagctcccgtcccccgcctacggtgggtgggatcgcgcggcagagacaaaggagatcagtagggccggacatagctgcgcagggaagtagggtgtcagtttggggtggtgggcttttgcgggggctgtgggggggttatatttaaactcccagagccgttaagttggttcgtagtctgatgcgcgcgcaaccagggtggtggcggagtgcgcatgcgtggttcccgggcgaagggaacgcgcgctcaccgtgcgcgctcgcggccgggtggtagtggcggaggagaaaggggtcggcgcacgcgcggttgagtcctcgagtagttcgggtctcgcgggcctcttgttttggtctcgcgggctagtagggcgcacttggcggggaggcgcttgggcgcgagactaggcgtgaagagcagagctgcgcgcgcactcgggaaaggggggaagggagcagggtccaggcagggggggttaggccccctgatccccctcgttaccccgactggcacggaataaggggaggaaatgatcgagatggcggcggagaaggagccgtttctggtgccggccccgccgccgccgctcaaagatgagtcgggcggagggggcggccccacggtgccaccgcaccaagaggccgcctctggggagctccgcggcgggacggagcgtggtccgggtcgttgcgcgccatctgcggggtccccagccgctgcggtcggtcgggaaagccccggggccgcggccacctcctccagtggtccccaggcgcagcagcaccgagggggcggcccccaggcgcagtcgcatggggaggcccgcctgtcggatcccccggggcgagccgctcccccggacgtgggggaggagcgccggggagggggcgggacagagctgggtccccctgctcctcctcgaccccgcaatggctatcagccccaccggccacctggggggggcgggggcaagaggagaaatagctgtaatgtagggggaggcgggggaggcttcaaacatccggccttcaagaggcgcaggcgggtgaattcggactgtgactctgtgttaccctccaacttcctcctggggggcaatatctttgatcccctgaacctgaatagcctcctggatgaggaagtgagccgcactctcaacgcggagacccctaagtcatccccccttccggccaaagggcgagatccggtggagatcctcatccccaaagatattactgacccgctcagtctcaatacttgcactgatgagggccatgtagttcttgcttcgccactcaagactggtcggaagcggcatagacaccggggacagcaccaccagcagcagcaggcagccggagggagtgagagtcaccccgtgccgcccacagcccctctcacccccttactccacggggagggcgcctcacagcagccgcggcacaggggccagaaccgggatgccccccaaccctatgaactcaacacagccatcaactgcagggatgaagtggtgtctccccttccatctgctctgcagggtccctcaggctccctatcagcccctccagctgcctcagttatctctgcacccccatcttcctcctcccgacatcgcaaacgtcgcaggacttccagcaagtcggaggcaggggctaggggtggaggccagggttccaaggaaaagggccgagggagttggggaggccgccaccaccaccaccacccactgcctgcagcaggcttcaaaaagcaacagcgcaagttccagtatgggaattattgcaaatactatgggtaccgcaatccttcctgtgaggatgggcgccttcgggtgttgaagcctgagtggtttcggggccgggacgtcctagatctgggctgcaatgtgggccatctgaccctgagcattgcctgcaagtggggcccgtcccgcatggtgggcctggatatcgattcccggctcatccattctgcccgccaaaacatccgacactacctttccgaggagctgcgtctcccaccccagactttggaaggggacccgggggcagagggtgaggaagggaccaccaccgttcgaaagaggagctgcttcccagcctcgctgactgccagccggggtcccatcgctgccccccaagtgcccttggatggagcggacacatcagtcttccccaacaatgttgtcttcgtcacgggtaattatgtgctggatcgagatgacctggtggaggcccaaacacctgagtatgatgtggtgctctgcctcagcctcaccaagtgggtgcatctgaactggggagacgagggcctgaagcgcatgtttcgccggatctaccggcacctacgccctgggggcatcctggtcctagagccccaaccctggtcgtcgtatggcaagagaaagactcttacagaaacgatctacaagaactactaccgaatccaattgaagccagagcagttcagttcctacctgacatccccagacgtgggcttctccagctatgagcttgtggccacaccccacaacacctctaaaggtaaggctggtttattttgtcagggaggctggtcctggctgaaagagtgcagacccccatggggattcttgaggtgctgccaaccccttctgatcactctctctcccctcaggcttccagcgtcctgtgtacctgttccacaaggcccgatcccccagccactaagtggccccctaaacagaaagtgtgaagaggctgccctcgctgctcataaggacctgggggaagaggaaagtgtcccaaggtctttcctttctgactccaaaaatagtttcctttcttggatctgcaaagaaagcttttcttccgtcgctgcctcagcctcctccctatgcctctggcacctgcgcagcaaggctggctgtgctggagtcaccatcatcttcctctcccccagcctcccaggctggatggcatggactgtttgctgacctctgttctcttagggcatgggaggtgggaggatatcaaattctctagccctttcctcctattctcccaaggagagagattcccatttctcctcggccattgtacctagctcttgtccctagctgcatttcagtggaccatggatagagggactgagggttagacggggaagactggcagggaggcacgcaggtactgtgaaaatccttccctttgccctcccccagtgggagagggggttgggttttcaatgtgagaacagcacaataaacttgatgtctagggcagtggccccca

SEQ ID NO: 32725 - DNA, 3227 bp, Homo sapiens
gcccactaggggggaggaaggaggcggggtggggaggttgttggatttagagccgggcggagaccgctgagactcattcctcaggaacaagggtcgggtgtcaaggagaccttttcacaccagctcccgtcccccgcctacggtgggtgggatcgcgcggcagagacaaaggagatcagtagggccggacatagctgcgcagggaagtagggtgtcagtttggggtggtgggcttttgcgggggctgtgggggggttatatttaaactcccagagccgttaagttggttcgtagtctgatgcgcgcgcaaccagggtggtggcggagtgcgcatgcgtggttcccgggcgaagggaacgcgcgctcaccgtgcgcgctcgcggccgggtggtagtggcggaggagaaaggggtcggcgcacgcgcggttgagtcctcgagtagttcgggtctcgcgggcctcttgttttggtctcgcgggctagtagggcgcacttggcggggaggcgcttgggcgcgagactaggcgtgaagagcagagctgcgcgcgcactcgggaaaggggggaagggagcagggtccaggcagggggggttaggccccctgatccccctcgttaccccgactggcacggaataaggggaggaaatgatcgagatggcggcggagaaggagccgtttctggtgccggccccgccgccgccgctcaaagatgagtcgggcggagggggcggccccacggtgccaccgcaccaagaggccgcctctggggagctccgcggcgggacggagcgtggtccgggtcgttgcgcgccatctgcggggtccccagccgctgcggtcggtcgggaaagccccggggccgcggccacctcctccagtggtccccaggcgcagcagcaccgagggggcggcccccaggcgcagtcgcatggggaggcccgcctgtcggatcccccggggcgagccgctcccccggacgtgggggaggagcgccggggagggggcgggacagagctgggtccccctgctcctcctcgaccccgcaatggctatcagccccaccggccacctggggggggcgggggcaagaggagaaatagctgtaatgtagggggaggcgggggaggcttcaaacatccggccttcaagaggcgcaggcgggtgaattcggactgtgactctgtgttaccctccaacttcctcctggggggcaatatctttgatcccctgaacctgaatagcctcctggatgaggaagtgagccgcactctcaacgcggagacccctaagtcatccccccttccggccaaagggcgagatccggtggagatcctcatccccaaagatattactgacccgctcagtctcaatacttgcactgatgagggccatgtagttcttgcttcgccactcaagactggtcggaagcggcatagacaccggggacagcaccaccagcagcagcaggcagccggagggagtgagagtcaccccgtgccgcccacagcccctctcacccccttactccacggggagggcgcctcacagcagccgcggcacaggggccagaaccgggatgccccccaaccctatgaactcaacacagccatcaactgcagggatgaagtggtgtctccccttccatctgctctgcagggtccctcaggctccctatcagcccctccagctgcctcagttatctctgcacccccatcttcctcctcccgacatcgcaaacgtcgcaggacttccagcaagtcggaggcaggggctaggggtggaggccagggttccaaggaaaagggccgagggagttggggaggccgccaccaccaccaccacccactgcctgcagcaggcttcaaaaagcaacagcgcaagttccagtatgggaattattgcaaatactatgggtaccgcaatccttcctgtgaggatgggcgccttcgggtgttgaagcctgagtggtttcggggccgggacgtcctagatctgggctgcaatgtgggccatctgaccctgagcattgcctgcaagtggggcccgtcccgcatggtgggcctggatatcgattcccggctcatccattctgcccgccaaaacatccgacactacctttccgaggagctgcgtctcccaccccagactttggaaggggacccgggggcagagggtgaggaagggaccaccaccgttcgaaagaggagctgcttcccagcctcgctgactgccagccggggtcccatcgctgccccccaagtgcccttggatggagcggacacatcagtcttccccaacaatgttgtcttcgtcacgggtaattatgtgctggatcgagatgacctggtggaggcccaaacacctgagtatgatgtggtgctctgcctcagcctcaccaagtgggtgcatctgaactggggagacgagggcctgaagcgcatgtttcgccggatctaccggcacctacgccctgggggcatcctggtcctagagccccaaccctggtcgtcgtatggcaagagaaagactcttacagaaacgatctacaagaactactaccgaatccaattgaagccagagcagttcagttcctacctgacatccccagacgtgggcttctccagctatgagcttgtggccacaccccacaacacctctaaaggcttccagcgtcctgtgtacctgttccacaaggcccgatcccccagccactaagtggccccctaaacagaaagtgtgaagaggctgccctcgctgctcataaggacctgggggaagaggaaagtgtcccaaggtctttcctttctgactccaaaacctcctccctatgcctctggcacctgcgcagcaaggctggctgtgctggagtcaccatcatcttcctctcccccagcctcccaggctggatggcatggactgtttgctgacctctgttctcttagggcatgggaggtgggaggatatcaaattctctagccctttcctcctattctcccaaggagagagattcccatttctcctcggccattgtacctagctcttgtccctagctgcatttcagtggaccatggatagagggactgagggttagacggggaagactggcagggaggcacgcaggtactgtgaaaatccttccctttgccctcccccagtgggagagggggttgggttttcaatgtgagaacagcacaataaacttgatgtctagggcagtggccccca

SEQ ID NO: 32726 - DNA, 3065 bp, Homo sapiens
gcccactaggggggaggaaggaggcggggtggggaggttgttggatttagagccgggcggagaccgctgagactcattcctcaggaacaagggtcgggtgtcaaggagaccttttcacaccagctcccgtcccccgcctacggtgggtgggatcgcgcggcagagacaaaggagatcagtagggccggacatagctgcgcagggaagtagggtgtcagtttggggtggtgggcttttgcgggggctgtgggggggttatatttaaactcccagagccgttaagttggttcgtagtctgatgcgcgcgcaaccagggtggtggcggagtgcgcatgcgtggttcccgggcgaagggaacgcgcgctcaccgtgcgcgctcgcggccgggtggtagtggcggaggagaaaggggtcggcgcacgcgcggttgagtcctcgagtagttcgggtctcgcgggcctcttgttttggtctcgcgggctagtagggcgcacttggcggggaggcgcttgggcgcgagactaggcgtgaagagcagagctgcgcgcgcactcgggaaaggggggaagggagcagggtccaggcagggggggttaggccccctgatccccctcgttaccccgactggcacggaataaggggaggaaatgatcgagatggcggcggagaaggagccgtttctggtgccggccccgccgccgccgctcaaagatgagtcgggcggagggggcggccccacggtgccaccgcaccaagaggccgcctctggggagctccgcggcgggacggagcgtggtccgggtcgttgcgcgccatctgcggggtccccagccgctgcggtcggtcgggaaagccccggggccgcggccacctcctccagtggtccccaggcgcagcagcaccgagggggcggcccccaggcgcagtcgcatggggaggcccgcctgtcggatcccccggggcgagccgctcccccggacgtgggggaggagcgccggggagggggcgggacagagctgggtccccctgctcctcctcgaccccgcaatggctatcagccccaccggccacctggggggggcgggggcaagaggagaaatagctgtaatgtagggggaggcgggggaggcttcaaacatccggccttcaagaggcgcaggcgggtgaattcggactgtgactctgtgttaccctccaacttcctcctggggggcaatatctttgatcccctgaacctgaatagcctcctggatgaggaagtgagccgcactctcaacgcggagacccctaagtcatccccccttccggccaaagggcgagatccggtggagatcctcatccccaaagatattactgacccgctcagtctcaatacttgcactgatgagggccatgtagttcttgcttcgccactcaagactggtcggaagcggcatagacaccggggacagcaccaccagcagcagcaggcagccggagggagtgagagtcaccccgtgccgcccacagcccctctcacccccttactccacggggagggcgcctcacagcagccgcggcacaggggccagaaccgggatgccccccaaccctatgaactcaacacagccatcaactgcagggatgaagtggtgtctccccttccatctgctctgcagggtccctcaggctccctatcagcccctccagctgcctcagttatctctgcacccccatcttcctcctcccgacatcgcaaacgtcgcaggacttccagcaagtcggaggcaggggctaggggtggaggccagggttccaaggaaaagggccgagggagttggggaggccgccaccaccaccaccacccactgcctgcagcaggcttcaaaaagcaacagcgcaagttccagtatgggaattattgcaaatactatgggtaccgcaatccttcctgtgaggatgggcgccttcgggtgttgaagcctgagtggtttcggggccgggacgtcctagatctgggctgcaatgtgggccatctgaccctgagcattgcctgcaagtggggcccgtcccgcatggtgggcctggatatcgattcccggctcatccattctgcccgccaaaacatccgacactacctttccgaggagctgcgtctcccaccccagactttggaaggggacccgggggcagagggtgaggaagggaccaccaccgttcgaaagaggagctgcttcccagcctcgctgactgccagccggggtcccatcgctgccccccaagtgcccttggatggagcggacacatcagtcttccccaacaatgttgtcttcgtcacgggtaattatgtgctggatcgagatgacctggtggaggcccaaacacctgagtatgatgtggtgctctgcctcagcctcaccaagtgggtgcatctgaactggggagacgagggcctgaagcgcatgtttcgccggatctaccggcacctacgccctgggggcatcctggtcctagagccccaaccctggtcgtcgtatggcaagagaaagactcttacagaaacgatctacaagaactactaccgaatccaattgaagccagagcagttcagttcctacctgacatccccagacgtgggcttctccagctatgagcttgtggccacaccccacaacacctctaaaggcttccagcgtcctgtgtacctgttccacaaggcccgatcccccagccactaagtggccccctaaacagaaagtgtgaagaggctgccctcgctgctcataaggacctgggggaagaggaaagtgtcccaaggtctttcctttctgactccaaaaatagtttcctttcttggatctgcaaagaaagcttttcttccgtcgctgcctcagcctcctccctatgcctctggcacctgcgcagcaaggctggctgtgctggagtcaccatcatcttcctctcccccagcctcccaggctggatggcatggactgtttgctgacctctcccccagtgggagagggggttgggttttcaatgtgagaacagcacaataaacttgatgtctagggcagtggccccca

SEQ ID NO: 32727 - DNA, 2703 bp, Homo sapiens
gcccactaggggggaggaaggaggcggggtggggaggttgttggatttagagccgggcggagaccgctgagactcattcctcaggaacaagggtcgggtgtcaaggagaccttttcacaccagctcccgtcccccgcctacggtgggtgggatcgcgcggcagagacaaaggagatcagtagggccggacatagctgcgcagggaagtagggtgtcagtttggggtggtgggcttttgcgggggctgtgggggggttatatttaaactcccagagccgttaagttggttcgtagtctgatgcgcgcgcaaccagggtggtggcggagtgcgcatgcgtggttcccgggcgaagggaacgcgcgctcaccgtgcgcgctcgcggccgggtggtagtggcggaggagaaaggggtcggcgcacgcgcggttgagtcctcgagtagttcgggtctcgcgggcctcttgttttggtctcgcgggctagtagggcgcacttggcggggaggcgcttgggcgcgagactaggcgtgaagagcagagctgcgcgcgcactcgggaaaggggggaagggagcagggtccaggcagggggggttaggccccctgatccccctcgttaccccgactggcacggaataaggggaggaaatgatcgagatggcggcggagaaggagccgtttctggtgccggccccgccgccgccgctcaaagatgagtcgggcggagggggcggccccacggtgccaccgcaccaagaggccgcctctggggagctccgcggcgggacggagcgtggtccgggtcgttgcgcgccatctgcggggtccccagccgctgcggtcggtcgggaaagccccggggccgcggccacctcctccagtggtccccaggcgcagcagcaccgagggggcggcccccaggcgcagtcgcatggggaggcccgcctgtcggatcccccggggcgagccgctcccccggacgtgggggaggagcgccggggagggggcgggacagagctgggtccccctgctcctcctcgaccccgcaatggctatcagccccaccggccacctggggggggcgggggcaagaggagaaatagctgtaatgtagggggaggcgggggaggcttcaaacatccggccttcaagaggcgcaggcgggtgaattcggactgtgactctgtgttaccctccaacttcctcctggggggcaatatctttgatcccctgaacctgaatagcctcctggatgaggaagtgagccgcactctcaacgcggagacccctaagtcatccccccttccggccaaagggcgagatccggtggagatcctcatccccaaagatattactgacccgctcagtctcaatacttgcactgatgagggccatgtagttcttgcttcgccactcaagactggtcggaagcggcatagacaccggggacagcaccaccagcagcagcaggcagccggagggagtgagagtcaccccgtgccgcccacagcccctctcacccccttactccacggggagggcgcctcacagcagccgcggcacaggggccagaaccgggatgccccccaaccctatgaactcaacacagccatcaactgcagggatgaagtggtgtctccccttccatctgctctgcagggtccctcaggctccctatcagcccctccagctgcctcagttatctctgcacccccatcttcctcctcccgacatcgcaaacgtcgcaggacttccagcaagtcggaggcaggggctaggggtggaggccagggttccaaggaaaagggccgagggagttggggaggccgccaccaccaccaccacccactgcctgcagcaggcttcaaaaagcaacagcgcaagttccagtatgggaattattgcaaatactatgggtaccgcaatccttcctgtgaggatgggcgccttcgggtgttgaagcctgagtggtttcggggccgggacgtcctagatctgggctgcaatgtgggccatctgaccctgagcattgcctgcaagtggggcccgtcccgcatggtgggcctggatatcgattcccggctcatccattctgcccgccaaaacatccgacactacctttccgaggagctgcgtctcccaccccagactttggaaggggacccgggggcagagggtgaggaagggaccaccaccgttcgaaagaggagctgcttcccagcctcgctgactgccagccggggtcccatcgctgccccccaagtgcccttggatggagcggacacatcagtcttccccaacaatgttgtcttcgtcacgggtaattatgtgctggatcgagatgacctggtggaggcccaaacacctgagtatgatgtggtgctctgcctcagcctcaccaagtgggtgcatctgaactggggagacgagggcctgaagcgcatgtttcgccggatctaccggcacctacgccctgggggcatcctggtcctagagccccaaccctggtcgtcgtatggcaagagaaagactcttacagaaacgatctacaagaactactaccgaatccaattgaagccagagcagttcagttcctacctgacatccccagacgtgggcttctccagctatgagcttgtggccacaccccacaacacctctaaaggcttccagcgtcctgcgacctatgagggatcctctgatc

SEQ ID NO: 32728 - DNA, 1059 bp, Homo sapiens
gaagagaaagactcttacggaaacgatctacaagaactactaccgaatccaattgaagccagagcagtcttccccaacaatgttgtcttcgtcacgggtaattatgtgctggatcgagatgacctggtggaggcccaaacacctgagtatgatgtggtgctctgcctcagcctcaccaagtgggtgcatctgaactggggagacgagggcctgaagcgcatgtttcgccggatctaccggcacctacgccctgggggcatcctggtcctagagccccaaccctggtcgtcgtatggcaagagaaagactcttacagaaacgatctacaagaactactaccgaatccaattgaagccagagcagttcagttcctacctgacatccccagacgtgggcttctccagctatgagcttgtggccacaccccacaacacctctaaaggcttccagcgtcctgtgtacctgttccacaaggcccgatcccccagccactaagtggccccctaaacagaaagtgtgaagaggctgccctcgctgctcataaggacctgggggaagaggaaagtgtcccaaggtctttcctttctgactccaaaaatagtttcctttcttggatctgcaaagaaagcttttcttccgtcgctgcctcagcctcctccctatgcctctggcacctgcgcagcaaggctggctgtgctggagtcaccatcatcttcctctcccccagcctcccaggctggatggcatggactgtttgctgacctctgttctcttagggcatgggaggtgggaggatatcaaattctctagccctttcctcctattctcccaaggagagagattcccatttctcctcggccattgtacctagctcttgtccctagctgcatttcagtggaccatggatagagggactgagggttagacggggaagactggcagggaggcacgcaggtactgtgaaaatccttccctttgccctcccccagtgggagagggggttgggttttcaatgtgagaacagcacaataaacttgatgtctagggcagtggccccca

SEQ ID NO: 32729 - DNA, 2520 bp, Homo sapiens
gcccactaggggggaggaaggaggcggggtggggaggttgttggatttagagccgggcggagaccgctgagactcattcctcaggaacaagggtcgggtgtcaaggagaccttttcacaccagctcccgtcccccgcctacggtgggtgggatcgcgcggcagagacaaaggagatcagtagggccggacatagctgcgcagggaagtagggtgtcagtttggggtggtgggcttttgcgggggctgtgggggggttatatttaaactcccagagccgttaagttggttcgtagtctgatgcgcgcgcaaccagggtggtggcggagtgcgcatgcgtggttcccgggcgaagggaacgcgcgctcaccgtgcgcgctcgcggccgggtggtagtggcggaggagaaaggggtcggcgcacgcgcggttgagtcctcgagtagttcgggtctcgcgggcctcttgttttggtctcgcgggctagtagggcgcacttggcggggaggcgcttgggcgcgagactaggcgtgaagagcagagctgcgcgcgcactcgggaaaggggggaagggagcagggtccaggcagggggggttaggccccctgatccccctcgttaccccgactggcacggaataaggggaggaaatgatcgagatggcggcggagaaggagccgtttctggtgccggccccgccgccgccgctcaaagatgagtcgggcggagggggcggccccacggtgccaccgcaccaagaggccgcctctggggagctccgcggcgggacggagcgtggtccgggtcgttgcgcgccatctgcggggtccccagccgctgcggtcggtcgggaaagccccggggccgcggccacctcctccagtggtccccaggcgcagcagcaccgagggggcggcccccaggcgcagtcgcatggggaggcccgcctgtcggatcccccggggcgagccgctcccccggacgtgggggaggagcgccggggagggggcgggacagagctgggtccccctgctcctcctcgaccccgcaatggctatcagccccaccggccacctggggggggcgggggcaagaggagaaatagctgtaatgtagggggaggcgggggaggcttcaaacatccggccttcaagaggcgcaggcgggtgaattcggactgtgactctgtgttaccctccaacttcctcctggggggcaatatctttgatcccctgaacctgaatagcctcctggatgaggaagtgagccgcactctcaacgcggagacccctaagtcatccccccttccggccaaagggcgagatccggtggagatcctcatccccaaagatattactgacccgctcagtctcaatacttgcactgatgagggccatgtagttcttgcttcgccactcaagactggtcggaagcggcatagacaccggggacagcaccaccagcagcagcaggcagccggagggagtgagagtcaccccgtgccgcccacagcccctctcacccccttactccacggggagggcgcctcacagcagccgcggcacaggggccagaaccgggatgccccccaaccctatgaactcaacacagccatcaactgcagggatgaagtggtgtctccccttccatctgctctgcagggtccctcaggctccctatcagcccctccagctgcctcagttatctctgcacccccatcttcctcctcccgacatcgcaaacgtcgcaggacttccagcaagtcggaggcaggggctaggggtggaggccagggttccaaggaaaagggccgagggagttggggaggccgccaccaccaccaccacccactgcctgcagcaggcttcaaaaagcaacagcgcaagttccagtatgggaattattgcaaatactatgggtaccgcaatccttcctgtgaggatgggcgccttcgggtgttgaagcctgagtggtttcggggccgggacgtcctagatctgggctgcaatgtgggccatctgaccctgagcattgcctgcaagtggggcccgtcccgcatggtgggcctggatatcgattcccggctcatccattctgcccgccaaaacatccgacactacctttccgaggagctgcgtctcccaccccagactttggaaggggacccgggggcagagggtgaggaagggaccaccaccgttcgaaagaggagctgcttcccagcctcgctgactgccagccggggtcccatcgctgccccccaagtgcccttggatggagcggacacatcagtcttccccaaaaaaaaaaaaaaaaaaaaaaaaaaaaaaaaaaaaaaaaaaaaaaaaaaaaaaaaaaaaaaaaaaaaaaagaggggggggaaaaaagggggggggagaaaaaaagaaaagaaaagaaaatagaaaaaggtaacacacacaacatagaaaaaaaggagaaacgcagggaaccaaaaaaaaaggaaaaataaaaacagaagaacctaattgcaagagaaagaga

SEQ ID NO: 32730 - DNA, 2405 bp, Homo sapiens
gcccactaggggggaggaaggaggcggggtggggaggttgttggatttagagccgggcggagaccgctgagactcattcctcaggaacaagggtcgggtgtcaaggagaccttttcacaccagctcccgtcccccgcctacggtgggtgggatcgcgcggcagagacaaaggagatcagtagggccggacatagctgcgcagggaagtagggtgtcagtttggggtggtgggcttttgcgggggctgtgggggggttatatttaaactcccagagccgttaagttggttcgtagtctgatgcgcgcgcaaccagggtggtggcggagtgcgcatgcgtggttcccgggcgaagggaacgcgcgctcaccgtgcgcgctcgcggccgggtggtagtggcggaggagaaaggggtcggcgcacgcgcggttgagtcctcgagtagttcgggtctcgcgggcctcttgttttggtctcgcgggctagtagggcgcacttggcggggaggcgcttgggcgcgagactaggcgtgaagagcagagctgcgcgcgcactcgggaaaggggggaagggagcagggtccaggcagggggggttaggccccctgatccccctcgttaccccgactggcacggaataaggggaggaaatgatcgagatggcggcggagaaggagccgtttctggtgccggccccgccgccgccgctcaaagatgagtcgggcggagggggcggccccacggtgccaccgcaccaagaggccgcctctggggagctccgcggcgggacggagcgtggtccgggtcgttgcgcgccatctgcggggtccccagccgctgcggtcggtcgggaaagccccggggccgcggccacctcctccagtggtccccaggcgcagcagcaccgagggggcggcccccaggcgcagtcgcatggggaggcccgcctgtcggatcccccggggcgagccgctcccccggacgtgggggaggagcgccggggagggggcgggacagagctgggtccccctgctcctcctcgaccccgcaatggctatcagccccaccggccacctggggggggcgggggcaagaggagaaatagctgtaatgtagggggaggcgggggaggcttcaaacatccggccttcaagaggcgcaggcgggtgaattcggactgtgactctgtgttaccctccaacttcctcctggggggcaatatctttgatcccctgaacctgaatagcctcctggatgaggaagtgagccgcactctcaacgcggagacccctaagtcatccccccttccggccaaagggcgagatccggtggagatcctcatccccaaagatattactgacccgctcagtctcaatacttgcactgatgagggccatgtagttcttgcttcgccactcaagactggtcggaagcggcatagacaccggggacagcaccaccagcagcagcaggcagccggagggagtgagagtcaccccgtgccgcccacagcccctctcacccccttactccacggggagggcgcctcacagcagccgcggcacaggggccagaaccgggatgccccccaaccctatgaactcaacacagccatcaactgcagggatgaagtggtgtctccccttccatctgctctgcagggtccctcaggctccctatcagcccctccagctgcctcagttatctctgcacccccatcttcctcctcccgacatcgcaaacgtcgcaggacttccagcaagtcggaggcaggggctaggggtggaggccagggttccaaggaaaagggccgagggagttggggaggccgccaccaccaccaccacccactgcctgcagcaggcttcaaaaagcaacagcgcaagttccagtatgggaattattgcaaatactatgggtaccgcaatccttcctgtgaggatgggcgccttcgggtgttgaagcctgagtggtttcggggccgggacgtcctagatctgggctgcaatgtgggccatctgaccctgagcattgcctgcaagtggggcccgtcccgcatggtgggcctggatatcgattcccggctcatccattctgcccgccaaaacatccgacactacctttccgaggagctgcgtctcccaccccagactttggaaggggacccgggggcagagggtgaggaagggaccaccaccgttcgaaagaggagctgcttcccagcctcgctgactgccagccggggtcccatcgctgccccccaagtgcccttggatggagcggactggcagggaggcacgcaggtactgtgaaaatccttccctttgccctcccccagtgggagagggggttgggttttcaatgtgagaacagcacaataaacttgatgtctagggcagtggccccca

SEQ ID NO: 32731 - DNA, 890 bp, Homo sapiens
cgcagtctgcgcagggactggcgggactgcgcggcggcgactacagacgtgtcgggggtccggggcctgtcgcggttgccaagcgctcggcgcctggcgctggcgctggccaaggcgtggccaacagtgttgcaaacaggaacccgaggtgttcacttcactgttgaaggaacgagagggcatctgctaaagtttcagattccatttctgctcagtatccagtagtggatcatgaatttgatgcagtggtggtaggcgctggaggggcaggctttgcgagctgcatttggcctttccgaggcagagtttgatacagcatgtgttaccaagctgtttcctaccaggtcacacactgttgcagcgcaggtagaaaattatggcatgccgtttagcagaactgaagatgggaagatttatcagcgtgcatttggcggacacagcctcaagtttggaaagggcaggcaggcccatcggtgctgctgtgtggctgatcggaccggccactcaatattgcacacctcatatgggaggtctctgcgatatgataccagctgttttgtggagtattttgccttggatctcctgatggagaatggggagtgccgtggtgtcttcgcactgtgcatacaggacgggtccatccatcgcataagagcaaagaatactattgttgccacaggagtcaagaaacttttcttttgagctattgacagctttaacaagttattatactcctatgaacaaaatttggagcatatggttctctctgcctgatttctcctgaatttggaaactattttgaccatgaggattctcaacctgatcaaaatgagctttcctaaataactcaagaccatctgcttagaataaaccatccagctgggagaagc

SEQ ID NO: 32732 - DNA, 1020 bp, Homo sapiens
cagcagaatggaaaacgtatcccctaaatggctggccaaccttagcatatgggacagtgtgacctctctcacacagagccactaaaaactaaacactaaaaccagttttcttgagtaaaggtttctaagatggaaaatttaagcagcgagatatgtcaagttgtagacgttggccaggaaaaagccagcagcaaccaggcaggggagagtgtgcatccgacatcctcctgtgtgatgaagggatgacacctcttccctctgggctgtcagcctttactgttgcaggatacagatctcctgattcaggtgtccagtgccttttgaactgaccgcaagccctcctggacgattggaactgtaatgtggaaagggctctgatggagccggttaaaatgcttcattatttgcaaaataccacatacagtaatacgatctggatgtctttcccctcctccactaagtagcataagtgaagacttcccagaggaagtgcgtctttttcatctcgtatctgagtcaatgatatcctttttggatacaagcgtcatcctggttttctagagtgccaagccagggtggaaaggaggacctgggggctcagtccttccttgccccttgggctgcccttcagggttaagtagagggtcccagctgagctctctggattgcacaggagcacctgggtacataagaaggtgaacagtttgcaaggggaagtttgaattactatcccccacagcatttgttccttcaggacactaaccctctggatctgtgtcttctgtgtctccagtggcccaacggtgttgcaaacaggaacccgaggtgttcacttcactgttgaaggaacgagagggcatctgctaaagtttcagattccatttctgctcagtatccagtagtggatcatgaatttgatgcagtggtggtaggcgctggaggggcaggctttgcgagctgcatttggcctttccgaggcagagtttgatacagccattacagccatttagaagatcctgg

SEQ ID NO: 32733 - DNA, 366 bp, Homo sapiens
aaaggatgtgtgtgggtctaagatatgtatataatagaaacatttattcagaagctttagtcaagacttcatttttaagttcagagtaataaactcatagtctaaatttcctaatttttctgtttaatttacataaataaaatgaaatgcaaaacaacaggtctaaaagttaagcagttcttggtatggctgcttctatgaattaaaagtttacaaataatattttgtgccacagtcaacgcaaaatcatgctgccgtgttccgtgtgggaagcttgttgcaagaaggttgtgggaaaatcagcaagctctatggagacctgaagcatctgaagacgtttgaccggggtgagcagacagtgggctc

SEQ ID NO: 32734 - DNA, 299 bp, Homo sapiens
caggtagggcaggacgccttgcccggaaggcgttcggctcgtgtgtcttgtaagcgtgtggtgcctactcattgctcttccatagttttatgtaataacatggttttgaagatcagcttccatagctctcaggtcctaacttcaatgtcatttccttaaggagacttttcccacactccccttcccctaaggcagtttgggccaccatcttatgcatttctcaagagccctaaaccctgccttggtgatacttatgccagcagtaaagcagggattgaggccgggcatggtggctcaca

SEQ ID NO: 32735 - DNA, 1591 bp, Homo sapiens
cgcagtctgcgcagggactggcgggactgcgcggcggcgactacagacgtgtcgggggtccggggcctgtcgcggttgccaagcgctcggcgcctggcgctggcgctggccaaggcgtggccaacagtgttgcaaacaggaacccgaggtgttcacttcactgttgaaggaacgagagggcatctgctaaagtttcagattccatttctgctcagtatccagtagtggatcatgaatttgatgcagtggtggtaggcgctggaggggcaggctttgcgagctgcatttggcctttccgaggcagagtttgatacagcatgtgttaccaagctgtttcctaccaggtcacacactgttgcagcgcaggtagaaaattatggcatgccgtttagcagaactgaagatgggaagatttatcagcgtgcatttggcggacacagcctcaagtttggaaagggcgggcaggcccatgggtgctgctgtgtggctgatcggaccggccactcaatattgcacaccttatacgggaggtctctgcgatatgataccagctgttttgtggagtattttgccttggatctcctgatggagaatggggagtgccgtggtgtcttcgcactgtgcatacaggacgggtccatccatcgcataagagcaaagaatactattgttgccacagggctactggcgcaactacttgagctgcacgtctgcccacaccagcaccagcgacggcacggccatgatcaccagggcaggccttccttgccaggacctcgagtttgttcagttccaccccacaggcacatatggtgctggttgtctcattacggaaggatgtcgtggagagggaggcattctcattaacagtcaaggcgaaaggtttatggagcgatacgcccccatcgcgaaggacctggcgtctagagatgtggtgtctcggtggatgactctggagatccgcgaaggaagaggctgtggccctgagaaagatcacgtctacctgcagctgcaccacctacctccagagcagctggccatgcccttgcccggcatttcagagacagccatgatcttcgctggtgtggacgtcacgaaggagccgatccctgtcctccccaccgtgcattataacatggacggcattcccaccagctacgaggggcaggtcctgaggcacgggaatggccaggatcagattgtgcccggcctgtacgcctgtggggaggccgcctgtgcctctgcacatggtgtcaaccgcctcggggcaaactcgctattggacctggttgtctggtcaggcatgtgccctgagcatcgcagagtcgtgcaggcctggagataaagtccctccaattaaaccaaatgctggggaagaatctgtcacgaatcttgacaaattgagatttgctgatggaagaagcataagaacatcggaactgcgactcagcatgcagaagtcaacgcaaaatcatgctgccgtgttccgtgtgggaagcttgttgcaagaaggttgtgggaaaatcagcaagctctatggagacctgaagcatctgaagacgtttgaccggggtgagcagacagtgggctc

SEQ ID NO: 32736 - DNA, 1692 bp, Homo sapiens
cgcagtctgcgcagggactggcgggactgcgcggcggcgactacagacgtgtcgggggtccggggcctgtcgcggttgccaagcgctcggcgcctggcgctggcgctggccaaggcgtggccaacagtgttgcaaacaggaacccgaggtgttcacttcactgttgaaggaacgagagggcatctgctaaagtttcagattccatttctgctcagtatccagtagtggatcatgaatttgatgcagtggtggtaggcgctggaggggcaggctttgcgagctgcatttggcctttccgaggcagagtttgatacagcatgtgttaccaagctgtttcctaccaggtcacacactgttgcagcgcaggtagaaaattatggcatgccgtttagcagaactgaagatgggaagatttatcagcgtgcatttggcggacacagcctcaagtttggaaagggcgggcaggcccatgggtgctgctgtgtggctgatcggaccggccactcaatattgcacaccttatacgggaggtctctgcgatatgataccagctgttttgtggagtattttgccttggatctcctgatggagaatggggagtgccgtggtgtcttcgcactgtgcatacaggacgggtccatccatcgcataagagcaaagaatactattgttgccacagggctactggcgcaactacttgagctgcacgtctgcccacaccagcaccagcgacggcacggccatgatcaccagggcaggccttccttgccaggacctcgagtttgttcagttccaccccacaggcacatatggtgctggttgtctcattacggaaggatgtcgtggagagggaggcattctcattaacagtcaaggcgaaaggtttatggagcgatacgcccccatcgcgaaggacctggcgtctagagatgtggtgtctcggtggatgactctggagatccgcgaaggaagaggctgtggccctgagaaagatcacgtctacctgcagctgcaccacctacctccagagcagctggccatgcccttgcccggcatttcagagacagccatgatcttcgctggtgtggacgtcacgaaggagccgatccctgtcctccccaccgtgcattataacatggacggcattcccaccagctacgaggggcaggtcctgaggcacgggaatggccaggatcagattgtgcccggcctgtacgcctgtggggaggccgcctgtgcctctgcacatggtgtcaaccgcctcggggcaaactcgctattggacctggttgtctggtcaggcatgtgccctgagcatcgcagagtcgtgcaggcctggagataaagtccctccaattaaaccaaatgctggggaagaatctgtcacgaatcttgacaaattgagatttgctgatggaagaagcataagaacatcggaactgcgactcagcatgcagaaggtaagagcctggactcgctctggagtgagcaggctggctgcatacctggccctgcactggttttgtttttttaaaaacagatctagggggatgcaggtgcagctttgtgtggatgtactgggaggtggtggagtctgggcttttcatgtacctgtcacccaagtcgtgtgtgttgtactcagcaggtaattgctcatccccacccctcccgctttttggagcccacagtctg

SEQ ID NO: 32737 - DNA, 1840 bp, Homo sapiens
cgcagtctgcgcagggactggcgggactgcgcggcggcgactacagacgtgtcgggggtccggggcctgtcgcggttgccaagcgctcggcgcctggcgctggcgctggccaaggcgcctttactgttccaggatacagatctcctgattcaggtgtccagtgccttttgaactgaccgcaagccctcctggacgattggaactgtaatgtggaaagggctctgatggagccggttaaaatgcttcattatttgcaaaataccacatacagtaatacgatctggatgtctttcccctcctccactaagtagcataagtgaagacttcccagaggaagtgcgtctttttcatctcgtatctgagtcatggccaacagtgttgcaaacaggaacccgaggtgttcacttcactgttgaaggaacgagagggcatctgctaaagtttcagattccatttctgctcagtatccagtagtggatcatgaatttgatgcagtggtggtaggcgctggaggggcaggctttgcgagctgcatttggcctttccgaggcagagtttgatacagcatgtgttaccaagctgtttcctaccaggtcacacactgttgcagcgcaggtagaaaattatggcatgccgtttagcagaactgaagatgggaagatttatcagcgtgcatttggcggacacagcctcaagtttggaaagggcgggcaggcccatgggtgctgctgtgtggctgatcggaccggccactcaatattgcacaccttatacgggaggtctctgcgatatgataccagctgttttgtggagtattttgccttggatctcctgatggagaatggggagtgccgtggtgtcttcgcactgtgcatacaggacgggtccatccatcgcataagagcaaagaatactattgttgccacagggctactggcgcaactacttgagctgcacgtctgcccacaccagcaccagcgacggcacggccatgatcaccagggcaggccttccttgccaggacctcgagtttgttcagttccaccccacaggcacatatggtgctggttgtctcattacggaaggatgtcgtggagagggaggcattctcattaacagtcaaggcgaaaggtttatggagcgatacgcccccatcgcgaaggacctggcgtctagagatgtggtgtctcggtggatgactctggagatccgcgaaggaagaggctgtggccctgagaaagatcacgtctacctgcagctgcaccacctacctccagagcagctggccatgcccttgcccggcatttcagagacagccatgatcttcgctggtgtggacgtcacgaaggagccgatccctgtcctccccaccgtgcattataacatggacggcattcccaccagctacgaggggcaggtcctgaggcacgggaatggccaggatcagattgtgcccggcctgtacgcctgtggggaggccgcctgtgcctctgcacatggtgtcaaccgcctcggggcaaactcgctattggacctggttgtctggtcaggcatgtgccctgagcatcgcagagtcgtgcaggcctggagataaagtccctccaattaaaccaaatgctggggaagaatctgtcacgaatcttgacaaattgagatttgctgatggaagaagcataagaacatcggaactgcgactcagcatgcagaagtcaacgcaaaatcatgctgccgtgttccgtgtgggaagcttgttgcaagaaggttgtgggaaaatcagcaagctctatggagacctgaagcatctgaagacgtttgaccggggtgagcagacagtgggctc

SEQ ID NO: 32738 - DNA, 2268 bp, Homo sapiens
cagcagaatggaaaacgtatcccctaaatggctggccaaccttagcatatgggacagtgtgacctctctcacacagagccactaaaaactaaacactaaaaccagttttcttgagtaaaggtttctaagatggaaaatttaagcagcgagatatgtcaagttgtagacgttggccaggaaaaagccagcagcaaccaggcaggggagagtgtgcatccgacatcctcctgtgtgatgaagggatgacacctcttccctctgggctgtcagcctttactgttgcaggatacagatctcctgattcaggtgtccagtgccttttgaactgaccgcaagccctcctggacgattggaactgtaatgtggaaagggctctgatggagccggttaaaatgcttcattatttgcaaaataccacatacagtaatacgatctggatgtctttcccctcctccactaagtagcataagtgaagacttcccagaggaagtgcgtctttttcatctcgtatctgagtcaatgatatcctttttggatacaagcgtcatcctggttttctagagtgccaagccagggtggaaaggaggacctgggggctcagtccttccttgccccttgggctgcccttcagggttaagtagagggtcccagctgagctctctggattgcacaggagcacctgggtacataagaaggtgaacagtttgcaaggggaagtttgaattactatcccccacagcatttgttccttcaggacactaaccctctggatctgtgtcttctgtgtctccagtggcccaacggtgttgcaaacaggaacccgaggtgttcacttcactgttgaaggaacgagagggcatctgctaaagtttcagattccatttctgctcagtatccagtagtggatcatgaatttgatgcagtggtggtaggcgctggaggggcaggctttgcgagctgcatttggcctttccgaggcagagtttgatacagcatgtgttaccaagctgtttcctaccaggtcacacactgttgcagcgcaggtagaaaattatggcatgccgtttagcagaactgaagatgggaagatttatcagcgtgcatttggcggacacagcctcaagtttggaaagggcgggcaggcccatgggtgctgctgtgtggctgatcggaccggccactcaatattgcacaccttatacgggaggtctctgcgatatgataccagctgttttgtggagtattttgccttggatctcctgatggagaatggggagtgccgtggtgtcttcgcactgtgcatacaggacgggtccatccatcgcataagagcaaagaatactattgttgccacagggctactggcgcaactacttgagctgcacgtctgcccacaccagcaccagcgacggcacggccatgatcaccagggcaggccttccttgccaggacctcgagtttgttcagttccaccccacaggcacatatggtgctggttgtctcattacggaaggatgtcgtggagagggaggcattctcattaacagtcaaggcgaaaggtttatggagcgatacgcccccatcgcgaaggacctggcgtctagagatgtggtgtctcggtggatgactctggagatccgcgaaggaagaggctgtggccctgagaaagatcacgtctacctgcagctgcaccacctacctccagagcagctggccatgcccttgcccggcatttcagagacagccatgatcttcgctggtgtggacgtcacgaaggagccgatccctgtcctccccaccgtgcattataacatggacggcattcccaccagctacgaggggcaggtcctgaggcacgggaatggccaggatcagattgtgcccggcctgtacgcctgtggggaggccgcctgtgcctctgcacatggtgtcaaccgcctcggggcaaactcgctattggacctggttgtctggtcaggcatgtgccctgagcatcgcagagtcgtgcaggcctggagataaagtccctccaattaaaccaaatgctggggaagaatctgtcacgaatcttgacaaattgagatttgctgatggaagaagcataagaacatcggaactgcgactcagcatgcagaagtcaacgcaaaatcatgctgccgtgttccgtgtgggaagcttgttgcaagaaggttgtgggaaaatcagcaagctctatggagacctgaagcatctgaagacgtttgaccggggtgagcagacagtgggctc

SEQ ID NO: 32739 - DNA, 1376 bp, Homo sapiens
cgcagtctgcgcagggactggcgggactgcgcggcggcgactacagacgtgtcgggggtccggggcctgtcgcggttgccaagcgctcggcgcctggcgctggcgctggccaaggcgtggccaacagtgttgcaaacaggaacccgaggtgttcacttcactgttgaaggaacgagagggcatctgctaaagtttcagattccatttctgctcagtatccagtagtggatcatgaatttgatgcagtggtggtaggcgctggaggggcaggctttgcgagctgcatttggcctttccgaggcagagtttgatacagcatgtgttaccaagctgtttcctaccaggtcacacactgttgcagcgcaggttggaatcaatgctgctctggggaacatggaggaggacaactggaggtggcatttctatgacaccgtgaagggctccgactggctgggggaccaggatgccatccactacgtgacggagcaggcccccactgccatggtcgaggtagaaaattatggcatgccgtttagcagaactgaagatgggaagatttatcagcgtgcatttggcggacacagcctcaagtttggaaagggcaggcaggcccatcggtgctgctgtgtggctgatcggaccggccactcaatattgcacacctcatatgggaggtctctgcgatatgataccagctgttttgtggagtattttgccttggatctcctgatggagaatggggagtgccgtggtgtcttcgcactgtgcatacaggacgggtccatccatcgcataagagcaaagaatactattgttgccacagggtaggaatctaatttctactttatttcctttgtaaaaatgaataaatttcatttagagtctctttattttaaggaaaatagaggcattgtagaatagcagttcagacacaggccttgatataaccacgtgagggtgatggcctttcccagccatggttcctcacctgtaaagggtgaggacagcagcacctgcctcgggggtgagaaagcatggccctcattagtcggtagtggctgccgtcaggttcacagcgtacctctcccgattttagatgaggaaactgtggcccgaagagtcacatggggttttctggcaaaatccctcttgttttagtgggttctatgtttatactgattcctgggatagataagtctgtcttctccacataatgaaaataaaaaactttaattttatacagtggcagttactttagccactttaaaagttaagaagtgtcagtacagccaagaaaaaaaatcagcaaaactacagggtgggaaaaaatattttccaaaccatatatctaatgatatcttagtatctaaaatagc

SEQ ID NO: 32740 - DNA, 1478 bp, Homo sapiens
cgcagtctgcgcagggactggcgggactgcgcggcggcgactacagacgtgtcgggggtccggggcctgtcgcggttgccaagcgctcggcgcctggcgctggcgctggccaaggcgtggccaacagtgttgcaaacaggaacccgaggtgttcacttcactgttgaaggaacgagagggcatctgctaaagtttcagattccatttctgctcagtatccagtagtggatcatgaatttgatgcagtggtggtaggcgctggaggggcaggctttgcgagctgcatttggcctttccgaggcagagtttgatacagcatgtgttaccaagctgtttcctaccaggtcacacactgttgcagcgcaggttggaatcaatgctgctctggggaacatggaggaggacaactggaggtggcatttctatgacaccgtgaagggctccgactggctgggggaccaggatgccatccactacgtgacggagcaggcccccactgccatggtcgcggtgatgggcgggaggctctgggtgctctggtggtctgtttctagtacaagagtcctggaaaaaatgtaagcagttgaggcagatgtggcagccgaaagaatggtagaaaattatggcatgccgtttagcagaactgaagatgggaagatttatcagcgtgcatttggcggacacagcctcaagtttggaaagggcgggcaggcccatgggtgctgctgtgtggctgatcggaccggccactcaatattgcacaccttatacgggaggtctctgcgatatgataccagctgttttgtggagtattttgccttggatctcctgatggagaatggggagtgccgtggtgtcttcgcactgtgcatacaggacgggtccatccatcgcataagagcaaagaatactattgttgccacagggtaggaatctaatttctactttatttcctttgtaaaaatgaataaatttcatttagagtctctttattttaaggaaaatagaggcattgtagaatagcagttcagacacaggccttgatataaccacgtgagggtgatggcctttcccagccatggttcctcacctgtaaagggtgaggacagcagcacctgcctcgggggtgagaaagcatggccctcattagtcggtagtggctgccgtcaggttcacagcgtacctctcccgattttagatgaggaaactgtggcccgaagagtcacatggggttttctggcaaaatccctcttgttttagtgggttctatgtttatactgattcctgggatagataagtctgtcttctccacataatgaaaataaaaaactttaattttatacagtggcagttactttagccactttaaaagttaagaagtgtcagtacagccaagaaaaaaaatcagcaaaactacagggtgggaaaaaatattttccaaaccatatatctaatgatatcttagtatctaaaatagc

SEQ ID NO: 32741 - DNA, 1146 bp, Homo sapiens
cgcagtctgcgcagggactggcgggactgcgcggcggcgactacagacgtgtcgggggtccggggcctgtcgcggttgccaagcgctcggcgcctggcgctggcgctggccaaggcgatttctgctcagtatccagtagtggatcatgaatttgatgcagtggtggtaggcgctggaggggcaggctttgcgagctgcatttggcctttccgaggcagagtttgatacagcatgtgttaccaagctgtttcctaccaggtcacacactgttgcagcgcaggtagaaaattatggcatgccgtttagcagaactgaagatgggaagatttatcagcgtgcatttggcggacacagcctcaagtttggaaagggcaggcaggcccatcggtgctgctgtgtggctgatcggaccggccactcaatattgcacacctcatatgggaggtctctgcgatatgataccagctgttttgtggagtattttgccttggatctcctgatggagaatggggagtgccgtggtgtcttcgcactgtgcatacaggacgggtccatccatcgcataagagcaaagaatactattgttgccacagggtaggaatctaatttctactttatttcctttgtaaaaatgaataaatttcatttagagtctctttattttaaggaaaatagaggcattgtagaatagcagttcagacacaggccttgatataaccacgtgagggtgatggcctttcccagccatggttcctcacctgtaaagggtgaggacagcagcacctgcctcgggggtgagaaagcatggccctcattagtcggtagtggctgccgtcaggttcacagcgtacctctcccgattttagatgaggaaactgtggcccgaagagtcacatggggttttctggcaaaatccctcttgttttagtgggttctatgtttatactgattcctgggatagataagtctgtcttctccacataatgaaaataaaaaactttaattttatacagtggcagttactttagccactttaaaagttaagaagtgtcagtacagccaagaaaaaaaatcagcaaaactacagggtgggaaaaaatattttccaaaccatatatctaatgatatcttagtatctaaaatagc

SEQ ID NO: 32742 - DNA, 765 bp, Homo sapiens
atatcaccttaaaaccttaaaggttggcttaacacttcttgccctttttttttctttcttttagtctctgcgatatgataccagctgttttgtggagtattttgccttggatctcctgatggagaatggggagtgccgtggtgtcttcgcactgtgcatacaggacgggtccatccatcgcataagagcaaagaatactattgttgccacagggtaggaatctaatttctactttatttcctttgtaaaaatgaataaatttcatttagagtctctttattttaaggaaaatagaggcattgtagaatagcagttcagacacaggccttgatataaccacgtgagggtgatggcctttcccagccatggttcctcacctgtaaagggtgaggacagcagcacctgcctcgggggtgagaaagcatggccctcattagtcggtagtggctgccgtcaggttcacagcgtacctctcccgattttagatgaggaaactgtggcccgaagagtcacatggggttttctggcaaaatccctcttgttttagtgggttctatgtttatactgattcctgggatagataagtctgtcttctccacataatgaaaataaaaaactttaattttatacagtggcagttactttagccactttaaaagttaagaagtgtcagtacagccaagaaaaaaaatcagcaaaactacagggtgggaaaaaatattttccaaaccatatatctaatgatatcttagtatctaaaatagc

SEQ ID NO: 32743 - DNA, 983 bp, Homo sapiens
cgcagtctgcgcagggactggcgggactgcgcggcggcgactacagacgtgtcgggggtccggggcctgtcgcggttgccaagcgctcggcgcctggcgctggcgctggccaaggcggtagaaaattatggcatgccgtttagcagaactgaagatgggaagatttatcagcgtgcatttggcggacacagcctcaagtttggaaagggcgggcaggcccatgggtgctgctgtgtggctgatcggaccggccactcaatattgcacaccttatacgggaggtctctgcgatatgataccagctgttttgtggagtattttgccttggatctcctgatggagaatggggagtgccgtggtgtcttcgcactgtgcatacaggacgggtccatccatcgcataagagcaaagaatactattgttgccacagggtaggaatctaatttctactttatttcctttgtaaaaatgaataaatttcatttagagtctctttattttaaggaaaatagaggcattgtagaatagcagttcagacacaggccttgatataaccacgtgagggtgatggcctttcccagccatggttcctcacctgtaaagggtgaggacagcagcacctgcctcgggggtgagaaagcatggccctcattagtcggtagtggctgccgtcaggttcacagcgtacctctcccgattttagatgaggaaactgtggcccgaagagtcacatggggttttctggcaaaatccctcttgttttagtgggttctatgtttatactgattcctgggatagataagtctgtcttctccacataatgaaaataaaaaactttaattttatacagtggcagttactttagccactttaaaagttaagaagtgtcagtacagccaagaaaaaaaatcagcaaaactacagggtgggaaaaaatattttccaaaccatatatctaatgatatcttagtatctaaaatagc

SEQ ID NO: 32744 - DNA, 290 bp, Homo sapiens
tgctgggattacaagcgtgagccactgcatgcccgacctacttccctctctttctctgacctgcagcacagacaccctgttgagggaggtgggcttgtggaggaatgggcatcttgacatttcacctgaaatcttcctttccacaggtcctgaggcacgggaatggccaggatcagattgtgcccggcctgtacgcctgtggggaggccgcctgtgcctctgcacatggtgtcaaccgcctcggggcaaactcgctattggacctggttgtctggtcaggcatgtgccct

SEQ ID NO: 32745 - DNA, 674 bp, Homo sapiens
gaaaacgttgacaaacacctgtgtcagggcctctgctgttgggtctggggccacagggttgggtaagagccaatatatgagctcagatcatagctctattgagctggttgttacaggaggtggtcaagactttgcttgggatctgcccagcccacctttctggctttgtctcctgctcctgcccctctggactgctggcctgtccccaagtgaacacacttgctctttcacacacagacccatggagaccactccctatcatactcactggcacttctacccagaattcacctgagccaccctctttcctttgggctttcaaggcccagctaaagtattagctcctctgtgaaggctgccctctcggagtttgttgctgcctccttgtccaaaaggacctaagataataggttttaataatgtgtacagttatttatttccatctctaagatcccattagaccaggggccctcggagtcagtgagcttgtctttgtgtttttgctgggacctaatacacaatgggtcactcaggaattgcaattaaaatgggtccagagaaatgtgacctgcaagaataaagggatagggcaacccactctggtccccttccacgctgtggaagctttgttctttcgctcttcacaataaatcttgctgctgctcactcttaaa

SEQ ID NO: 32746 - DNA, 528 bp, Homo sapiens
tcacctgaggtcaggagttcgagaccagtctggccaacatggcaaaaccccatctctactaaaaatacaaaaaaattagctgggtgtgatggagggcacctgtaatcccagctactcgggaggctgaggcagaatttcttgaacccaggaggcggaggttgcagtgagccaagatcacgccactgcatagaccaggataatcagtgaaacaagagggcagaggcaagagccctgtcaataccaactctttcctcttttaccctccttgataccttgttttatgaagggatttaggtcttactgttcctcctatactgtcacctccttaataaggctttatgatgtgtcttttttcccttcattccacagtagagtaggtaccagtaaacatccccttactggccaggtgcgctggctcacgcctataaatcccaacactttggaaggccgaggtgggcagatcacttgagcccaggtgttcaagattaagtctgggcaatatggcgaaaccccatctccactaaaaca

SEQ ID NO: 32747 - DNA, 2349 bp, Homo sapiens
gcaggctgctgtctcacagagcgagaaggtgtcaggagcagcccagttgtgtctctctctctacctctgtgaagggcgcgaatgggcagagcagaacttctagaagggaagatgagcacccaggatccctcagatctgtggagcagatccgatggagaggctgagctgctccaggacttggggtggtatcacggcaacctcacacgccatgctgctgaagctcttctcctctcaaatggatgtgacggcagctaccttctgagggacagcaatgagaccaccgggctgtactctctctctgtgagggccaaagattctgttaaacactttcatgttgaatatactggatattcatttaaatttggctttaatgaattctcatctttgaaggattttgtcaagcattttgcaaatcagcctttgattggaagcgagacaggcactctgatggttctaaaacatccctacccaagaaaagtggaagaaccctccatttatgaatctgtccgggttcacacagcaatgcagacaggaagaacagaagatgaccttgtgcccacagcaccttctctgggcaccaaagaaggttacctcaccaaacagggaggcctggtcaagacctggaaaacaagatggtttactctgcacaggaatgaactgaaatacttcaaagaccagatgtcaccagaaccaattcggatcctagacctaacagaatgttcagctgtacaattcgattattcacaagaaagggtaaactgtttttgtttggtatttccattcaggacattttatctctgtgcaaagaccggagtagaagctgatgagtggatcaagatattacgctggaaattgtcacaaataagaaaacagctcaaccaaggggaaggcacgatccgatctcggtcgttcatctttaaatagatctttcttgccaaggaatgctctggcccaggagcaaggtggaatgtttccctgacgctgtgatctgcagcaggcttcaaatgaaaaccgactaaggattttctttcaaaaacaaatcagaagcagatgctgattgggacccatataccacgttgctgactcacgttgctgcccttccatgatgttgccatctccttgagaacactgaagcaatcaccattctgatagaaagtgcttaaaccaccactcttaggtctgctcactcttagaacacacaatggaagaggaagggtttttgttttcactcattgtggtccccaagcctattgacactagttgcctagagtcccactgtgagtcatggtcagcctgtctgacatccaggttgtgctattaaccaagaaggaaacagatacttggaggcttagatgacttctgcaggatttatattcagatagaaaacatcaaatattttcaggggagaggtttttttttttaatttttccccctttatacaaaaaaaaaagaacatttccaaaactaaaatagaaaatgcttgtggcatttattttctctttttaaaaggttcagaaatttggcaggtcctttgcttctaatgacaaaactgtgagagctagatgtcctatgggcaattaggtagtataataaaggtaaatgaaggtacaatttttaaaccattattttcaccctgttggggtaaatgttttaaagagtgagaaaacataaattgagaaagggtgataaagtaatagataacttttagtttaataataattattgttattatactactaataatagagcacttgtaagcactaagttatctttatccaacatttctccaaatggactgaaagaaacttttcaaggacagtgtattataacaatccctttcccagaattagttgtatagggttggcccaagagatgtaagaaaaatctcgcattgctccctaagcaccctgggccttattaaagagcaacttctatttccagtcgggggagtaacactaaagctacaagaaatatgtaataatgataggtaataatgtgttccaaagctttttcaaactagaataaggaggcaaatagaagaatgagatactgatgtccacagttcattggcagaatctaaccccttctgttatcttttttaatactatttttgtttagatagaagtttcaaagaagataaaaatgcttgaagagcctgagagtaaaaagattatgctgcaaagctatgatataaactgctcttgcagtccaaagggatacctgattaaagaagtttcttatttaaacatctcagacgcaaaaattacattaaatttttgtatatttcaacaacattttaaatgtattttgttatgtttgtattatataggataaagcaaatgtcaagtt

SEQ ID NO: 32748 - DNA, 2979 bp, Homo sapiens
gcaggctgctgtctcacagagcgagaaggtgtcaggagcagcccagttgtgtctctctctctacctctgtgaagggcgcgaatgggcagagcagaacttctagaagggaagatgagcacccaggatccctcagatctgtggagcagatccgatggagaggctgagctgctccaggacttggggtggtatcacggcaacctcacacgccatgctgctgaagctcttctcctctcaaatggatgtgacggcagctaccttctgagggacagcaatgagaccaccgggctgtactctctctctgtgagggccaaagattctgttaaacactttcatgttgaatatactggatattcatttaaatttggctttaatgaattctcatctttgaaggattttgtcaagcattttgcaaatcagcctttgattggaagcgagacaggcactctgatggttctaaaacatccctacccaagaaaagtggaagaaccctccatttatgaatctgtccgggttcacacagcaatgcagacaggaagaacagaagatgaccttgtgcccacagcaccttctctgggcaccaaagaaggttacctcaccaaacagggaggcctggtcaagacctggaaaacaagatggtttactctgcacaggaatgaactgaaatacttcaaagaccagatgtcaccagaaccaattcggatcctagacctaacagaatgttcagctgtacaattcgattattcacaagaaagggtaaactgtttttgtttggtatttccattcaggacattttatctctgtgcaaagaccggagtagaagctgatgagtggatcaagatattacgctggaaattggtcaaggacaaaagctgtattttgtctgctctctgtatatctcccgaggagaagactgatcacaaataagaaaacagctcaaccaaggggaaggcacgatccgatctcggtcgttcatctttaaatagatctttcttgccaaggaatgctctggcccaggagcaaggtggaatgtttccctgacgctgtgatctgcagcaggcttcaaatgaaaaccgactaaggattttctttcaaaaacaaatcagaagcagatgctgattgggacccatataccacgttgctgactcacgttgctgcccttccatgatgttgccatctccttgagaacactgaagcaatcaccattctgatagaaagtgcttaaaccaccactcttaggtctgctcactcttagaacacacaatggaagaggaagggtttttgttttcactcattgtggtccccaagcctattgacactagttgcctagagtcccactgtgagtcatggtcagcctgtctgacatccaggttgtgctattaaccaagaaggaaacagatacttggaggcttagatgacttctgcaggatttatattcagatagaaaacatcaaatattttcaggggagaggtttttttttttaatttttccccctttatacaaaaaaaaaagaacatttccaaaactaaaatagaaaatgcttgtggcatttattttctctttttaaaaggttcagaaatttggcaggtcctttgcttctaatgacaaaactgtgagagctagatgtcctatgggcaattaggtagtataataaaggtaaatgaaggtacaatttttaaaccattattttcaccctgttggggtaaatgttttaaagagtgagaaaacataaattgagaaagggtgataaagtaatagataacttttagtttaataataattattgttattatactactaataatagagcacttgtaagcactaagttatctttatccaacatttctccaaatggactgaaagaaacttttcaaggacagtgtattataacaatccctttcccagaattagttgtatagggttggcccaagagatgtaagaaaaatctcgcattgctccctaagcaccctgggccttattaaagagcaacttctatttccagtcgggggagtaacactaaagctacaagaaatatgtaataatgataggtaataatgtgttccaaagctttttcaaactagaataaggaggcaaatagaagaatgagatactgatgtccacagttcattggcagaatctaaccccttctgttatcttttttaatactatttttgtttagatagaagtttcaaagaagataaaaatgcttgaagagcctgagagtaaaaagattatgctgcaaagctatgatataaactgctcttgcagtccaaagggatacctgattaaagaagtttcttatttaaacatctcagacgcaaaaattacattaaatttttgtatatttcaacaacattttaaatgtattttgttatgtttgtattatataggataaagcaaatgtcaagttaaaatgtattgtgttgtttgtaaagtaagaagttactggccaggagcggcggctcatgcctgtaatcccaggactttggtaggccaagacaagcagatcacttgaggtcaggagttcaacatcagcctggccaacatgatgaaaccttgtctttactaaaaatacaaaaattagctgggcatggtggcaggcgcctgtaatcccagctactcaggaggctgaggcaggagaattgcttgaacccgggaggtggaggttgcagtgaaccaagatcgcggcgctgcactctagcctgggtgacagagtcagactccgtcccaaaaaaacaaacaaacaaaacaaaacaaaaaaaaacagaagttacaaatgaatactcacggatatgtatagttttatgtttgttttcttagaaacaaatgtgtttctttgggtgggtaatattgtgttttactatgtttaccttttataaaacataacctgtttatttatattctttggctttgtttattaaaaagcatgattttgctgtgcatgtaccattttgctattaaaatttatttttaatatttgt

SEQ ID NO: 32749 - DNA, 2695 bp, Homo sapiens
gcaggctgctgtctcacagagcgagaaggtgtcaggagcagcccagttgtgtctctctctctacctctgtgaagggcgcgaatgggcagagcagaacttctagaagggaagatgagcacccaggatccctcagatctgtggagggccaaagattctgttaaacactttcatgttgaatatactggatattcatttaaatttggctttaatgaattctcatctttgaaggattttgtcaagcattttgcaaatcagcctttgattggaagcgagacaggcactctgatggttctaaaacatccctacccaagaaaagtggaagaaccctccatttatgaatctgtccgggttcacacagcaatgcagacaggaagaacagaagatgaccttgtgcccacagcaccttctctgggcaccaaagaaggttacctcaccaaacagggaggcctggtcaagtcaccagaaccaattcggatcctagacctaacagaatgttcagctgtacaattcgattattcacaagaaagggtaaactgtttttgtttggtatttccattcaggacattttatctctgtgcaaagaccggagtagaagctgatgagtggatcaagatattacgctggaaattgtcacaaataagaaaacagctcaaccaaggggaaggcacgatccgatctcggtcgttcatctttaaatagatctttcttgccaaggaatgctctggcccaggagcaaggtggaatgtttccctgacgctgtgatctgcagcaggcttcaaatgaaaaccgactaaggattttctttcaaaaacaaatcagaagcagatgctgattgggacccatataccacgttgctgactcacgttgctgcccttccatgatgttgccatctccttgagaacactgaagcaatcaccattctgatagaaagtgcttaaaccaccactcttaggtctgctcactcttagaacacacaatggaagaggaagggtttttgttttcactcattgtggtccccaagcctattgacactagttgcctagagtcccactgtgagtcatggtcagcctgtctgacatccaggttgtgctattaaccaagaaggaaacagatacttggaggcttagatgacttctgcaggatttatattcagatagaaaacatcaaatattttcaggggagaggtttttttttttaatttttccccctttatacaaaaaaaaaagaacatttccaaaactaaaatagaaaatgcttgtggcatttattttctctttttaaaaggttcagaaatttggcaggtcctttgcttctaatgacaaaactgtgagagctagatgtcctatgggcaattaggtagtataataaaggtaaatgaaggtacaatttttaaaccattattttcaccctgttggggtaaatgttttaaagagtgagaaaacataaattgagaaagggtgataaagtaatagataacttttagtttaataataattattgttattatactactaataatagagcacttgtaagcactaagttatctttatccaacatttctccaaatggactgaaagaaacttttcaaggacagtgtattataacaatccctttcccagaattagttgtatagggttggcccaagagatgtaagaaaaatctcgcattgctccctaagcaccctgggccttattaaagagcaacttctatttccagtcgggggagtaacactaaagctacaagaaatatgtaataatgataggtaataatgtgttccaaagctttttcaaactagaataaggaggcaaatagaagaatgagatactgatgtccacagttcattggcagaatctaaccccttctgttatcttttttaatactatttttgtttagatagaagtttcaaagaagataaaaatgcttgaagagcctgagagtaaaaagattatgctgcaaagctatgatataaactgctcttgcagtccaaagggatacctgattaaagaagtttcttatttaaacatctcagacgcaaaaattacattaaatttttgtatatttcaacaacattttaaatgtattttgttatgtttgtattatataggataaagcaaatgtcaagttaaaatgtattgtgttgtttgtaaagtaagaagttactggccaggagcggcggctcatgcctgtaatcccaggactttggtaggccaagacaagcagatcacttgaggtcaggagttcaacatcagcctggccaacatgatgaaaccttgtctttactaaaaatacaaaaattagctgggcatggtggcaggcgcctgtaatcccagctactcaggaggctgaggcaggagaattgcttgaacccgggaggtggaggttgcagtgaaccaagatcgcggcgctgcactctagcctgggtgacagagtcagactccgtcccaaaaaaacaaacaaacaaaacaaaacaaaaaaaaacagaagttacaaatgaatactcacggatatgtatagttttatgtttgttttcttagaaacaaatgtgtttctttgggtgggtaatattgtgttttactatgtttaccttttataaaacataacctgtttatttatattctttggctttgtttattaaaaagcatgattttgctgtgcatgtaccattttgctattaaaatttatttttaatatttgt

SEQ ID NO: 32750 - DNA, 396 bp, Homo sapiens
tattatatacatataatgcctcttcatttcccaactgattgactgatggcagggtctttccaaggcagtatgaataaagacaattatacccataggatgaacaatgtaatagccttgtctttccaatcccatggtagcagcattaagcaccccatctctatgctcagaacatttagaaatattgatattaaaattatcacactgggctgagtgcagtggctcacacctgtaatcccaacattttggaaaactgaggcaagaggatggcttgaggccaggagtttgagaccagcctgggcaacatagtgagatgctatctctacaaaaaaatgttttaaaaattagctgggcatggtggcatgtgcctgtagtcctagctgttcaggatgctggggc

SEQ ID NO: 32751 - DNA, 358 bp, Homo sapiens
aattacacttgatcctccaagatctccacctccctcaacatctagatccatcctttcacaaatatttcccttgtgtattcacagcacaagggctaaaaaggaaagcccccaagaattcaatccaacatttttatatatgaaacaagccacatttataatataaaagtaataacagaatgaatgaaaatatttacaaatgtgtatcggaaaaaggatttgctacatatataaagaatttcaaaatgaactcagtaagaaaacgaaccacccggccaggaacagtggctcacatctataatcccagcactttgggaggccaaggcgggtggaacacctgaggtcaggagttcaaggccag

SEQ ID NO: 32752 - DNA, 521 bp, Homo sapiens
  misc_feature (231)..(231): n is a, c, g, or t
  misc_feature (233)..(233): n is a, c, g, or t
  misc_feature (403)..(403): n is a, c, g, or t
  misc_feature (418)..(418): n is a, c, g, or t
  misc_feature (445)..(445): n is a, c, g, or t
  misc_feature (463)..(463): n is a, c, g, or t
ctcactctctttgttccagtaagagatggttgttaagaagagcctggcatctcccctctccctttcttaccatctgatttctacccacagcagttccctttccaccacagtagaagcagcctaaggccctcactgggtgcagacacccaatcttgaacttttccagacattcgaattgtgagacaaataaaccttttctctttgggccctaggttccctgcctgcctctgntnactgctagtgaaaagggttctggtgctgtggcctcacattttatggaggccatggtcattccagtttttctaccatcttgttctcccccttcaccaacgatggggggcattctcttcgcactgtgttttaaaaatggacattcttgttcttcttgtctgcctgagagtgnacagagggttttggncccctaccttccctcctactctgattntccaggctcttggtgcanttctttggggctgggtatcttaagtcttcagttctggcttccccggctggggaaattg

SEQ ID NO: 32753 - DNA, 378 bp, Homo sapiens
atgttggccaggctggtcgctggtcttgaactcctgacctcaagtgatctgcccacctcagcctccccaaaatgctagaattacaggcgtgagcaccgagccgggcctcaaagtgccctttcaacaggcattcccgggggccctcctcggaggggtggtgccagtgtgcttgtgaaatttaagcgtccagtgtgggttttgccagcctcatctcacgctgatgagacagaacagggcatctgactgctcttgggcacagctagggaaactgaggctgatggggggcaggaaacctgactgtcctcatgcacagctggggaaattgaggctgggggcaggacagctggccgcccttgtgtacagatgggaaacaggttg

SEQ ID NO: 32754 - DNA, 343 bp, Homo sapiens
ttttttttgagatgaggtcttgctatgtatgctgcctagggttggtcttgaactgggctccagcgatccacccgcctcagtctcccgaagtgctgggattaccagccaaaatacagaaattcaacattgatacaaactattatctaacccacaatccatattccaacatagtctattgtcccaataatgtcctctataggttttccctcccaccttttttcctgatctgggatctactggaggaaatcctacttagttgtcctgtctcttgattcccctataatccagaactgtttctcagccttactttgccttttattatcttgatatttttgtacagact

SEQ ID NO: 32755 - DNA, 793 bp, Homo sapiens
tggtaggtgcgctttgcttcctaacccgttgccgggttggagattccacctccgaagttttctttctgacttttgattttacattcctagtacagtggagaagcccaggcggcctagaatccagtgtcgtccgtgagtgcttggctggtgttcaagtgcatcttccagcctgagaccgcgtggactcgctcatcgtgagggcgagaggaggataagcccattgggctgtcggctgagagtgaggtgcgggtttcttcagcagattgctgatgaaatccttggcatcgtcggagatctcatcgaatgcctcgtcgtcgaagtcccaggtggctgaggtaacgttggccaaggtttcgttatcgttgtctcccatgaagggggaaaggccactgactctggagagacaagagcaggacagcaggtgtggctaggagagggcgcgacgaccagatgagggaattgaggcacagcccaggctcaagtcacctgcccaaagattcacagccagtgagattggaagccaggtatctgcctctagagcctgtcctcttaaatgctatactatcctaacatttctgtaaagatgaagtaaattgcagtgttcagcactggcaccaggcctggtccacagtaaggaggcggtccatgcccggagatctcatgcagttctgctgggttccctccactgccttaccaagctgtgagtgcaggaatgactttgtgaccagcagcttaagccaaataaactttataaggtaaagaatttcaaaacaaaatagagcagatttgtggc

SEQ ID NO: 32756 - DNA, 464 bp, Homo sapiens
cagacattcattgaggtttttctatgtgccaggcactgggtcaagtgcctaaaacaagtgaactcacttaatcttaacactgccctatgatgcaagtaattcttataactttgttttacagatgagggaattgaggcacagcccaggctcaagtcacctgcccaaagattcacagccagtgagattggaagccaggtatctgcctctagagcctgtcctcttaaatgctatactatcctaacatttctgtaaagatgaagtaaattgcagtgttcagcactggcaccaggcctggtccacagtaaggaggcggtccatgcccggagatctcatgcagttctgctgggttccctccactgccttaccaagctgtgagtgcaggaatgactttgtgaccagcagcttaagccaaataaactttataaggtaaagaatttcaaaacaaaatagagcagatttgtggc

SEQ ID NO: 32757 - DNA, 705 bp, Homo sapiens
ggacagtcttccaatggctctcacagcattgcccgttttctgccatttccttcttgccatgtacttcttcatccggtccttggagagtttcttggcctccatgttcttggtatctttcattagccatggatgctgaagacctgcgtgcagtccaggcggttttttcttcagcagattgctgatgaaatccttggcatcgtcggagatctcatcgaatgcctcgtcgtcgaagtcccaggtggctgaggtaacgttggccaaggtttcgttatcgttgtctcccatgaagggggaaaggccactgactctggagagacaagagcaggacagcaggtgtggctaggagagggcgcgacgaccagatgagggaattgaggcacagcccaggctcaagtcacctgcccaaagattcacagccagtgagattggaagccaggtatctgcctctagagcctgtcctcttaaatgctatactatcctaacatttctgtaaagatgaagtaaattgcagtgttcagcactggcaccaggcctggtccacagtaaggaggcggtccatgcccggagatctcatgcagttctgctgggttccctccactgccttaccaagctgtgagtgcaggaatgactttgtgaccagcagcttaagccaaataaactttataaggtaaagaatttcaaaacaaaatagagcagatttgtggc

SEQ ID NO: 32758 - DNA, 1066 bp, Homo sapiens
ggacagtcttccaatggctctcacagcattgcccgttttctgccatttccttcttgccatgtacttcttcatccggtccttggagagtttcttggcctccatgttcttggtatctttcattagccatggatgctgaagacctgcgtgcagtccaggcggttttttcttcagcagattgctgatgaaatccttggcatcgtcggagatctcatcgaatgcctcgtcgtcgaagtcccaggtggctgaggtaacgttggccaaggtttcgttatcgttgtctcccatgaagggggaaaggccactgactctggagagacaagagcaggacagcaggtgtggctaggagagggcgcgacgaccagatgagggaattgaggcacagcccaggctcaagtcacctgcccaaagattcacagccagtgagattggaagccaggtatctgcctctagagcctgtcctcttaaatgctatactatcctaacatttctgtaaagatgaagtaaattgcagtgttcagcactggcaccaggcctggtccacagtaaggaggcggtccatgcccggagatctcatgcagttctgctgggttccctccactgccttaccaagctgtgagtgcaggaatgactttgtgaccagcagcttaagccaaataaactttttttttttttttagtaaatatatgttttatttgtcaagagtaaatgtcagttttatttagaatattcaagtacaaaaaatgaaaatgtatatatctatgactgttaagaaatgttagaaatcattaaaatgttctgagaataccagtaaggcactgaatgcaaataccacctgaaatatgaattatgtgcatttttatatctttaatattcagatgttcatagttattttcttaaaaagtatttttaataaaatgattcaaccttattatttttaccctggaagacagagtttaaacaagtatgtaatgaaaagttttcctaatgaaagctgtgatacactcatgctcaaaggtactttatccttaggaaaaaatagcttatatatctggatgttttaactttt

SEQ ID NO: 32759 - DNA, 741 bp, Homo sapiens
ggcggaaagatgaaaattatcactcacccccccctcaatgagggaattgaggcacagcccaggctcaagtcacctgcccaaagattcacagccagtgagattggaagccaggtatctgcctctagagcctgtcctcttaaatgctatactatcctaacatttctgtaaagatgaagtaaattgcagtgttcagcactggcaccaggcctggtccacagtaaggaggcggtccatgcccggagatctcatgcagttctgctgggttccctccactgccttaccaagctgtgagtgcaggaatgactttgtgaccagcagcttaagccaaataaactttttttttttttttagtaaatatatgttttatttgtcaagagtaaatgtcagttttatttagaatattcaagtacaaaaaatgaaaatgtatatatctatgactgttaagaaatgttagaaatcattaaaatgttctgagaataccagtaaggcactgaatgcaaataccacctgaaatatgaattatgtgcatttttatatctttaatattcagatgttcatagttattttcttaaaaagtatttttaataaaatgattcaaccttattatttttaccctggaagacagagtttaaacaagtatgtaatgaaaagttttcctaatgaaagctgtgatacactcatgctcaaaggtactttatccttaggaaaaaatagcttatatatctggatgttttaactttt

SEQ ID NO: 32760 - DNA, 474 bp, Homo sapiens
ttaagacagactctagtcaagcccacttaccaccaggtgggtgtttaggacagggtaggtcttccactatatctgttttcctcttagttcgccaggcccgcctgctctgggccacgcaggacacggacgtcagcttctcctggagcgctcgctcactttattccatctctacgagctcctcaagtatcccagagcatccccaggcctgtggccacctcgggtctggatgccgcattctctgacctgtggcacattctgggtgcccatgattatgatgaggttctgtgcccatgtggcctcagggctcttgagaccacccttcaaccaggtctttgctcacctgtctcctgcccagggacgccacccaggtcaccggtgcaaacctccagcccctgcccgtttctctccatgagtgcattgccacctcgcagcctcttccacttgctcattcctggtgttattgcctgtctccca

SEQ ID NO: 32761 - DNA, 860 bp, Homo sapiens
cccttttcctgtctctagaggtcagggtgttggggcggaaagttcaaacactttaatattacggttggttcctctggcacccaggccccatcccaaggctctccaggagaccccagccaccagtcattcattagcatgccaaaagacacttaacactttggagagtataagagttttaggagctgcattccagtaaacaggtgtgcagatcagataagcatttcttattgtattgcagtatcagagatgatgctcaccgctggaccacattccaagatatggctccacttattgatctttgaatgaaggggtaccttattgatcctccccctgaccttaccccaaataacaaatcataccagtactaaactggcagaactcaagattggttaggaaagatcctctgaaacttcgtataatgacagttaccttgttttgagtgtgtcccctgtgccaggcactgtgctgagagctttgtgtgttcagactcacttcacagttacaaaaccctctttaatatgtgggaactgggcttgaaatggtttaggtacacggtccagttcatagccaatgttgtgttactagaaagggatcccaatacagaccctgagagtgggttcttggaccttgtgcaaggaagaattcagggcaaggccatagagtaaggtgaaagcaatttgttagagaagttaaaaaaagaaaaaagaatggctactccataggcagagcagcagcatgggctgcttaactgaatatacttatagttatttcttgattatatactaaacaagcagtggattgttcatgagttttccaggaaaggtgtgggcagttcctgaaactgagggttcctccccctt

SEQ ID NO: 32762 - DNA, 565 bp, Homo sapiens
gtttctccccatgtggtaatctgaaatatggcctcgtgggaagggaaagacctgaccgttccccagcccgacacccgtaaagggtctgtgctgaggaggattagtaaaagaggaaggcctctttgcagttgagataagaggaaggcatctgtctcctgctcgtccctgggcaatagaatgtctgggtgtaaaacccgattgtatattccatctactggagataggagaaaaccgccttagggctggaggtgagacatgctggcggcaataggcaatagtgctctttaaagcattgagatgtttatgtatgtgcacattaaaagcacagcacctttttctttaccttgtttatgatgtagagatgtttgttcacgttttcctgctgaccctctccccactattaccctgttgtcctgccactctccattgtctccctgttgtccccctctccgatatggtagagatactaatgaataaatactgagggaactcagagaccggtgccggcgtgggtcctccatatgctgaacgccggttccctgggcccacttttctttctctatta

SEQ ID NO: 32763 - DNA, 360 bp, Homo sapiens
gttccagcccaatgtactagaaagagcacagagttctagaagcttcaactctgccattaactcctgcctgagagaagaggaccaacaatcctatttgccatatggaaagttacatatagtgtgtaggacacattttttttttttcaaatggatttttgagccagttctgaatacaagcagcagttaacagttcagctgcttcaataatggtttggggttgggccctgtgtgccttgggcaccttgagcaagttttccccctctctgtgcctctgtttcctcatctgaaaaacagaagtaataatattacctacttcataggatcatcataaggattaaacaaactggttcatgtgaaaac

SEQ ID NO: 32764 - DNA, 466 bp, Homo sapiens
acttaataactcttaacttctgtaattatcagtatcatccagaaaaaaccctccagtgttattcggacacacactgagaacatgctgggtcccaggcaccatgagttcggggattctgcaatgaataagacccataaaaatcctgggttcatggaaccagcacttcagtggggatacaattttctgctttcagggttggcatataaaactgcaatgagccgggcacagtggctcacacctgtaatcccatcactttggtagactggggtgggaagattgcttgaggccaggagtgtgagaccagcctggtaatgtggtcagaccctatctgtacaaacatttaaaaaattatctgggtgtggtagtcccagctacaggggctgaggcagaagaatcacttgagcccggcagctcatcatggctgcggtgagctatgatcgcaacactgccctccagcctgagtgaa

SEQ ID NO: 32765 - DNA, 343 bp, Homo sapiens
aaggggaattgggaatgacaattcacagacacagggtctctttctaggatgatgaaaaagttctagaatcagataaaagtgatggctgcacaacactgtgaatatactaaaaaccactgaattgtgcacttcaaagtggtgaactttgttacctgaattttatcttaataaaaaattgcaaattaaaattaaataaaaagaagagtgagtgcaccacctccctacacacaccagcatgcccctccttctaactttccttttaccttccaaagtaataaactctccatcggtagaattattcaagcagaagctgaaacatcatctgtcaggagtatgctactga

SEQ ID NO: 32766 - DNA, 219 bp, Homo sapiens
ttcatattcctggagaattaagagcattttcaaaatgttttacataagtgttgcttacctctaagtcctcactgcaaaggtaaatactactgcaaaggagagaaaagaaaagaagtgaatgtttagaaaaaaacaaaaaagaaagtagagcaagaaaggcaggaaaaggaagtaatgaaggagaggatagaacaaaaagaaggcccaactgatggggga

SEQ ID NO: 32767 - DNA, 359 bp, Homo sapiens
ggagaatgggatgaacctgggaggcggagcttgcagtgagcccagatcgcaccactgcactccagcctgggtgacagagtgagattccatctcaaaaaataaataaataaataaaaattggaatttgttcaaatgcaaataaaggatagataaatcatctaagttttatcaaaccacacatcttatcaaacaaaataaataccaaagacgtgagcaggctaaataccttttcaattaattctattttttaataaaatgaaacattttaaatgtcacgtgggccacttgtggtggctcagacctgtaatctcagcactttgggaggcaaggcaggctggtgaaaccccatctccacaaca

SEQ ID NO: 32768 - DNA, 388 bp, Homo sapiens
ttttttttttttgagacatagtctcactctgtcacccaggctggagtgcagtgacgcgatctcggcacactgcaagctccgcctcccaggttcactccattctcctgcctcagcctcccgagtaactgggactacaggcgcccgccaccacgcctggctaattttttgtatttttagtagagacggggtttcactgttagccaggatggtctctatctcctgacctcatgatttacccgcctcggcctcccaaagtgctgggattaccggcgtgagccaccgcgtctggctgaaaatccttttctttccgatgattttgatagtctagcgacggacatttgaatcggaagatattttcatatttgtccaagatctcagccaaatgcat

SEQ ID NO: 32769 - DNA, 877 bp, Homo sapiens
tcctacacccctgccagcggcaccatggcttccctctggctcctctcctgcttctcccttgtgggggccgcctttggctgcggggtccccgccatccaccctgtgctcagcggcctgtccaggatcgtgaatggggaggacgccgtccccggctcctggccctggcaggtgtccctgcaggacaaaaccggcttccacttctgcgggggctccctcatcagcgaggactgggtggtcaccgctgcccactgcggggtcaggacctccgacgtggtcgtggctggggagtttgaccagggctctgacgaggagaacatccaggtcctgaagatcgccaaggtcttcaagaaccccaagttcagcattctgaccgtgaacaatgacatcaccctgctgaagctggccacacctgcccgcttctcccagacagtgtccgccgtgtgcctgcccagcgccgacgacgacttccccgcggggacactgtgtgccaccacaggctggggcaagaccaagtacaacgccaacaagacccctgacaagctgcagcaggcagccctgcccctcctgtccaatgccgaatgcaagaagtcctggggcaggaggatcaccgacgtgatgatctgtgccggggccagtggcgtctcctcctgcatgggtgactctggaggccccctggtctgccagaaggacggagcctggaccctggtgggcattgtgtcctggggcagccgcacctgctctaccaccacgcccgctgtgtacgcccgtgtcaccaagctcataccctgggtgcagaagatcctggccgccaactgagcccgcagctcctgccacccctgccttaagatttcccattaaatgcatctgtttagaaaaa

SEQ ID NO: 32770 - DNA, 524 bp, Homo sapiens
  misc_feature (27)..(27): n is a, c, g, or t
  misc_feature (96)..(96): n is a, c, g, or t
  misc_feature (118)..(118): n is a, c, g, or t
  misc_feature (120)..(120): n is a, c, g, or t
ttggggccaaaaaaaaaccttggcccnggtttttttttcccaaggaacaagtgttccggccggttgttgccttggccccaaggcgccgggaagganggaattttcccggcgggggaanantgtgtgccaacccaacagggtgggggcaaggaccaaagtaacaaacgccaacaagacccctgacaagctgcagcaggcagccctgcccctcctgtccaatgccgaatgcaagaagtcctggggcaggaggatcaccgacgtgatgatctgtgccggggccagtggcgtctcctcctgcatgggtgactctggaggccccctggtctgccagaaggacggagcctggaccctggtgggcattgtgtcctggggcagccgcacctgctctaccaccacgcccgctgtgtacgcccgtgtcaccaagctcataccctgggtgcagaagatcctggccgccaactgagcccgcagctcctgccacccctgccttaagatttcccattaaatgcatctgtttagaaaaa

SEQ ID NO: 32771 - DNA, 806 bp, Homo sapiens
ccacgcgtgcgagcggcatggcttcctctggctctctctgcttctcccttgtgggggcgcctttggctgcggggtccccgccatccaccctgtgctcagcggcctgtccaggatcgtgaatggggaggacgccgtccccggctcctggccctggcaggtgtccctgcaggacaaaaccggcttccacttctgcgggggctccctcatcagcgaggactgggtggtcaccgctgcccactgcggggtcaggactccgacgtggtcgtggctggggaagtgattaaataaaagcaacgcaagaaaaaaaaaaaaaacaaaaaaaaaaaaaaaaaaaaaataaaaaataataaaaaaaaaaacaaaaaaaaaaaaaaaaaaaaaaaaaaggggggggggggtataatattaattctgggggggggggcaattttggggggcaagttttttgttgagaaagaagggaggctcgtccaaataaaaggggggttgtctcttaaaaatcacgacaggccgagcgcgggctgattaaaacaaaaagagcatcgtcgtgggtgtgggacaaaaatacaggttatgtggatgtgactattttggcggaggaggagagaacacacccatagcgggcgggggggggagaagctatgttgggggccggccaactcctagccaggaggtgatttgagcgctggctggagtggtcaattaaaacactggagaggggtgataatggggtggaaccagtggctgtattttgttctgtggtgggagaaaaagtgtgttgatggtggttttttgtgagaatattt

SEQ ID NO: 32772 - DNA, 859 bp, Homo sapiens
tcctacacccctgccagcggcaccatggcttccctctggctcctctcctgcttctcccttgtgggggccgcctttggctgcggggtccccgccatccaccctgtgctcagcggcctgtccaggatcgtgaatggggaggacgccgtccccggctcctggccctggcaggtgtccctgcaggacaaaaccggcttccacttctgcgggggctccctcatcagcgaggactgggtggtcaccgctgcccactgcggggtcaggacctccgacgtggtcgtggctggggagtttgaccagggctctgacgaggagaacatccaggtcctgaagatcgccaaggtcttcaagaaccccaagttcagcattctgaccgtgaacaatgacatcaccctgctgaagctggccacacctgcccgcttctcccagacagtgtccgccgtgtgcctgcccagcgccgacgacgacttccccgcggggacactgtgtgccaccacaggctggggcaagaccaagtacaacgccaacaagacccctgacaagctgcagcaggcagccctgcccctcctgtccaatgccgaatgcaagaagtcctggggcaggaggatcaccgacgtgatgatctgtgccggggccagtggcgtctcctcctgcatgggtgactctggaggccccctggtctgccagaaggacggagcctggaccctggtgggcattgtgtcctggggcagccgcacctgctctaccaccacgcccgctgtgtacgcccgtgtcaccaagctcataccctgggtgcagaagatcctggccgccaactgagccccgaggtttcccttcggaccttggttcccaacaaaacctt

SEQ ID NO: 32773 - DNA, 853 bp, Homo sapiens
tcctacacccctgccagcggcaccatggcttccctctggctcctctcctgcttctcccttgtgggggccgcctttggctgcggggtccccgccatccaccctgtgctcagcggcctgtccaggatcgtgaatggggaggacgccgtccccggctcctggccctggcaggtgtccctgcaggacaaaaccggcttccacttctgcgggggctccctcatcagcgaggactgggtggtcaccgctgcccactgcggggtcaggacctccgacgtggtcgtggctggggagtttgaccagggctctgacgaggagaacatccaggtcctgaagatcgccaaggtcttcaagaaccccaagttcagcattctgaccgtgaacaatgacatcaccctgctgaagctggccacacctgcccgcttctcccagacagtgtccgccgtgtgcctgcccagcgccgacgacgacttccccgcggggacactgtgtgccaccacaggctggggcaagaccaagtacaacgccaacaagacccctgacaagctgcagcaggcagccctgcccctcctgtccaatgccgaatgcaagaagtcctggggcaggaggatcaccgacgtgatgatctgtgccgggggtgactctggaggccccctggtctgccagaaggacggagcctggaccctggtgggcattgtgtcctggggcagccgcacctgctctaccaccacgcccgctgtgtacgcccgtgtcaccaagctcataccctgggtgcagaagatcctggccgccaactgagcccgcagctcctgccacccctgccttaagatttcccattaaatgcatctgtttagaaaaa

SEQ ID NO: 32774 - DNA, 732 bp, Homo sapiens
ccacgcgtgcgagcggcatggcttcctctggctctctctgcttctcccttgtgggggcgcctttggctgcggggtccccgccatccaccctgtgctcagcggcctgtccaggatcgtgaatggggaggacgccgtccccggctcctggccctggcaggtgtccctgcaggacaaaaccggcttccacttctgcgggggctccctcatcagcgaggactgggtggtcaccgctgcccactgcggggtcaggacctccgacgtggtcgtggctggggagtttgaccagggctctgacgaggagaacatccaggtcctgaagatcgccaaggtcttcaagaaccccaagttcagcattctgaccgtgaacaatgacatcaccctgctgaagctggccacacctgcccgcttctcccagacagtgtccgccgtgtgcctgcccagcgccgacgacgacttccccgcggggacactgtgtgccaccacaggctggggcaagaccaagtacaacgggtgactctggaggccccctggtctgccagaaggacggagcctggaccctggtgggcattgtgtcctggggcagccgcacctgctctaccaccacgcccgctgtgtacgcccgtgtcaccaagctcataccctgggtgcagaagatcctggccgccaactgagcccgcagctcctgccacccctgccttaagatttcccattaaatgcatctgtttagaaaaa

SEQ ID NO: 32775 - DNA, 866 bp, Homo sapiens
ccacgcgtgcgagcggcatggcttcctctggctctctctgcttctcccttgtgggggcgcctttggctgcggggtccccgccatccaccctgtgctcagcggcctgtccaggatcgtgaatggggaggacgccgtccccggctcctggccctggcaggtgtccctgcaggacaaaaccggcttccacttctgcgggggctccctcatcagcgaggactgggtggtcaccgctgcccactgcggggtcaggacctccgacgtggtcgtggctggggagtttgaccagggctctgacgaggagaacatccaggtcctgaagatcgccaaggtcttcaagaaccccaagttcagcattctgaccgtgaacaatgacatcaccctgctgaagctggccacacctgcccgcttctcccagacagtgtccgccgtgtgcctgcccagcgccgacgacgacttccccgcggggacactgtgtgccaccacaggctggggcaagaccaagtacaacgccaacaagacccctgacaagctgcagcaggcagccctgcccctcctgtccaatgccgaatgcaagaagtcctggggcaggaggatcaccgacgtgatgatctgtgccggggccagtggcgtctcctcctgcatgggtgactctggaggccccctggtctgccagaaggacggagcctggaccctggtgggcattgtgtcctggggcagccgcacctgctctaccaccacgcccgctgtgtacgcccgtgtcaccaagctcataccctgggtgcagaagatcctggccgccaactgagcccgcagctcctgccacccctgccttaagatttcccattaaatgcatctgtttagaaaaa

SEQ ID NO: 32776 - DNA, 1326 bp, Homo sapiens
tcctacacccctgccagcggcaccatggcttccctctggctcctctcctgcttctcccttgtgggggccgcctttggctgcggggtccccgccatccaccctgtgctcagcggcctgtccaggatcgtgaatggggaggacgccgtccccggctcctggccctggcaggtgtccctgcaggacaaaaccggcttccacttctgcgggggctccctcatcagcgaggactgggtggtcaccgctgcccactgcggggtcaggacctccgacgtggtcgtggctggggagtttgaccagggctctgacgaggagaacatccaggtcctgaagatcgccaaggtcttcaagaaccccaagttcagcattctgaccgtgaacaatgacatcaccctgctgaagctggccacacctgcccgcttctcccagacagtgtccgccgtgtgcctgcccagcgccgacgacgacttccccgcggggacactgtgtgccaccacaggctggggcaagaccaagtacaacgccaacaagacccctgacaagctgcagcaggcagccctgcccctcctgtccaatgccgaatgcaagaagtcctggggcaggaggatcaccgacgtgatgatctgtgccggggccagtggcgtctcctcctgcatgggtgactctggaggccccctggtctgccagaaggacggagcctggaccctggtgggcattgtgtcctggggcagccgcacctgctctaccaccacgcccgctgtgtacgcccgtgtcaccaagctcataccctgggtgcagaagatcctggccgccaactgagcccgcagctcctgccacccctgccttaagatttcccattaaatgcatctgtttagaaaaaaacaaaaaaaaaaaaaaaaaaaaaaaaaaggggggggggggtataatattaattctgggggggggggcaattttggggggcaagttttttgttgagaaagaagggaggctcgtccaaataaaaggggggttgtctcttaaaaatcacgacaggccgagcgcgggctgattaaaacaaaaagagcatcgtcgtgggtgtgggacaaaaatacaggttatgtggatgtgactattttggcggaggaggagagaacacacccatagcgggcgggggggggagaagctatgttgggggccggccaactcctagccaggaggtgatttgagcgctggctggagtggtcaattaaaacactggagaggggtgataatggggtggaaccagtggctgtattttgttctgtggtgggagaaaaagtgtgttgatggtggttttttgtgagaatattt

SEQ ID NO: 32777 - DNA, 743 bp, Homo sapiens
tcctacacccctgccagcggcaccatggcttccctctggctcctctcctgcttctcccttgtgggggccgcctttggctgcggggtccccgccatccaccctgtgctcagcggcctgtccaggatcgtgaatggggaggacgccgtccccggctcctggccctggcaggtgtccctgcaggacaaaaccggcttccacttctgcgggggctccctcatcagcgaggactgggtggtcaccgctgcccactgcggggtcaggacctccgacgtggtcgtggctggggagtttgaccagggctctgacgaggagaacatccaggtcctgaagatcgccaaggtcttcaagaaccccaagttcagcattctgaccgtgaacaatgacatcaccctgctgaagctggccacacctgcccgcttctcccagacagtgtccgccgtgtgcctgcccagcgccgacgacgacttccccgcggggacactgtgtgccaccacaggctggggcaagaccaagtacaacgggtgactctggaggccccctggtctgccagaaggacggagcctggaccctggtgggcattgtgtcctggggcagccgcacctgctctaccaccacgcccgctgtgtacgcccgtgtcaccaagctcataccctgggtgcagaagatcctggccgccaactgagcccgcagctcctgccacccctgccttaagatttcccattaaatgcatctgtttagaaaaa

SEQ ID NO: 32778 - DNA, 1088 bp, Homo sapiens
caggaactaggaggttctcactgcccgagcagaggccctacacccaccgaggcatggggctccctgggctgttctgcttggccgtgctggctgccagcagcttctccaaggcacgggaggaagaaattacccctgtggtctccattgcctacaaagtcctggaagttttccccaaaggccgctgggtgctcataacctgctgtgcaccccagccaccaccgcccatcacctattccctctgtggaaccaagaacatcaaggtggccaagaaggtggtgaagacccacgagccggcctccttcaacctcaacgtcacactcaagtccagtccagacctgctcacctacttctgccgggcgtcctccacctcaggtgcccatgtggacagtgccaggctacagatgcactgggagctgtggtccaagccagtgtctgagctgcgggccaacttcactctgcaggacagaggggcaggcccagggtggagatgatctgccaggcgtcctcgggcagcccacctatcaccaacagcctgatcgggaaggatgggcaggtccacctgcagcagagaccatgccacaggcagcctgccaacttctccttcctgccgagccagacatcggactggttctggtgccaggctgcaaacaacgccaatgtccagcacagcgccctcacagtggtgcccccaggtggtgaccagaagatggaggactggcagggtcccctggagagccccatccttgccttgccgctctacaggagcacccgccgtctgagtgaagaggagtttggggggttcaggatagggaatggggaggtcagaggacgcaaagcagcagccatgtagaatgaaccgtccagagagccaagcacggcagaggactgcaggccatcagcgtgcactgttcgtatttggagttcatgcaaaatgagtgtgttttagctgctcttgccacaaaaaaaaaaaaaaaaaaaaaaagggtaactatgagagatggtggatatgttaacttgcttcgctataggaacctttgtgctatctatattatctatatgaatcccatcatatcaggttgtctacctta

SEQ ID NO: 32779 - DNA, 511 bp, Homo sapiens
gcccccccccaggagggttccccagggcaccccacccatcgtgctggttggcagccttgcctcccactgcggccatcacctcccaggatgctgggctggacccacgtgggcccaggtggtgaccagaagatggaggactggcagggtcccctggagagccccatccttgccttgccgctctacaggagcacccgccgtctgagtgaagaggagtttggggggttcaggatagggaatggggaggtcagaggacgcaaagcagcagccatgtagaatgaaccgtccagagagccaagcacggcagaggactgcaggccatcagcgtgcactgttcgtatttggagttcatgcaaaatgagtgtgttttagctgctcttgccacaaaaaaaaaaaaaaaaaaaaaaagggtaactatgagagatggtggatatgttaacttgcttcgctataggaacctttgtgctatctatattatctatatgaatcccatcatatcaggttgtctacctta

SEQ ID NO: 32780 - DNA, 999 bp, Homo sapiens
attgatagatatttgggccgtttccaccatttggctgtggtgaatcacgctgccatgagcgtgtgtgtacagaaattacccctgtggtctccattgcctacaaagtcctggaagttttccccaaaggccgctgggtgctcataacctgctgtgcaccccagccaccaccgcccatcacctattccctctgtggaaccaagaacatcaaggtggccaagaaggtggtgaagacccacgagccggcctccttcaacctcaacgtcacactcaagtccagtccagacctgctcacctacttctgccgggcgtcctccacctcaggtgcccatgtggacagtgccaggctacagatgcactgggagctgtggtccagacagaggggcaggcccagggtggagatgatctgccaggcgtcctcgggcagcccacctatcaccaacagcctgatcgggaaggatgggcaggtccacctgcagcagagaccatgccacaggcagcctgccaacttctccttcctgccgagccagacatcggactggttctggtgccaggctgcaaacaacgccaatgtccagcacagcgccctcacagtggtgcccccaggtggtgaccagaagatggaggactggcagggtcccctggagagccccatccttgccttgccgctctacaggagcacccgccgtctgagtgaagaggagtttggggggttcaggatagggaatggggaggtcagaggacgcaaagcagcagccatgtagaatgaaccgtccagagagccaagcacggcagaggactgcaggccatcagcgtgcactgttcgtatttggagttcatgcaaaatgagtgtgttttagctgctcttgccacaaaaaaaaaaaaaaaaaaaaaaagggtaactatgagagatggtggatatgttaacttgcttcgctataggaacctttgtgctatctatattatctatatgaatcccatcatatcaggttgtctacctta

SEQ ID NO: 32781 - DNA, 450 bp, Homo sapiens
agaatcacttgaacccaggaggtggaggttgcagtgagccgagatcgtgccattgcactccagcctggacaaaaagagcaaaactccgtctcaaaacaaacgaacactctcagacgcctcgggaggggatggctgggaggtgagcctgcctgacttgagtctccactgctttgtcaaggtggtgaccagaagatggaggactggcagggtcccctggagagccccatccttgccttgccgctctacaggagcacccgccgtctgagtgaagaggagtttggggggttcaggatagggaatggggaggtcagaggacgcaaagcagcagccatgtagaatgaaccgtccagagagccaagcacggcagaggactgcaggccatcagcgtgcactgttcgtatttggagttcatgcaaaatgagtgtgttttagctgctcttgccacaaaaa

SEQ ID NO: 32782 - DNA, 913 bp, Homo sapiens
gaattaaactcactagaagtttcagccagatttcttcctgaatggttcagacagttgcaaacaccagactataggctcgcttttgtttagtgcatcttccaacaggcagtcatttgttcatgtcactcagaaaaataaaatttttagcatttgctgaacatacacatattcaaataaacatttaaatattcccctacttctatataaagaaagaaaaacccaggcaaattttaaatgagccatattttgttgattaatttttagcccaattataatgcaatgagaaaaattaattttactaaattttgattctgtagaaaagtaatagctgtttagcactcccttattcaaagaacaaatttagtatttcttgaaatacttttcttcattgtagtcaaatcacatctacatatctaaaggaaaagttgactggttttcctaagtaagtatatattaataggaacaagaattttagtctccatactttaaccatactctaagctgtaaatgtccagtgagtttggagctgtaagcaaaaggacctccttttgaaatgcctgttttaaaacatcaaatggtatgaaatcctttaacctcatgcagttacatttattatgaaatatttcaaacatactgcaaaggtataacgaatactttggaataatctggtttttgaggtaggagttagaaaatgttccatgggtaactcatttgtgcattttagaactacttgaaactctgtaccttcaaataaaaagtagagtggggtggaagtagggagagcattaggaaaaatggctaatgcatactggacttaatacctaggtgatgggttgatacgtgtagcaaaccaccatggcacatgttcacctatgtaacaaacctgcacatcctgcacatgtaccccggaact

SEQ ID NO: 32783 - DNA, 808 bp, Homo sapiens
gtaaatttatggtcaatatgcctccagatcagaggtcctgctgttagagagttttctttttttgctttagtggtacacaggaattctcccccagccccctcaagatactcacacatctttttaaaatttgcacctttttttcagtctggtttcctatggtgaaggggaggctaggaaatgcccaataaatcatctgtctgtcttcactcaattgaaaggcaggaaatgcagagaacagtcacgttacctttccactttgcatataacaagagctatcaggacctgttcctttgaaggggaggcccttctgacagcaatattaaattttcgaggccactggagtttgtttcttgggaccagacccaaagtgggcaggcatgtgggatgttggctctttcccctaccagccccttctaggagtaacttcttgggcttaccctgggaaatctactcagtcagcaatgatttaggggctccatgtgcacagcaccattgtaagtctatgtggattaaaggaattctactcttgagtcctaattcttaacaaatttacatctacagacagtcctagacttataatgattcaactaaatgattccttgactttatgatggtgtgaaacttccaattttaacacaatgtacagtattcaataaacatgagatattccctactttattataaagtaggctttgtgttagatgattttgcccattgtaggttaatgtaagtgctctgagcatgtgtacggtaggcgaggctaagctacagaggtttggtaagttgggtgaattaaatgcattttcaa

SEQ ID NO: 32784 - DNA, 410 bp, Homo sapiens
gccatggctgtaacttgagggagccgccctccttgggcctcagtttccccctctgaagccagggagctgggccttcctctggacttggtttgtccagggctcttggtgggaggtgcccacccttcctgagagaatgggcccacttggtaggacctttttctgccccttctagggccagcggaggggcccgtgctgggtctgcggagagcaggtctcacagccacaaggggcttccaggtgggaagggaccccaggttcacaccatgactctggcactgtgaggggcgatccgcacctcctctaggccttaggcaggtcctctctgtccagccagggcccctacctgtcatctccattttcaaaggggcaagagcacacgtcgacgcggccggaatttagtagtagtagta

SEQ ID NO: 32785 - DNA, 110 bp, Homo sapiens
gcataataatgagacacaacttcagtttagaaaatatatttttatttttattctatgtatgtactgaataggggctacgacataaatctagctagtcttattttttttcc

SEQ ID NO: 32786 - DNA, 1121 bp, Homo sapiens
gcgctatctcggctcactgcaagctccgcctcccgggttcacgccactctcctgcctcagcctccttagtagctgggactacaggcgcccgccaccatgcctggctaatttttttgtatttttagtagagacggggtttcaccgtgtttgacaggatggtctcgatttcctgacttcgtgatccgcccgcctcggcctcccaaagtgctgggattacaggcgtgagccaccgcgcccggcactatttgtgtttttaacaccattctcccccacttctctcctgggtgacataagagagaaataacctgtagtacagcagctaaagtattctcctttcagagaatttttttggaggtctctaatatatatttcccccttgtctctgtgatctcttatttatactatattattgtcccatgtactttctaaactgagcttggaacatttagtattcctgcaattggacttcccacttaacaattatacagactttgcttttagaaatagattaggttccaaacagaaagttcaagtgtaacaacaacaataaaaatagattatgaaacaggctataattggctcttttggatttgataggggcaagatgaaaggcaactttcttgcttttgaaatcatgttgggtaagaggtaaggaatccagctacaattttattagtgcttgaaacgggcttccttgaattctccaggccctatcattttttttttcttactaatcagaagagagctggggtagaagccccatgtttgtattccatgaaacacgtcgggttggagtaaaggcaaaaacagctagacacaccaggtgtgtctgtttgacatttataagctggcactcatcaacactcctgtttctcctttctctgggacgtgtggattaaggggtgtgagttgtgggaagaattgccctcgtacctcctggatttattatttttctcaaataccaaccagtaagatcccaaataacttgagaaaaattgtttcctgatctgtccacttctggtgtcaaagattttactcatcttcttagtacattctatgtattttatatgtataattttatacaattaaaaatagatttttgtctagtgaaaaaaaaaaaa

SEQ ID NO: 32787 - DNA, 2601 bp, Homo sapiens
  misc_feature (561)..(561): n is a, c, g, or t
  misc_feature (1092)..(1092): n is a, c, g, or t
  misc_feature (1186)..(1186): n is a, c, g, or t
  misc_feature (1449)..(1449): n is a, c, g, or t
  misc_feature (1477)..(1477): n is a, c, g, or t
  misc_feature (1846)..(1846): n is a, c, g, or t
  misc_feature (2041)..(2041): n is a, c, g, or t
  misc_feature (2070)..(2070): n is a, c, g, or t
ggcgccacagtcacttttccagatctaggagcaccatggacacctcgtcagagatgctggtacggtttggacggcgctgtggacgggcgaaggaaagtacagtcttaggtatgtctttatcagcagtgtgaaaacggactaatacagtaaattggtaccagcagagtggggcattgctgaaaagataactgaaaatgtggaagcgactttggcactgggtaacaggcagagattggaacagtttgaagagctcagaagaagacaggaaaatgtgggaaagtttggaacttcctagagacttgttgaatgcctttgaccaaaatgctgatagcgacatggacaataaaatgcaggctgagatggtctcagatggagatgaggaactttctggaaactggagtaaaggtgattcttgctatgttttagcaaaaagactagcgtcattttacctctgccctagagatttgtggaactttgagaaagatgatttagggtacctcgcagaagaaatttctaagcagcaaagcattcaagaggtgagttggatactgttaagggcantcagttttaaaagggaaacagagcataaaaattcagaaaatttgtagcctgatctggcagaagaaatttctaagcagcaaagcattcaagaggtgagttgggtactgttaagagcattcagtttcaaaagggaaacagagcataaaaattcagaaaatttgtagcctgactatgcaatagaaaagaaaaaccagttttctggggagaaattcaagccagctgcagaaatctgcataagcatcaagaagcctaatgttaatccccaggaccatggggaaaatgtctccaggccatgtcagagaccttcacagcagcccctcctgtcacaggcccagagatccaggaggaaaaaatggttttatgggccaggaccagggtccctgtgctgtgtgcagcctatagacttggtgccctgtgtcccagctgctccagccatggctgaaaggggccaatgtagagctcatgctgtggcttcagagggtggaagccccaagccttggcagcttccacatggtgttgagcctgtaggtncacagaagtcaagaattgaggtttgggaacctccacctagatttcagaagatgtatggaaatgcctggatgtccaggcaaaagtttgctgcagnggcagggccctcatggagaacctctgctagggcaatgcagaagggaattgtggggccggagctcccacgtagagtccctaatggggcattatctagtggagctgtgagaagagggccaccgtccttcagaccccagcatggtggatccactgacagcttgcaccatgcgcctggaaaagccgcagacactcaatgccagtccgtgaaagcagccaggagggaggctgtaccctgcaaggccacaggggcagaactgccaaagnccatgggtccccaccttttgcatcagcntgacctgaatgtgagacctagagtcaaaggagatcattttggagctttaaaatttgattcctgctggattttggacttgcatgggtcctgcagcccctttgttttggccaatgtctcccatttggaatggctgtatttacccaatacctgtacccctatcgtatctaggaagtaactagcttgcttttcattttacaggctcataggcagaagggacttgccttgtctcaaatgagactttggactatggacttttgggttaatgctgaaatgagttaagactttgggggactgttgtgaaggcatgattggttttgaaatgtgaggacatgagatttagagggggccaggggcagaatgatatggttnggctgtgtccccacccaaatctcaacttgaattgtatctcccagaattcctacacgttgtgggagggacccagggagaggtaattgaatcatgggggctggtctttaccatgccattcttataatagtgaatacgtctcatgagatctgatgggattatcagggacttccgcttttgcttcttcctcgttttctnttgctgccaccatgtaagaagtgcctttngcctctcaccatgattctgaggcctccccagccatgtggaactgtaagtccaactaaacctttttttctctccagtctcaggtatgtctttatcagcagcatgaaaatatactaatacatatttcatgttaatgggctgggagatttagtattgttaagatggtttgaatatttgtccccttcaaaactcatgttgaaaattaattcccaaaatgacagtattgagaggtggggcctttaagaagtgattgggtcatgagggatctgctttcatgaatggattagaaatggggtcttgctgtgaatggattaatggcttatgctggaattgagactgttggcttcataagaagaggaagagagacctgagctagcatcctcagcccccttgccatatgatgccctgcattacttccagactctgcagagagaccttaccagcaagaaagccctcaccaaatgcagcccctcaaccttgcacttctgagcctctataattctaagaaataaaatcctgttctttataaatta

SEQ ID NO: 32788 - DNA, 1799 bp, Homo sapiens
ggcgccacagtcacttttccagatctaggagcaccatggacacctcgtcagagatgctggtacggtttggacggcgctgtggacgggcgaaggaaagtacagaaataagaaactctgaagaagatcaagttctctatctgcctcttctacctagcaaagtagatctccagcaggtcaccataattccacacgatgagtggaaaaggattcaagatagccttgacaggttgacaagagaagcagcatgcctccgtgcagaaagaaaggcaaagaaagaaatgcatttgcgatctcaagaagtggtaaaacactggactaatacatatgcagggatgaaagaacagaaacttgaagccaaaaagaagcgtgatgaagaaatagaggcagaaagacaaattcttgatctggaagaagaaatatacaaacaaggaaaaagaaaaaaggccattgaaaatgcaaagcaatatcaattttaccagacagaaagagtgaaaaactttcattcgggacttcttcttagtagagttatgaaagaacgtgatgcccagattgaattccgaaagagtaagataaaatcagataaaaaatgggaggaacagttgaaactcaacattgaaaaagcttttaaagaagaacaagaaaaagcagaaaaacgacacagagaaagggtggctcttgccaaagatcatctaaaacaaataaaggaacatgaggaagaagaggaaagaaggaaaaaatatgaagaaaaagatgctgaggaaataaagcgacagaatgcattatatgaaattgaaatgagaaaaaaactagaaaagaaaagagaagagatgcatgaaagcaggagacggtttcttgaacatatgcaggataaacatattatcaaagctgtagaacagcagcagcaagaggaagaagatgaaaagatgagaaaattcatcaaagcaaaaaagcgtcttatacaaatggggaaagaaaaagaggctgaaacacacaggcttatggagaaacgaagagaaagaatacataacttcctgagtgaactgttgaaagagaaacttgacaatgaagatatgattattgctagagatattgcagaagctgaggctgaatgggaaaaaagagaaagagaaaaagatgaaaaaaacaaagcagaattaaaaacaattgcagaatatcgagccattgtgatgaaaaataaagaggaagaagaaagacaaagaaaaatagaggctaaagaacaattgctggctgtcatgaaagcagatcagattttctgggaacatgaaaaggagaaaaaatgcaaagctgataaagaacatcaagaggttcaagatgcccatattcagcaaatggccaaaaataagtttaatgcaaagcaagcaaaacaagcagaattagattattgcagacttactgaagctcttgtggctgaaaaggagaaagaatttcaggactatgccagagaggtaattgaacttgaatcggaaacaacaaataaatatatttaccctcttgtaaaagctgtacaggaaggacctggaggtggccgtggaccagtgtttgtggacagaggtggattaagacccagctatcaggcaaatgatgttactggagtccagctccctttttataactctcagggaccaaaatataattttcaaaagtcaaagagaaggctaggttttacatggtagaaaaaaattatttttaacattgagaagactaagttgtagcatatatgagcttcaaatataaatggatttcagttaataaagctgttcttcatctaagtacaaata

SEQ ID NO: 32789 - DNA, 1799 bp, Homo sapiens
ggcgccacagtcacttttccagatctaggagcaccatggacacctcgtcagagatgctggtacggtttggacggcgctgtggacgggcgaaggaaagtacagttatcatgccaatatcggaacttctcagacgaatatcacttaaactgttccccaaagtagatctccagcaggtcaccataattccacacgatgagtggaaaaggattcaagatagccttgacaggttgacaagagaagcagcatgcctccgtgcagaaagaaaggcaaagaaagaaatgcatttgcgatctcaagaagtggtaaaacactggactaatacatatgcagggatgaaagaacagaaacttgaagccaaaaagaagcgtgatgaagaaatagaggcagaaagacaaattcttgatctggaagaagaaatatacaaacaaggaaaaagaaaaaaggccattgaaaatgcaaagcaatatcaattttaccagacagaaagagtgaaaaactttcattcgggacttcttcttagtagagttatgaaagaacgtgatgcccagattgaattccgaaagagtaagataaaatcagataaaaaatgggaggaacagttgaaactcaacattgaaaaagcttttaaagaagaacaagaaaaagcagaaaaacgacacagagaaagggtggctcttgccaaagatcatctaaaacaaataaaggaacatgaggaagaagaggaaagaaggaaaaaatatgaagaaaaagatgctgaggaaataaagcgacagaatgcattatatgaaattgaaatgagaaaaaaactagaaaagaaaagagaagagatgcatgaaagcaggagacggtttcttgaacatatgcaggataaacatattatcaaagctgtagaacagcagcagcaagaggaagaagatgaaaagatgagaaaattcatcaaagcaaaaaagcgtcttatacaaatggggaaagaaaaagaggctgaaacacacaggcttatggagaaacgaagagaaagaatacataacttcctgagtgaactgttgaaagagaaacttgacaatgaagatatgattattgctagagatattgcagaagctgaggctgaatgggaaaaaagagaaagagaaaaagatgaaaaaaacaaagcagaattaaaaacaattgcagaatatcgagccattgtgatgaaaaataaagaggaagaagaaagacaaagaaaaatagaggctaaagaacaattgctggctgtcatgaaagcagatcagattttctgggaacatgaaaaggagaaaaaatgcaaagctgataaagaacatcaagaggttcaagatgcccatattcagcaaatggccaaaaataagtttaatgcaaagcaagcaaaacaagcagaattagattattgcagacttactgaagctcttgtggctgaaaaggagaaagaatttcaggactatgccagagaggtaattgaacttgaatcggaaacaacaaataaatatatttaccctcttgtaaaagctgtacaggaaggacctggaggtggccgtggaccagtgtttgtggacagaggtggattaagacccagctatcaggcaaatgatgttactggagtccagctccctttttataactctcagggaccaaaatataattttcaaaagtcaaagagaaggctaggttttacatggtagaaaaaaattatttttaacattgagaagactaagttgtagcatatatgagcttcaaatataaatggatttcagttaataaagctgttcttcatctaagtacaaata

SEQ ID NO: 32790 - DNA, 1257 bp, Homo sapiens
ggcgccacagtcacttttccagatctaggagcaccatggacacctcgtcagagatgctggtacggtttggacggcgctgtggacgggcgaaggaaagtacagaaataagaaactctgaagaagatcaagttctctatctgcctcttctacctagcaaagtagatctccagcaggtcaccataattccacacgatgagtggaaaaggattcaagatagccttgacaggttgacaagagaagcagcatgcctccgtgcagaaagaaaggcaaagaaagaaatgcatttgcgatctcaagaagtggtaaaacactggactaatacatatgcagggatgaaagaacagaaacttgaagccaaaaagaagcgtgatgaagaaatagaggcagaaagacaaattcttgatctggaagaagaaatatacaaacaaggaaaaagaaaaaaggccattgaaaatgcaaagcaatatcaattttaccagacagaaagagtgaaaaactttcattcgggacttcttcttagtagagttatgaaagaacgtgatgcccagattgaattccgaaagagtaagataaaatcagataaaaaatgggaggaacagttgaaactcaacattgaaaaagcttttaaagaagaacaagaaaaagcagaaaaacgacacagagaaagggtggctcttgccaaagatcatctaaaacaaataaaggaacatgaggaagaagaggaaagaaggaaaaaatatgaagaaaaagatgctgaggaaataaagcgacagaatgcattatatgaaattgaaatgagaaaaaaactagaaaagaaaagagaagagatgcatgaaagcaggagacggtttcttgaacatatgcaggataaacatattatcaaagctgtagaacagcagcagcaagaggaagaagatgaaaagatgagaaaattcatcaaagcaaaaaagcgtcttatacaaatggggaaagaaaaagaggctgaaacacacaggcttatggagaaacgaagagaaagaatacataacttcctgagtgaactgttgaaagagaaacttgacaatgaagatatgattattgctagagatattgcagaagctgaggctgaatgggaaaaaagagaaagagaaaaagatgaaaaaaacaaagcagaattaaaaacaattgcagaatatcgagccattgtgatgaaaataaatgaagaggcgcccgctcctttaagagagggaaatcctgaacctaggtcactgaccgctg

SEQ ID NO: 32791 - DNA, 350 bp, Homo sapiens
  misc_feature (347)..(348): n is a, c, g, or t
caagtgtgtgttttaaagcacttaaaatgtttattttttaataacttttttctagactcttacttataggattcaattggactgcaaacattttaaaatttataatttaaatgtaaatttcagcttcaccctgtctgaataatcacagattgcatataagaagattcaaattaatgaggttttcttttctaagaactactaagctaatataagaaaaatgtatacatagtataaattaaaagaacatacgggtttggtttttttttttttttgagacggagtctcactctgttgcccactgcactccagcctggtgacagagggagaatcagtctaaaaaaaaaaannag

SEQ ID NO: 32792 - DNA, 867 bp, Homo sapiens
cctcatgaaagctcaatattcatttaccatatctttgataaaaatgacaggaaaggtctgtgctgttgtggaccttccattttaatacttactgagggagtgcatagattacaaaacaccaagtaaataaaaaagataattacagagtatgatatgtgtcatgaaagaaataaacgggactaagaagaaacaatatgttaggtgttttgggaagaagaaggctgcatttaaactaagacctaaaggatgagaaagagccagccatcttcaaagtgcatttaacaggcagagggaaaggcaagccaaaagtccctcaggagaaaatactttaaaaccagtatttcagcaaaagaacattatatcaaattaaacattttagttagaaccctcaattatctaatttaaaggataagagtttggggtattataaaattcaaggaaaattaaataggaaagtggtctatggaaaaaaatagaaatgtcacttctataacagtcagactaatatttgccttttctttaatcatgtcaaaatttactatgtgtggtaacaacatatttatgacagatcgaaagaattccttgggataacattatttttcaaggcttcctgaaaaaggcatggatgtacggaaacccaggggtctagaggttgcagtgggaaagtatctaagggaagagaaaacctagtttgacctggaacattgattaaaaggagatgctatcttgagcagctaatgaggattttttaattggaaaaaatcctagataatgtagaaacggaatgattggcctattttaccagccctctctaccagaatagcctccaagtaaacttccaaagttaaataacacaaaactctatct

SEQ ID NO: 32793 - DNA, 234 bp, Homo sapiens
tttaattccagtaaaatatacaaacttttctgtggtatagctctatttttcctctcttttgtgctaaaattgtcatatatatgtgtatatatgtatatatctacaaatacataaaataaacccaccaatacagtagtaaaattgtttcccttaggatccattgatagatatggaattccatatatatattttatatatatatatattttatatatatatatattttatatatat

SEQ ID NO: 32794 - DNA, 416 bp, Homo sapiens
taaggacgggaccttttgtccccaagaggcagcctggtgtgatggctgccagggtcttagctgtctgacggggcgcttttcaaatcccagggtctttccaaaggtggatgctgggcccagcccacctcccagggaagccctaggaccccatggcccctgggtggggcgggggatgtcactggccaggcagcaccctgagccaggtgacacatctgtggaggctgtctgtctctggtgtctgctgcatggcccctgaagcctccaggggtgaggcggaaggcgagggaggaggagggttgtgggcatcttgcaggtgaaggtgttgggggggcttggtgggaggagggcaggggaggacagggaaaggttcagagggaagggaccgcctggaccctccagagcaggggtgtgggagg

SEQ ID NO: 32795 - DNA, 359 bp, Homo sapiens
ctttaaggttcctagagtggtggttcttacaaaccacactccctttgcactaagtcaaaatgtgtattagttgctgcgtttagaagttattagatatcttcctgcattcacagaatcatttttaagttacaatattcagttaacaatattatttttccatttgaaaagtctaataatattattcaatggggcccttcctgttataagaaaatagctgtcttatgtgtagacttcagtaacaagatgttcccacatataaggacgatgtgtaaatgtgtggcttagcttatgtaagaggggagccatcaacgtttggtattctaggttatgtcaatctaaagatacttgggtgatggaga

SEQ ID NO: 32796 - DNA, 504 bp, Homo sapiens
ctgccttctagcaagagaaagatagatggtcctcaaaatcctaatttttctggaacctattggagagctaatgctgcaggacaacaagtagcctggcatctgaggaaagacaggtgcctctgcggacagatagagaacaagcatggattcacctgtgtaagagcataagagtaagagaaggccaccatacaagtgaataaaaagaagtcacagtgacttttaattaattttcaaagactgcttctctgatactgtgagagtatggaagctatgaagacagccagttgcaggcttttctccatagacttcactatgtgctgatgaaaaaagtttattggcagggcaggtactaatatagactactttggagatgcagcctgaagaagaggtgcatccactgctgtaggaaacacaggaacccatctttggtttcttctcacataaggaaaaaagacttttaagatgctggggaatagcagaaagctcttggcccagtgcaaggag

SEQ ID NO: 32797 - DNA, 292 bp, Homo sapiens
taggtagaatcatgtcatgttccaaatttcttgcttatcctcagcaacaatatccatgatgatcatagcttgatgttttcactatatgtttcctaaccgtttaaaaataaacacgtatgcatgtggaaggatgaacaaagctccactttgaagctttttctgtttaagcttagaaattgctagcagcacatgtatctatcttgggctggcaaacagcttcaatcaaaggatggcaaattttaacagtcctttcaaacatcaaagctgtcctttggattttcaaatgttggca

SEQ ID NO: 32798 - DNA, 95 bp, Homo sapiens
cccagcactagattctagagaaagtggtgaacgaaataatctacagtatagtgcacgacctgaccagcttcccaagatgtggagatggcaggcat

SEQ ID NO: 32799 - DNA, 417 bp, Homo sapiens
atggaggtggagctgatgacatcccacgaggtgcaggctgctgggaggcaggcacactggaccagcggagagggatccgtacgtagcaaactgtgcccatagtgagcaaacagccttgagccaacagcaacagcactgctgggcacagagggtaaaaataacaactccctactggggttgagtctgccagaccctggcaaagttcatttctttcaataaatccagcagcgtcccctttgataaatactgtcaaagctggaacatgtgatgctaacaaaatatggttttaatttggggcccactgcgctcatggttaaatactgcatgtgtgtatacacaagcagactcacagcgggccaagttaatatgcctgggctgagaatggctaaacccataaggattcagttatacagattt

SEQ ID NO: 32800 - DNA, 394 bp, Homo sapiens
ttccaagtccatttcctggaggtaaacattccttggtgggtgtgctttggtctgcaaattgactgtcaattctcagaagagatctgtcttgctgcacatagttagaagaacgtgccctgcagggaatgtctagtgagtgggggtgaaaggttatatttgcatttatgaagggctaagcaggaaacagggaacaaaaggaaaggggagataagagaaaataataataaaaaaatagtaactcattccctgtttcttagaaaaaatggggcactctgttacaaacccaggaattcaaggctgtagtgagttatgatttgccactgtactacatacctcctaagtgaaggattgagactgtgtatctaaaaaacccaaatgcaaataacacacacac

SEQ ID NO: 32801 - DNA, 202 bp, Homo sapiens
ttccaagtccatttcctggaggtaaacattccttggtgggtgtgctttggtctgcaaattgactgtcaattctcagaagagatctgtcttgctgcacatagttagaagaacgtgccctgcagggaatgtctagtgagtgggggtgaaaggttatatttgcatttatgaagggctgtcgggctagtcgggggggtaccgagct

SEQ ID NO: 32802 - DNA, 453 bp, Homo sapiens
gatgtgtaagttgcccaggtttaccagcccaggaacctacttcattaatcaagagccttcatccttgacagtattcagattaaatagaagatatctattatattttggtattataagagtattccttatcagaaatgtttgagactacaggtgttttgcattttggatttctttcagattttggaatatttgcattatatatttgctggttgaacatccatatctgaaatctgacatgctccattgagcatttcctttgagcaccatgttgatttacaggaatcatttataggaattgataatttctttctctccaagagatggcagcatttcagtttgaaaaacctgacatttgttgtgtttcataattgattcatcaatttttctaaagctagggcaaatccatgttttttattttattttatttttttaggagcagaggtttaataggca

SEQ ID NO: 32803 - DNA, 461 bp, Homo sapiens
aggctcaagccaccctcagaggctgcactcagaaagaagcacgctgaagacccatacatgcaatgcttggttctggaagcttgctcaggaattcagatgcagtgggagacaaaaaggaatggaatcctgctgaataactgggcaggaagtgatcccagaatatgctagcttccctccctctgagtctaaagatctagtaaggagcccacccttggatcttggagagagctcccttttaatatcgggacacaaaccgacattttgagtaaacctcatagtcgaataccacggagtactgtttgtgacaaacaggaagtcattaattctttattatatttttgctctaccgaaagctgttgaccaaaccacctggcttctccgagaaaacccttatctgctacatccaggaccaagcagctggatggtttattgaaaatgccaaagggatcaatcataaaacg

SEQ ID NO: 32804 - DNA, 528 bp, Homo sapiens
tgcaatggcactgtatcgactcagtacaacctctgcttcccaggttcaagcgactcctctgcctccacctcccgagtagccaccatacctggctaattcttatattttaatagagacagggtttcaccatattggtcaggctggtctcgaactcctgacctcaggtgatctgcctgcgtcggcctcccaaggtgctgggattacaggtgtgagccaccatgcctggccgaggtgattgcactttaaagatttcttcgttcatagtgctggcaaaaaattttttactgaatgactgatacaaatcttggaacctgtgtttggatgacaagattaattcataatttttgcagaaaataaatatagcatagtgctcatgtacaggttaacctcaagatcaaagaatttgggccagttgtagtaagtcacacctttaatcccagtactttgggagcctgaggcaggaggattgcttgagccaaggagttcgagaccagcctgggcaacatagtgagacctgtctctttttaa

SEQ ID NO: 32805 - DNA, 537 bp, Homo sapiens
atgagacttctcatcctggccctccttggcatctgctctctcactgcatacattgtggaaggtgtagggagtgaagtctcacataggaggacctgtgtgagcctcactacccagcgactgccagttagcagaatcaagacctacaccatcacggaaggctccttgagagcagtaatttttattaccaaacgtggcctaaaagtctgtgctgatccacaagccacgtgggtgagagacgtggtcaggagcatggacaggaaatccaacaccagaaataacatgatccagaccaagccaacaggaacccagcaatcgaccaatacagctgtgaccctgactggctagtagtctctggcaccctgtccgtctccagccagccagctcatttcactttacaccctcatggactgagattatactcaccttttatgaaagcactgcatgaataaaattattcctttgtatttttacttttaaatgtcttctgtattcacttatatgttctaattaataaattatttattattaagaaaagtt

SEQ ID NO: 32806 - DNA, 557 bp, Homo sapiens
tactactactaaattcgcggccgcgtcgacatatttgaaaataagctgcagaaaacatgacatttcatttgtaaatatttcaacacacatttcctaaagataaaacaaaaaatatatataaccacaatattgtaatgacacctaagaaaaaaatacagttcatattttaaattccataataactaaggaggctggtaagaggattgcttcagggctgggcacggtggctcacgcctgtaatcccagcactttgggaggtcgaggtgggggatcatgaggtcaggagattgagaccatcctagctaacacagtgaaaccccgtctccactaaaaatacaaaaaattagccgggcaaggttgtgagcgcctgtagtcccagctacttgggaggctgaggcaggagaatggcatgaacccaggaggcacagcttgcagtgagctgaggtcacgccactgcactccagcctggacgacagagcaagactccgttccccccaccccctcccccaaaaaaagaggattgcttcaggcaagggtcttcagactagcctggacaa

SEQ ID NO: 32807 - DNA, 1554 bp, Homo sapiens
taaaggggaggattcctgatctttaggggcgcggcgcgagggcagggagtgggtgtaagagcttctggcctacgtgcggggcggagatgggggcctctgaggcgggtttgagcgagtgtgaccgagtttgtcctcaaagtttgacctgatgtttgggattgttgagtgaatgtgaaactgggtgcgggattgtgtgtgattgtgcctaagagggagatgtaggagaccagcattgaggtataacgtttgagctgcacttcccttgtcgaaagtgctgataattataacggtgccatcttcctggagcgtcttttttacttgaaaattgaaggggtggaaaagctaagtggtgaataattttaaaacgagtttttatataaaagcatttctttttaattggagtggcatgcaaatcaccgtgactttttttttttaattaaacgagagtgtttcgaaggaactttagtttcggggtgcctacttcagactattcaagtccccatctttggggtacttaaatagggctgttaagcaaagccctagactaaacagcattgtacgctttgagaagcaatcccatataacggcgcccaggatgagggagtcaacggttttaggttaggcacagttatcctcattttttgaagaaagcttaattgttgcagtgtttatctatgagtctggactaaatcctaggtgtcttaattccttaatgagtcgaggcgttctcaggttgtatggattttgtgaagtaatggagaatgctactgacgtctccaaagatgcgttttctaaggaaatcaccccgcccccgctgtcgtcattgacatagttttaaattacaaaaagttaaataaagtaattgggtaccaagttaatatctataaataaatagccttctaatttacaaatatcagttagaatacatagttgaagaaaactaatatttacaatagcagtaaaaagataaagtattgtggaagaaacttaaaggttcagaactattaggaaagaactttaaaatactactaaggggcataacaaatgtgaacaaataaatataccatgtgacattaagaagtgtgcgcaaacttaagtgaatgtattaatttactgtgatcttggtcgggtgcggtggctcatgcctgtaatcctagcactttgggaggccgagatgggcggattacctgagatcaggagttcgagaggagcctggccaacatggtgaaaccctgtctctactaaaaaaaaataaaataaaaaaatacaaaaactctccggggtcttttctttgttccgggtggggggaaaaagaaggttatgtgaaagggccccttggttccttatcttgtttttcctgaccccagtttttttgtttccaaggggggaaaatttctgcgcggttccccctaataggaggagtccgtaattaattttccgaataaagcccgggtttaaccctgtctttttgattctccggaaaacgcacagaacaacgagcaaacacagagaaaacaaaggacagcgaacaaacaaacaaagcaacgaaaccag

SEQ ID NO: 32808 - DNA, 384 bp, Homo sapiens
gcttgtctcgaactcctgacctcaggtgatctgcccacctcagccttctgaagttctgggattacaggcatgagccactgcgccggcctgctttaccatcttggctcatgtgcatttattgaatgcttactgtgtgcccaacactgtatatgtgacaacatacatgaaagtaaatattaactgatagcatatatttataacatatattacaatacgtaatatatgcaaataaacgaaactgcggtgaaatgtcagttattattagtaaaaattagttcttcttttcatctgtatgagacatgatgttccttcctgcacaggggtaggaggtcaggaccttcggtctctgcctgccccgtcggccccctgtgtttggcctgagtg

SEQ ID NO: 32809 - DNA, 1010 bp, Homo sapiens
atcctgttttttatgagatacctcagtgaaaaaacattcatagcattcttattattgaagtcaaaagatgacacagatgaaataaagtactgactctaagcctaaaaatgcctaacttacaactctaacatgagcaaaccatcatcagttatattaggttaatatatggtataagtagtatggttctactgttttgttttaatttgcaaattattttggctttgcaatgatataagaattataagcctgttctagagaagtaccatgcaacattgtacctatagttaacaatatggttaacaattttaacaatttaaagtgtattgtacactttaaaatatgccaacagggtggatttcatgttaagtgttcttaccacagttttaaaaagaattattagcatgaaatgtttacatatctgggtttctattttgtagatatgtaagtaacattgtaataaaaacactgtaactctccaatacaaaaagcagcttcctacacaatgcagccccatacccatacccaacccattgacccatcaagccagcacccatcctttcttggcactctgtatctcagtacacattctaccttcaaaaacagctaagtcaaacgtgtcaaaatagctatttcctcttgagtttgagcatctgcagttgcccagccccaattctttatttggaaataagtattaggagaaacatatctagcatagtgatattgatttgtaatttcctcaaatagacattcactttagatgactacaaaagctaaatagagctcaggagctcgagaccatcctgggcaacataatgaaacaccatctcttaaaaaaaaaaatacaaaagttagctgggtgtggtggtgtgcacccatagtcccagctactcaggaggctgaggtgggacaattgcttgagcctgggaggtcaaggctgcagtgagctgtgatcacaccactgcattctggcctgggtgacagagttagactgtgtctcaaaaaaaaaaaaa

SEQ ID NO: 32810 - DNA, 630 bp, Homo sapiens
taatttacctactgaagcatagtcagtagccactgtagcatctgaagaacatatgatggacacaccactcccacactcagcacccagataagcaaggcaggcagcaatgcagatgagctatagttatcccaggaaatcactttgacttgtaaagtgtgaaaaggactggccttcacctatcattctttctatagcagagctccctaaagctcagaaagccacagctggctgggatgtcatggctccacctattataatcccaccactttggaagacagaggcgggtgggtcacttaagcccaggagttcatcactgagcccaggggtttgagaccagcctgggcaacatggcaaagccccgtctccacacacacacccacacaaatagaaaaaaatttagtcgggaatggtggcacacacctatagtcccagctactcgggaagctgaggtgggagggtcacctgagcccaggagtttgacgctgcagtgagccttgatgacagcactgcactccagcctgggcaacagagtgagaccttgtctccaggaaaaaaaaaaaagagaaagccatccccttccttgacatcatctgtaatgagtaaacagacattaaaacagtaagagtaaac

SEQ ID NO: 32811 - DNA, 805 bp, Homo sapiens
taatttacctactgaagcatagtcagtagccactgtagcatctgaagaacatatgatggacacaccactcccacactcagcacccagataagcaaggcaggcagcaatgcagatgagctatagttatcccaggaaatcactttgacttgtaaagtgtgaaaaggactggccttcacctatcattctttctatagcagagctccctaaagctcagaaagccacagctggctgggatgtcatggctccacctattataatcccaccactttggaagacagaggcgggtgggtcacttaagcccaggagttcatcactgagcccaggggtttgagaccagcctgggcaacatggcaaagccccgtctccacacacacacccacacaaatagaaaaaaatttagtcgggaatggtggcacacacctatagtcccagctactcgggaagctgaggtgggagggtcacctgagcccaggatgcaatggcacgatctcggctcattgcaacctctgcttctcaggttcaagcaattttcctgcctcagcctcccaagtagctgggactacaggtgcgtgccaccatgcctggctaattttttgtatttttagtagacatgttggccagactggtctcgatttcctgacgtcaggtgatccatttgcctcggcctcccaaagtgctgggattacaggcgtgagctgccacgcccggtcatgtaacagttttaaaaagcccatacggtcatactgaatatagacatagacagagttaatcaaatacatcagagactgagtttgtgaagttaagg

SEQ ID NO: 32812 - DNA, 322 bp, Homo sapiens
cttcctttccacatgtctcaccagaaaaacagcaatggtgaaaagtcaactctgtttttaatgggccactttgtatattttaactgttaaaataatccaagaagatagtagtcatatacgaagatcctttagatataatgtgtaggaccagcattaatttaatcaaccaagtctcctctcattgaattgttaattcataattacaaagatgacattacagtaaattaagaaatactgtaatttcattctctccaaaaagtatacattgaagtttggtgaatactgttatattttcaactagtaaatcagtgtgccaattctg

SEQ ID NO: 32813 - DNA, 87 bp, Homo sapiens
tttaatatagccagatccagtacaggattttcgcttgttacaagagctagggaaatgacagtggtatctaaatgtagcaaagttgtt

SEQ ID NO: 32814 - DNA, 1240 bp, Homo sapiens
  misc_feature (1240)..(1240): n is a, c, g, or t
tatagcttattttacaattgcctgaatcctcttttttatggctttctggggaaaaatttaaaaatattttctccagcttctaaaatatatcccccaaaagccaaatcccactcaaacctttcaacaaaaatgagcacgctttcctaccgcccctcagataatgtaagctcatccaccaagaagcctgcaccatgttttgaggttgagtgacatgttcgaaacctgtccataaagtaattttgtgaaagaaggagcaagagaacattcctctgcagcacttcactaccaaatgagcattagctacttttcagaattgaaggagaaaatgcattatgtggactgaaccgacttttctaaagctctgaacaaaagcttttctttccttttgcaacaagacaaagcaaagccacattttgcattagacagatgacggctgctcgaagaacaatgtcagaaactcgatgaatgtgttgatttgagaaattttactgacagaaatgcaatctccctagcctgcttttgtcctgttattttttatttccacataaaggtatttagaatatattaaatcgttagaggagcaacaggagatgagagttccagattgttctgtccagtttccaaagggcagtaaagttttcgtgccggttttcagctattagcaactgtgctacacttgcacctggtactgcacattttgtacaaagatatgctaagcagtagtcgtcaagttgcagatctttttgtgaaattcaacctgtgtcttataggtttacactgccaaaacaatgcccgtaagatggcttatttgtataatggtgttactaaagtcacatataaaagttaaactacttgtaaaggtgctgcactggtcccaagtagtagtgtcttcctagtatattagtttgatttaatatctgagaagtgtatatagtttgtggtaaaaagattatatatcataaagtatgccttcctgtttaaaaaaagtatatattctacacatatatatatatgtatatctatatctctaaactgctgttaattgattaaaatctggcaaagttatatttactttaaaataaaataattttattgcaaaaaaaaaaaaaaaaaaaatttgggggggcgggccgaaaattttaaaacctgggggcggggccaggaagaaaggaagggcggaacggggaagggggtttccaaaaagggggccgggtgaacgagggtgggcgtaaggcgctan

SEQ ID NO: 32815 - DNA, 1015 bp, Homo sapiens
tatagcttattttacaattgcctgaatcctcttttttatggctttctggggaaaaatttaaaaatattttctccagcttctaaaatatatcccccaaaagccaaatcccactcaaacctttcaacaaaaatgagcacgctttcctaccgcccctcagataatgtaagctcatccaccaagaagcctgcaccatgttttgaggttgagtgacatgttcgaaacctgtccataaagtaattttgtgaaagaaggagcaagagaacattcctctgcagcacttcactaccaaatgagcattagctacttttcagaattgaaggagaaaatgcattatgtggactgaaccgacttttctaaagctctgaacaaaagcttttctttccttttgcaacaagacaaagcaaagccacattttgcattagacagatgacggctgctcgaagaacaatgtcagaaactcgatgaatgtgttgatttgagaaattttactgacagaaatgcaatctccctagcctgcttttgtcctgttattttttatttccacataaaggtatttagaatatattaaatcgttagaggagcaacaggagatgagagttccagattgttctgtccagtttccaaagggcagtaaagttttcgtgccggttttcagctattagcaactgtgctacacttgcacctggtactgcacattttgtacaaagatatgctaagcagtagtcgtcaagttgcagatctttttgtgaaattcaacctgtgtcttataggtttacactgccaaaacaatgcccgtaagatggcttatttgtataatggtgttactaaagtcacatataaaagttaaactacttgtaaaggtgctgcactggtcccaagtagtagtgtcttcctagtatattagtttgatttaatatctgagaagtgtatatagtttgtggtaaaaagattatatatcataaagtatgccttccctcgtgccgaattcctgcagccgggcgcatccactagttct

SEQ ID NO: 32816 - DNA, 1186 bp, Homo sapiens
  misc_feature (1186)..(1186): n is a, c, g, or t
tatagcttattttacaattgcctgaatcctcttttttatggctttctggggaaaaatttaaaaatattttctccagcttctaaaatatatcccccaaaagccaaatcccactcaaacctttcaacaaaaatgagcacgctttcctaccgcccctcagataatgtaagctcatccaccaagaagcctgcaccatgttttgaggttgagtgacatgttcgaaacctgtccataaagtaattttgtgaaagaaggagcaagagaacattcctctgcagcacttcactaccaaatgagcattagctacttttcagaattgaaggagaaaatgcattatgtggactgaaccgacttttctaaagctctgaacaaaagcttttctttccttttgcaacaagacaaagcaaagccacattttgcattagacagatgacggctgctcgaagaacaatgtcagaaactcgatgaatgtgttgatttgagaaattttactgacagaaatgcaatctccctagcctgcttttgtcctgttattttttatttccacataaaggtatttagaatatattaaatcgttagaggagcaacacgtgccggttttcagctattagcaactgtgctacacttgcacctggtactgcacattttgtacaaagatatgctaagcagtagtcgtcaagttgcagatctttttgtgaaattcaacctgtgtcttataggtttacactgccaaaacaatgcccgtaagatggcttatttgtataatggtgttactaaagtcacatataaaagttaaactacttgtaaaggtgctgcactggtcccaagtagtagtgtcttcctagtatattagtttgatttaatatctgagaagtgtatatagtttgtggtaaaaagattatatatcataaagtatgccttcctgtttaaaaaaagtatatattctacacatatatatatatgtatatctatatctctaaactgctgttaattgattaaaatctggcaaagttatatttactttaaaataaaataattttattgcaaaaaaaaaaaaaaaaaaaatttgggggggcgggccgaaaattttaaaacctgggggcggggccaggaagaaaggaagggcggaacggggaagggggtttccaaaaagggggccgggtgaacgagggtgggcgtaaggcgctan

SEQ ID NO: 32817 - DNA, 240 bp, Homo sapiens
tattagtttgatttaatatctgagaagtgtatatagtttgtggtaaaaagattatatatcataaagtatgccttcctgtttaaaaaaagtatatattctacacatatatatatatgtatatctatatctctaaactgctgttaattgattaaaatctggcaaagttatatttactttaaaataaaataattttattgcaatgtatttatcttcattacttaaaatagatgctaatttatt

SEQ ID NO: 32818 - DNA, 344 bp, Homo sapiens
ttttatttccacataaaggtatttagaatatattaaatcgttagaggagcaacaggagatgagagttccagattgttctgtccagtttccaaagggcagtaaagttttcgtgccggttttcagctattagcaactgtgctacacttgcacctggtactgcacattttgtacaaagatatgctaagcagtagtcgtcaagttgcagatctttttgtgaaattcaacctgtgtcttataggtttacactgccaaaacaatgcccgtaagatggcttatttgtataatggtgttactaaagtcacatataaaagttaaactacttgtaaaggtgctgcactggtccc

SEQ ID NO: 32819 - DNA, 419 bp, Homo sapiens
tctgagatgcagtctcactctggcacccaggctggagtaaagcggcatgatcttggctcactgcaacctcgcctcctgggttcaagcgattctcctttctcagcctcccaagtagctgggattataggtgcgcaccaccacacctggctaattttgtgtttttggtagagatggagtttcaccatgttagccaggctagtcttgaactcctgacctcaagtgatctgcccgccttggcctcccaaagtgctgggattacaggtgtgagccactgcacccgtccagcaatggccctgctatgacctttcacagttataatatgcaatatttttattgacattcccagtccttaaagacctcagtgcatctccacctgggctcccttttccttgtattcacaaagtcatgacaacaaattg

SEQ ID NO: 32820 - DNA, 338 bp, Homo sapiens
acacagcacctttagaccaactcagtaacatcaaacccatatctaatgcccattccacaccaagcatgtgattggaaccttgtatactgtcttgctcaggttgtccgtggtctctcacctcatggagctcacagcctggctcataaagaaaaccccacatctgcatactcaatatcctgatccgtgtgaggggccttgcaggccattcctctcagacatttccaaagcaacaggaatcacagcagtgtccatgggtatggcaaggaagaccactggtctcatgaccactcttgggagtgggggaagtaaccccaatgcaaaggcttccctcaagatca

SEQ ID NO: 32821 - DNA, 790 bp, Homo sapiens
cttaatgattagtgacgttgaacatcttttcatgtacttcttggagattggtatatcttccttggagaaatgtctatttaagtcttttgcccatttttgaattgtgttgtttgtttctttgttgttgagttttacgagttctctatatattctgaatattaatctcttattatacatatgattttcagatatttcctcccattctgtgggttatcttttcacccctttgatagtgtctcttgatgcacaaatttaaaacattttaatgaaatcctgtttgtttcttcttttgttgcttttgcctttggtatcatatccaagaattcattgcagatccactatcatgaagcttttgtcgtatgttttattctaagaattttataattttaagtgttacatttaggtctttgatttattttgtgtatttgtatgtggtgttaggtaagagtccatctttactcttttgcctgtacataatccagttttcccagcaccatttgttgaaaagactgtcctttactcattgagtagtcttggcacccttgtaaaaaatcatttttccatacattgtttctgggccctctattctgttcccttggtctgtatctttatgtgagtaacacactattttgattactatagctttgtaatatgttttgaaatcaggaaatgtgagtacaccagcgtttttcttctttttcaagattattttggctgttcagggtcccttgagatttcatgttagttttaggacgtgtttttctatttctgcaaaaaaaaaaaaaaaaaa

SEQ ID NO: 32822 - DNA, 640 bp, Homo sapiens
acagaacaaaggtacttgggaacagaactggaatataaagatcttgtttcttcatatttcaaacaccaaatagtattagtctactactaatagtgttagaacaccagatacaaagctaaaatattcctaagtagacttgatcctcaagtgaaagaaatctaatgtctaagctacctaatgttttcctttctaacccacagcttgttacaataccagaaatattaaaaaaccttgtgtagataggagaactaaaatgaggaataggccgggcatggtggctcatgcctataatcccagaagtttagaaggccaaggcaggagcatctcttgagcccaggagttcaagactagcctgggcaacataatgagaccctgtctctacaaaaaaatcaaaaaaattaggcatggtggcatgtgcctgtagtcccaggtacttgcgaggctgaagtgggaggatcacttgagcccaggaggtagaggctgcagtgagccatgatcgtaccactgcactccagccagggtgacagagcgagaccctaactcaaaaagaagtaaaaaatgaaaaaaaataaaataaggaacaattactttatataagaaaaatttgcaactttcagatataagttggaaaaataagaga

SEQ ID NO: 32823 - DNA, 384 bp, Homo sapiens
tttttttcaactggacacaggctctcactctgtcactcacgctgtagtgcagtggtgtaatcatagctcactgcaccctcaaacacctgggctcaagtgatcagtcatcccaccacagcctcccaagtagctgggactagggagcacgtcaccacacccagctaatttttttttggtagagatgggattgcactacattgcccaggctggtctcaaactcctgggctcaagtgatcctcccaccttggcctcccaaagtgctgggattacaggtgtgagccactgagcctagtcaacataaggcattgataaataaaggatgtatgttacaatttctacaggtattgataatagtaaaagcttataactttcaaactaacaaga

SEQ ID NO: 32824 - DNA, 647 bp, Homo sapiens
ttgtgaggctgcatcaatgatgcatatttcccagtctcactgacttcttatggttaggtcagtatatgtgcgggggaaaagaaagagagatcagactgttacttgtggggaaaagagagatcagactgttactgtgtctatgtagaaaaaggaagacacaagaaactccattttgatctgtacttagaaaaattcttctgctttgagatgctgttaatctgtaaccttagccccaaccctgtgcttgcaaaaacatgtgctgtgttgactcaaggtttaatggatttagggctgtgcaggatgtgctttgttaaaaatgtgtttgcaggcagtatgcttggtaaaaggcatcgccatgctccattctcggttacccagggacacagtgcactgtggaaggccgcaggcacctctgcccaagaaagcccgggatattgtccaaggtttccccccactgagacagcctgagatatggccttgtgggaagggaaagaccttactgtcccccagcctgacacccgtaaagggtctgtgctgaggaggattagtgaaagaggaaggcctctttgcagttgagataagaggaaagcatctgtctcctgctcatccctgggaatggaatgtcttggtgtaaaacccgattgcac

SEQ ID NO: 32825 - DNA, 669 bp, Homo sapiens
tggggaaatcaggaagcctcttaaaggagaactaggccttcaccaaatggggaagtgggatagggttctaacagtatgcaactgcgctctgaaaggattacagagggactgccctgagaaaaggcttgctttcatgttgagcaaagttaaagcaagaggattgcattttaaatacttaaacaaaaagttaatttgttgttttcttttttttttttttttcatttcttctctctcattacttacttcttcagggcttggtaagtaccgttttaaggttaaatgtaatacgctgtagacttctagtttaagacgcagccttgcccctacaaatgatttgctggttttgctttttgtttttgagactcaagaaagacaaggaagaaccagtgtttgagaatacgttgacaagactttaccaccctgaagcatttttattagttgaaatgcagaaactactggtggccaacagttgaaaaaggagtcactagtcagcaaaacttacagatacttttttttaaaaacgttgttaccttcacatccccattatgtggcttttggttttttttcactggcctaggcacttgccttttactcttttgtttttggttttggttttttgagacagagcctgggcaacacagggagactccatctcaaaaattaaaaaaa

SEQ ID NO: 32826 - DNA, 351 bp, Homo sapiens
gcagaagagtcttgctctgtcgcccaggctggagtacgctggcaagatctcggctcactgcaagctccacctcctgggttcacgccatcctcctgcctcagcctcccgagtagctgggactacaggtgcccgccaccacggccggctaatttttttttttttgtatttttagtagagacaggatttcactgtgttagccaggatggtctcgatctcctgacctcgtgatctgcccgcctcggcctcccaaagtgctgggattacaggcgtgcgaccgcacccggcctaggggtgcaatcattcttatatttgctggagatgtagccagggctcaggagctgagcagagccc

SEQ ID NO: 32827 - DNA, 623 bp, Homo sapiens
gacacatgtggaggggaacaacacacactggggcctgtgtaaaagatatttaaaagcattttcagatgatacacctaggtatagttttttttgacatttatcctttttggtgttctttgagcttcttggatttatggtttggtgtctgacatttattctcagtcattattgtttcaaatatttcttctgttcttatctctttttcttcatcttctgatattcccattatgcgtatgttataccttttagagttgtaccacaatctttgggtattctgttctgtgtgtgtgtgtgtgtgtgtgtgttttatctttgttttctggttttggaggtttctattgatttacctcaagcttagagatctttcctcagctagtgttcaatctatgaataagctcatcaaaggcactcttcatttctgctattgtgtttttgatcactagcatttcttttggttccttcttaagatttccatgtctttgcttacattctccatctgttgttgcatggtgtctactttatccattagagcccttggcatattaatcatatttattttaagtttccagtttgataatttcaacatccctgccatatctggttctgatgcttgtgtatctctt

SEQ ID NO: 32828 - DNA, 2931 bp, Homo sapiens
  misc_feature (1316)..(1317): n is a, c, g, or t
  misc_feature (2416)..(2416): n is a, c, g, or t
acagagggcgggtcgcgcgctcggtggccgttgtgcgcgtgtgtggagtgccctgctgcccccagctggaggggaactagtctgctccaggtggcaagctgcgtgagcaagcaagccaacatggaccgcgactcgtaccatcactatttctacgactatgacggcggggaggatttctaccgctccacgacgcccagcgaggacatctggaagaaattcgagttggtgccgccgccctggacttgggtccgcagccgggaacccagccctcagctttggtctcctggaacgtggccggtagggtgcgctggggacgagacggaatcccaggactactggaaagcttgggacgcgaactacgcctccctcatccgccgtgactgcatgtggagcggcttctccacccaggagccgctggagagagcggtgagtgacctgcttgccgttggcgcgccctcgggatactcgcccaaggagttcgccacccccgactacactcccgagctcgaagccggcaacctagcgcccatcttcccctgtttgttgggcgagcccaagatccaggcctgctccaggtctgagagcccaagcgactccgagggtgaagaaatcgacgtgacagtaaagaagaggcagtctttgagtacgcggaagccagtcatcatcgcggtgcgtgcagaccttctggatccccgcatgaatctcttccacatctccatccaccagcaacagcacaactatgctgccccttttcctccagaaagctgcttccaagaaggggctccaaagaggatgcccccaaaagaggctctagagagagaagctccagggggaaaggatgataaggaagatgaagagattgtgagcctcccacctgtagaaagtgaggctgcccagtcctgccagcccaaacccatccattatgatactgagaattggaccaagaagaagtaccacagctacctggagcgcaagagacggaatgatcaacgttcgcggttcttggccctgagggacgaggtacccgccctggccagctgctctagggtttccaaagtaatgatcctagtcaaggccacggaatacttacatgaactggcggaagccgaggagaggatggctacggagaaaaggcagctcgaatgccagcgacggcaattgcagaaaagaattgagtacctcagtagctactgaccaaaaagcctgaccattctgtcttaaaaagacacaagttttctttttgatctccctctcccctttagtaacttgtacatttttgttacagcaggacactctggacagtagattgcagaatnnattgcagccagtgcacaaacaatataaaggcttgcattcttggaaactttgaaacccagctctctctcttccctgacttatgggagtgctttgtgttttctggcacctttggcttctcagcaggcagctgactgaggagacttggggtcttcctggctcactatctccaaagaaaaggctgacagatggtatgcaacaggtggtggatgttgttgggggctccagcctggaggaaatctcacactctacatgaactttaggctaggaaaggatgtctctggggtgatgcaaggacagctgggtgtggacgctctcctgcggctccatttttttccaggagacacacaagctgccttgggtgaaaacaagctcagagacttgatcaacgtggaccattacctcactgtcagacactacagtagctgaggagttggaaaccttacatatatgtatatatatatgtatgtatatatgtatatatgtatatatatatgtatgtatatatgtatatatgtatatatatatgtatgtatatatgtatatatgtatatatatatgtatgtatatatgtatatattatgatgttggctgacccccttcctcccactctcaatgctgtgactcagaacatttaagagaacttcgtctgtaagtaatttgtcttaaagccctctgggctctcttctctgagtgagggaactttctgtcttcacaagggactttgtctcattctgcctctgttatgcaatgggttctacagcaccctttcccgcaggttagaaatatttccctaagacacagggaaatgggtcttagcctggggcctggggaaagttcccaagccctggctcatgaactcaatccctgcccaggtgttttctgaggggcccttgaggccaatcttttctcaagacagtgtgaggcaccttagaagggagaactgtaacactttctctttcgcacctgcctctcatctcaatccttgactgatgaatttgaagttctactagaaccatgaaaacttgttcctttcgtgcatctccaaggagcttgctggctctgcagccacgcttgggccctcgcaccagcctgcaatgantcagatgtctgtcacagaatctgggcctctctgaagttttctggagagctgttgggactcatccagtgctccacaacgtggacttgcctcctggtgtgttttaaaggatcctccaggagctctgcttagccaatcatcatgatggatttttttttttttttttgagacggagtctcactcttgtcgcccaggctggaggttaatggcatgatctcggctcactgcaacctctgcctcccgggttcaagcgattctcctgcctgagccttccgagtagctgggatcgcaggcgcctgccaccacgcctagctaatttctgtatttttagtagagatggggtttcaccacattggccaggctggtcttgacctcctgacctaggtgatccactgcctccatgatagattttgccccagctggactctgcagctccacgtggaatccaggtgctgcctccagtctgggaaagtcaccaacccgcagttgtcatgtgggtaacttctgaaccctaagcc

SEQ ID NO: 32829 - DNA, 348 bp, Homo sapiens
ttgggttgtgttgatcccaggtttctggaaagcttgtccttagtcacttcaaaggattatagtttctactttttgacactcgaagaataatccgttcagcagggcgaagagaaaaccttgctgactacaatcagacaatgttgttaaaagtccttccaataagctgtctcatttaaagctacatgaaacctgaagaaaagggctgataaatttggaacatacggtctttccactgtgtccagcatgggtaacaatgatgccctagtaataccttaaattataaagggatttctccttaggaagatgtttagagctagtggtttccaccattagaatcacccagagagc

SEQ ID NO: 32830 - DNA, 837 bp, Homo sapiens
ataatatcacaggagtatactggataaatcatttgagaagaagctgggacatttgcacgtgttattccctttctggaactttctcccaccacacatctttgtcttgttgatgactttttgtcctttaggcctcaactgtcaacagggatggtctggctagtgctctctactgtaaattcttctagccttgtatagttcttcttagcactcattttatatttatttgagtaattcttcatcctgtgaactccataagataacgaagagttccgttattttttctggacattattgtatcatcactgcctaaagacaatgcttggcatggtgataaatatctgtgattgataaatatttgtttcatgaaggaacctgtgagtgaattgaatttggttggcgacaggaaggccagtacaaagattcctgcctgcagcctcaagtccgaatgctgaaggggccgggtagctaaggtaaatgggtgaagcagactgtgaggaacatgagttgctctgggcaaccagatagaatgttctggacaggtgctcgcttggtggatgttctcttgttccttccgtggaggcggattcttcttactcagggatgtaggcttgaaccgtggtaaatatcaaggactccctgggaagaaaggacttatggagtagagaagactgaggaaacttacactactcttcattgaagtctttctggaatccacagcaatggtgactgaaagaggaaatcaggaggtaaagttagcctgcagtgggttgaggactgagtgggaagtgagaagggaaagccagtgaagggaggctcctcctttgagaggtttgtcta

SEQ ID NO: 32831 - DNA, 468 bp, Homo sapiens
tggcagttctctcttgcaggccactgtgagctggctccagtataccactgctcttagtcttcacctgtttccaaaaacattgtttgggggcgggtttcgtgaggaggcttaaagagccatgagaaagggaggacccagcagtgactccctggctaggggtggggctttgtgttgggcatcagggccctaatgccctgtttacccagtggcccgccagcctgatcctcacagccaaggagcatcctgacctacagtacagcatcagtgtgagcttttgtgtatttgaagatcttccttggttcaggcgctttctgcaagtcactcgaacaccgcttcatctgaccacacccgctcccaatttaaagaagatcgttgatacactgttagccctataactctggcctttttcttttaaaccactctctacaagagatgattatcacttgcatgtgagtttctgcatttctg

SEQ ID NO: 32832 - DNA, 353 bp, Homo sapiens
gagagggcattatttcaggtaaatatcacaaagcccacccttttaaaaactattccttagtactttgcatttattttcaaaataagtaatacacgaatgtggtataaaattcaaatggtgcaaaggatatataaggaaaaactaagtctttcttagtttttctgttcacctcccagtcacctagttcccctcccaggaggcaaccactgttgtagatataaatcatgtataaatagatcctatatatgtatttatatatgtgtatgcatgtattttaaatacaaatgatagcatacgtaatacatatttgattatggccttgcagacttctgtaccaaaacataaaggtctgt

SEQ ID NO: 32833 - DNA, 438 bp, Homo sapiens
tattcttcatgtattttttatctcgactaatgacactatcattcacctagttgtccacttttagctataatttattgaggtataatttatatacagtaaactgtcatttgaagtatataattagatcagttttgacctatatccacctgtgaaaccaccaccacagtcaagatataaaagatttccgtcatccccagaagttttctcatgccactttgcaatgtttatcctctatctacccttgacctagggaaccaagttcattatctacctttagtcactagagattcgtttgcatttctataattttgtataaattgcataatttatataaatttcatataaatacaaaatgttgtattagggttctccagaaaaagagaaccaataagatagcctatctatgtctatacataggcatagatatatatctataaa

SEQ ID NO: 32834 - DNA, 597 bp, Homo sapiens
aggaaaaaattgctttattataaaaagggctttgtgttagataattttgccgaactgtaggcaaatgttttctgagaacgtttaaggtaaactaggctaagccatgatgttcggtaggttagatggattaaatgtatttttgactcatcatttttataactcatggtgcatttattgggatgtaaccccgtcataaactgaggagtatttgtatttagaaatagagctgagtttgacagccaactttgtctgttaggcagtgggtgccaggccagtggtgctgggatttccagtgtcccctgcctccagcagtggacccagctgagcctctgggatgctctgcccctggcaccgaaggctgcttggtgccacaggagaatctgataggagacatccagggctgctgaagtggctggggtgtcagaggcgtttgaattagagcaactccatcttgaataaggactaggtaaaataaggctaagacctactgggctgccttcccagacagttaaggcattctaagtcacagggtgagacaggaggtcggcacaaggtccaggtcataaagaccttgctgataaaacaggttgcagtaaa

SEQ ID NO: 32835 - DNA, 963 bp, Homo sapiens
ttgacttccattcctatttctttctctgattgggaccgaggtttgtccctgttctgcttctgttcatcaccactcttgcttttgtttgtcttctgttcgtcatcagtcttgcctttgttctggctcagagacctctgtccccattccttccccgtccccctcaccagggtaggcctcgggctcccctcctgcctggacaccacagtagggagggcccaggatcctgccttgtcgcccacccagcatgcagcagactaggcttgtctcctgctgtgctgggaagtccttctgctcttggaatcctcccaccccacagagtgtgctctgctggccatattagcctataagctgcacctgcttgccttcccacacagtccactgcagctatgttggtttattctctgctttcccaacttcagatttttgtttataaccgtctgtgccctggtgtgacttcactattttagaaagcagccccctcccgacattacaaataccctcctcttgttccaggtcctccccattctgaccaccctgctgctggaaaaccatgtgtgtcctctggcaggttaaatgcagacagcaatccagtgatataagtttttttaggttcactagatcatatgtcggcttatccctctcaataaatatcagtgccttactcatgcaccagtaattatctgtatagttaatttggcaattcatcatgtactgctttatggcatttattctactcttacattaaatggttaattcttaattttgaagaagttaaatgtcttacaaattgactgaaagcccaaatttgcccttatatttcttcattagggccttaagaattattgaaaatacagaaataagttctagtgtttgatagcatagtagggtgcctatagtaaacagtaatttgttgtgtaattcaaagtaactagaagagaagatttgaaatattcccaacacaaa

SEQ ID NO: 32836 - DNA, 261 bp, Homo sapiens
gctctgcctccactcactcgaagcccctctgcctgcctttagaacctcatagcttccctggcaggccccacaaggagccccagtcttctctgtgcctgcgctccatccaatcccaactcaccatgtttttgtttttgttttgttttgtttgagacggagtctcactcactctgttgcccaggctgaagtgcagtggcacaatctcagctcactgcaacctccacctcccgggttcaagcgattctcctgcctcagcctccc

SEQ ID NO: 32837 - DNA, 585 bp, Homo sapiens
tcctggcttctgcgtccctggaggctccgttcccgtttcgccagctattttgctgcctcggccatctgttccctccctgtcatctcctctcgacatccttcacgacgcctggccctccttctcatctccagcaagtgaaccgctctgtcctttttaaagcctcatcccaaagacacggccagagcttggagttggattcgccccacacaactccccctctttgatgccatctgctttcaactccaccactggccaggggcaaacacctaccccttcccctgccttttcctcctgagacttcttctcaaactcggccaagaagctctcctggcatggacagcgtgtctgctccgggtctctacctggtctccatcaacagagccatgtaaccgcccagagggctccaggtccgcaagctgaggcggaggccagaaactctgaagttcactcctactgtggaggaacgagggctcgtgctgggagtttgggtcatgaacagtttccctgtagaaaatggacctgaacactctgcagtaaggaattgtttcccatgctggcatggtgggaaccgaaccaaaacacatt

SEQ ID NO: 32838 - DNA, 501 bp, Homo sapiens
gaaaaaatgctttccgagacaggcccatggaaggcccaactcaccctctgggacttattcaacttggattcatctgtctgcttttgcctctattttaaccaaaagaccccatgaaggtagggtcttggtatggcctcttcacgactctggacctcagcacacatcaagggcctggcacacagtaggtgctcaataaggacttactgaatggaagccgggtgtggtcgtcacgcctgtcatcccagcactttgggaggccgaggcaagtggatcacgtgaggtcaggagttcaagaccaacctggccaacatggtgaaaccccgtctctaccaaaaatacaaaaattagccggacgtggtggcaggtgcctctagtcccagctacttgggaggctgaggcagatgaattgctcaagcctgggagacgggagatggaggttgcagtgagccgagatcatgccactgtactccagccttggcaacagagtgagactccatctca

SEQ ID NO: 32839 - DNA, 788 bp, Homo sapiens
tagggagccagcccaggagcccagctgctgcagtcagatgctcccaaggacagcagcctgctccttgccatccaccacaaaccctcaccgaaccagtggccaccaccatgacaagggaccagaatggaacctgggagatggagagtaatgaaaactttgagggctacatgaaggccctggatattgattttgccacccgcaagattgcagtacgtctcactcagacgaaggttattgatcaagatggtgataacttcaagacaaaaaccactagcacattccgcaactatgatgtggatttcactgttggagtagagtttgacgagtacacaaagagcctggataaccggcatgttaaggcactggtcacctgggaaggtgatgtccttgtgtgtgtgcaaaagggggagaaggagaaccgcggctggaagcagtggattgagggggacaagctgtacctggagctgacctgtggtgaccaggtgtgccgtcaagtgttcaaaaagaaatgatggcgacgtgggaggcctgccaagcacaagctccccactgcccacactgagtggtctactggctttgagaaacagctgtggggaccttcccactcttgacagagccccattaaggcatctgggtgggttttaaacagaatgcctatgtagcagtgatagacatattcccctcctttgaaacctagcattaaatggaaaaacaaaaattagaagatatagcacgtagagattgttcaataaggaagaaaaaaataaaaattggccttgttggcctca

SEQ ID NO: 32840 - DNA, 747 bp, Homo sapiens
tagggagccagcccaggagcccagctgctgcagtcagatgctcccaaggacagcagcctgctccttgccatccaccacaaaccctcaccgaaccagtggccaccaccatgacaagggaccagaatggaacctgggagatggagagtaatgaaaactttgagggctacatgaaggccctggatattgattttgccacccgcaagattgcagtacgtctcactcagacgaaggttattgatcaagatggtgataacttcaagacaaaaaccactagcacattccgcaactatgatgtggatttcactgttggagtagagtttgacgagtacacaaagagcctggataaccggcatgttaaggcactggtcacctgggaaggtgatgtccttgtgtgtgtgcaaaagggggagaaggagaaccgcggctggaagcagtggattgagggggacaagctgtacctggagctgacctgtggtgaccaggtgtgccgtcaagtgttcaaaaagaaatgatggcgacgtgggaggcctgccaagcacaagctccccactgcccacactgagtggtctactggctttgagaaacagctgtggggaccttcccactcttgacagagccccattaaggcatctgggtgggttttaaacagaatgcctatgtagcagtgatagacatattcccctcctttgaaacctagcattaaatggaaaaacaaaaattactcccatattttgaaaccctttatat

SEQ ID NO: 32841 - DNA, 432 bp, Homo sapiens
aattgagatggagtctcgctctgtcacccatgctggagtgtgctgaggtgtgatcttggcttactgcaacctccgcttcctgggttcaagcgattctcctgcctcagcctcctgaggtctcattgtttatattacatttttgccttgactcttctttgtgaggtaattttctctaatatgaatataggttgggaatgagatcccacaaaactctctcagcacagcaacatatctctgccttctcatcccctgcacccagagagctcagggctgcagaggtaatcaaatgggaactgaaaacgggcttgcaattatacatactgtaggggccaaacctgcttctcaggaaaaacatgtcccccaccccaaataaccaaaaaactcagccatgttgttaattatccaacttgggttttctgtttcattccagga

SEQ ID NO: 32842 - DNA, 427 bp, Homo sapiens
ttgaaaagtgaggaaatcagagcttagaagtgtagtctctctaggctttaagagaagacatcaagattctgaataattaacaaaactggtaagggcagcttaatagatggcacatgtcctgcactcccatgcaaaggtcccagggagcttaggggaaagagggctggatggtctggaccttggatctgaccacatttgtcctcatggccagatgggccacgtggtccaagtaacaaggatgtctatggggagtcctgcgaggaacccaggcagcttctcctgcagacccaggacaagcatggccaagccattccccgtggtcggcgacagctgttggaggaaggagggaggaagaagcgctcattcagatgatgggtgaggagagaatgccagtactggcagaaggggagggaagaatggaattctc

SEQ ID NO: 32843 - DNA, 302 bp, Homo sapiens
gttcatgtgttagttctgtgggcataagctgtgcagtcctcatttacaactcataaaagctacagtgacaggtgctgtagaaaggggatgatagattagctgttgctcatgcgagcaatgaagcagcaagagagagcacattagaccaagcgagcagccagaaacagcaataaaatcattactaaaagagatgatacggttaacatgggaatatatatctttctggcactggcattgtatttactggtgtactacacattcaaatagattgttcaaaagattcatttctggattgagataag

SEQ ID NO: 32844 - DNA, 513 bp, Homo sapiens
cgtcactgctctgggctctgatgagcatgggacggaggcaaagggggagttgatggtgcctcagcacaggcctgcaggtaccccttgttaggaacagcttgggcactggggatgacaggttgatggcagtgagaggcagaaaggctcctgggcttaaagggacaggtccctgccaagccccaccttcaggcctaggactgatggcctgaaacctagggggtcaggctgccagttccctggaccagagtgagaacttaatggggctttttctaggcctgtccatggccagctatggaccaataagcacccacttcctgccctctgaagctcacaaaaagcccagagttagccaaactttggcagacatcccaacaatctgcctgcagggaggagctaggcactgtgggtctcctctcagctgagagctgagcagacatagggatgacctgcctgtggaaaggctcctgagagctgtactgtcactcaataaaacatctctttgtctcacttacc

SEQ ID NO: 32845 - DNA, 532 bp, Homo sapiens
atatagtatcatgaagttatatctttaaactcttagtttgtactatgtggtgtcttatgaaaaccttgatttgtttatacttagtgaatgaaacacttgggtttaaagttctttaactgatgtcacttcttaggctagaaagctgttgaaagaacttagtgttccacccttagaccaaggttcatgtcaccatatttaacagcagctttgtattacggtcaagattgtttgaagaattcagcatacaaacttaatttacagatgcaagcctgcagatggacctccccccccccacttttttgctttagattaggttgtgactggaggaaatttagttttcctttgccttcagttatttgcagctgttcacatttatgatgatgagaatgatgatgatgataatgtatttaggattcagtgtgaggagaaaaaataaactagtttttctttcttccttatcagtttattcccattatcttattttcccttctctgtctctgccttcctttcctcctcgggaaaaaaaagaaaa

SEQ ID NO: 32846 - DNA, 733 bp, Homo sapiens
agtaagtgttagcttttttaaaatgcaagttattcttctgatagaataatcttgcagggagctcaaggccatttattattaagttccttcattcctatttagcttaaagtctgtttcttgatgatatgtagtgaaatggtaagtatgataacagatgaaatagtaaaaaaaatcatcgaattatcagctctaatagcctcattttgcagatgacaatatgaaagtccataaaggttaactaatttacccaaggttgaacgatgagtttgtgcatgagaactcaggtttcctaactcctgggtcaatatttttccattatattcctttattcaatgtgtatacttcagaaacccaggttatttaatgtatataataaatagtaaatatatatatataatcaagtttctgttacttaagtacataattgtcatttatattcgctgactctccttggtggttttaaaaacctgtgtcccaaaagcctctgtacagtgtgcatgatactatggaaagaagatttacaatttagtgcagagtctgtactttaaaaagaaaccattctcgagttgggtgcagtggcttgtacctacctataatcccagctacttggaagactaaggtaggaggattacatgagcccaggagttagtggctgcagtgagctgtgattgtgccactgtattccagcctaggcagcagagtgagacaccatctttgaaaaaattaattagtt

SEQ ID NO: 32847 - DNA, 329 bp, Homo sapiens
gcctcccgaagtgctgggattacaggcatgagccagtgcgcctggccacatttatttttaaaatgcatttaattgttgtaggtaattttaatttgactttatatgtttcttatttcagaagtttctccagtgcaaatatgtagcaatcatggtataatatacattccctgctccccaaaccccccacaattttgaatgcatatctgaattgcttttgttatttttgtttgtatatgataatcttttatgtggttctgaatcataaggacttttctgtcctagtccacttttgcaattatttattatcatgacctgtccaccataatttg

SEQ ID NO: 32848 - DNA, 251 bp, Homo sapiens
catttaatcgtgtcagtgcttttatcattgtattttgttttatctctttggaaatagacactttgttgtagaattttgcttgagaaagaattcaccgcttaaggtttttacttttcaacacaagaacctgtactgctttcagatttattacattttcttggaaacaccacttccccagcagtaaatctatctttgaattatgactcccaaaaataatcttcacagaaaaggaatttgagaataatagctga

SEQ ID NO: 32849 - DNA, 355 bp, Homo sapiens
aaatgaattttaaacatttcttggttataatttttaatgtggtaaatactgatagcgataaactacatagataaaagctttctagggtcctccataatttttaagagtataaaggggccaagtgtggtggctaacacctgtaatcccaacactttgggaggccaatgcaggaagatccaacatagcaagaccctatctctacaaaaaaatttaaaaattagccagacgtgatggtgtgtgcctgtagtcctagttacttgggaggctgaggtgagaggatcacttgagcccagagtttgagattgtggggagctgtggtcatgcactacattcctgcctgggctacagagtgaga

SEQ ID NO: 32850 - DNA, 311 bp, Homo sapiens
ggatgtacaggaagaaaatgtttctctctgataggccttccaggaatgcacatctgaatctaattatgagaaaacactgggaacctaaattaaaggccatttgacaaaataaccagcctataatcttcaagaatgtcaagtcatgaaagtcaaggaaagaccaagaaactgttccagactgaaggacactaaagaggcatgacaactaaatataccatgggattctgaactggatccttttactataaaggatattgaaacaactggtgaaatatgaagtggggtctgcagatcagataacagcaatttca

SEQ ID NO: 32851 - DNA, 404 bp, Homo sapiens
aaaaaaaatcagtattgctaggagtttatcaattttattgaccttctaaaagaatcagcttttggtttcacagattttctctactgtttgtctttttatttccttcctcttctttttctaacacctttggatggaagatcactgattaaaggctatacatttccctctaagcactgatgtaaacttccataaactttgatgatgcattttccttttcaatcagttaaactattttactaatcacttgtgacttcttctttattcaatggtttatttagaagaatattgatggagctgggcacggtggctcatgcctgtaatcccagcactttgggaggctgaggcatgcaaatcacttgaggtcaggagttcaagaccagcctgaccaacatggtgaaaccccc

SEQ ID NO: 32852 - DNA, 520 bp, Homo sapiens
gcttgtgttattttctaaggttcagataatcaatataaagaagaagctggtagctatgctttgacaaacatgaattatgcaatttttattttttgaaatgaattttagttgtaacaataaattttgaataggactattttataggccaactgataaaaataatttcttggccaacaaatatttccaaaacatataatttttatttttatccccatttagcctcaaaatagccccaatttagatgaaaaattacctggtcactcaatttatgcaccaattttcaatgtgtctttatttttgcatttaaacaatgttttggatcatgccaaagttctctatttaactaaaaaatttatcttaaaaacgtattaagttttagaaaatccatagacctccttgtaagccccaggtgttaataatttctgtggttgaaggagatagcaagaggttaagattagcagcagcttattttcctatgagaacccggtgtgtaaagatgaaaggcaacatcattcaaatg

SEQ ID NO: 32853 - DNA, 373 bp, Homo sapiens
gtgggcagatcacaaggtcaggagatcgagaccatcctggctaacacgatgaaaccccatctatactaaaaatacaaaaaattagccaggcgtggtagcgggcacctgtagtcccagctactcgggaggctgaggcaggagaatggcgtgaacctgggaggcggagcttgcagtgagccgagatcacaccactgcactccagcctgggtgacagagtgagactctgtctgaaaaaaaaaaaaaaaagaaaatacaggggaaaaaatggcaacacattcctgtcacccagagatcaccactatttactctttattatttgtttttttttttttgagacagcctgggtgacagagtgagactctgtctgaaaaaa

SEQ ID NO: 32854 - DNA, 443 bp, Homo sapiens
aataagggcttttgacctggaaactgctccttcttgggggaacttggaggtggtcttgcacttggggaggctgggcctgccgccaaggtcttagctaaggttaaagaggacactacctcaactgaaaagctctgcagtgggtcattcctagccaggtaaaatggacttatcttccatggtgcgctgccacaccacccccttcacaggaaggactggtcgcctctatgttctgaaagcatgcaactccttttggagagttcttccatcttggaggaagggcccatattgattatcttcgtgtctccagtggccagcacagtggctggcatgggtcattatgcatggaaatatgtcgggttgcaatgaattgaatagttttgacattgttatgtcaactgacattgaatggtgccctctcagtcgacgtgatggggaaactgagg

SEQ ID NO: 32855 - DNA, 443 bp, Homo sapiens
gcatttctcagaacttattcttgtctgttaagcaacatgtgactgtgttttattcttatttttaaattttacatcatcttttcaaggaaacctctggaaaaaaaaattataccaaaattttcactgcccactcaaagtggtctatttttactgtttatcttacaactgaagagactatccatgccttgctaaattctactttagctgctgagtctgtctatatacttaataaatttactgtcattcaaattacataataaacataggagcttacaattacttttctaggataaaatctatgcaggaagtttgtctcaagagaggaatttttgctgggtggcacatgtctgtaatcccagcactttgggaggctgagatgggaggctcacttgagcccaggtgttcaagatcagcctaggcaacattgtgagactccatatcta

SEQ ID NO: 32856 - DNA, 946 bp, Homo sapiens
gccttgtttctgatcttagtgagaaaccttctaatttctcaccattaagtattgtgttaagttttagagtttttcgtactctttatgaagttgaggaagttcctctctattcctagtttactgagagcacccattaattttaaggagttagattcttatttgacagaaaaacaggagtatattgaatcagaagcagatctgtgaagttaccttgcttctttgtaccaagtcaaaccatttcttttttatatatatgctacagattgtaaggagaaatagcctcattttaatgatatatatgaaagctcctgctttaggtttgtctgtgctctagtttgctgacccaaattaactttgttttatatacacctaagtacatacactatttaaatcttgtgtctaacataaattgaataaatttgctttgtctgctttcttatctaagtgaagctatagaaaacttgatctcaaaccacatataattcagttgtacacattaatggtacaccataaatggtagatctcaaaagtaatgatttcaatttttaaaataatttttttcaaatgcgcatatctgatatttcagagaatcacttcgtacaaagtgatggaagcccagtatgaagacctgagtttggaagaatcatgaagttgtttgagcttctgctttgtccttttgcctgtctttccctcattcctgccagcaatggatagtgtcttttctcagattgatgcagatttgccagagatgagatgatctttctttaggttttctggctttctgatcttcccttcctagaaattagagaagctaagtatttggcttcaagtactttcctttctaggcctgagaatatacgtatgttcataattaacaaacccaaggcaagaactgtccagagaaagaacatgagtggaatataaatgcttatatgtatgggttccc

SEQ ID NO: 32857 - DNA, 2533 bp, Homo sapiens
ctttaccctacatgcctgagaagccaggggccaagatggatcttctcctcgacatcagctaagcctggaggactcttcccctcagagaccatggagagggacagccacgggaatgcatctccagcaagaacaccttcagctggagcatctccagcccaggcatctccagctgggacacctccaggccgggcatctccagcccaggcatctccagcccaggcatctccagctgggacacctccgggccgggcatctccagcccaggcatctccagctggtacacctccaggccgggcatctccaggccgggcatctccagcccaggcatctccagcccaggcatctccagcccgggcatctccggctctggcatcactttccaggtcctcatccggcaggtcatcatccgccaggtcagcctcggtgacaacctccccaaccagagtgtaccttgttagagcaacaccagtgggggctgtacccatccgatcatctcctgccaggtcagcaccagcaaccagggccaccagggagagcccaggtacgagcctgcccaagttcacctggcgggagggccagaagcagctaccgctcatcgggtgcgtgctcctcctcattgccctggtggtttcgctcatcatcctcttccagttctggcagggccacacagggatcaggtacaaggagcagagggagagctgtcccaagcacgctgttcgctgtgacggggtggtggactgcaagctgaagagtgacgagctgggctgcgtgaggtttgactgggacaagtctctgcttaaaatctactctgggtcctcccatcagtggcttcccatctgtagcagcaactggaatgactcctactcagagaagacctgccagcagctgggtttcgagagtgctcaccggacaaccgaggttgcccacagggattttgccaacagcttctcaatcttgagatacaactccaccatccaggaaagcctccacaggtctgaatgcccttcccagcggtatatctccctccagtgttcccactgcggactgagggccatgaccgggcggatcgtgggaggggcgctggcctcggatagcaagtggccttggcaagtgagtctgcacttcggcaccacccacatctgtggaggcacgctcattgacgcccagtgggtgctcactgccgcccactgcttcttcgtgacccgggagaaggtcctggagggctggaaggtgtacgcgggcaccagcaacctgcaccagttgcctgaggcagcctccattgccgagatcatcatcaacagcaattacaccgatgaggaggacgactatgacatcgccctcatgcggctgtccaagcccctgaccctgtccggtgagggaatctgcactccccgctctcctgccccccagccccagcaccctctgcagccctcgcacttgtcagcatctgtcaactcatatccgggccccaaagcttctgcagggcagaagtcaaagactcttaaagatccttacatggaacacttctgttttataattagggaaactgaagcccaagggttataaataagtttgctccaaatgacacatctcacattacaaattgatgacggagtcagggcttgggtactgatcttaatcaatagattgaattctttcactggtattaactgagcacctaggggccaaacgctatggtaggcatttcacacatatgatttcatttactcttcacaaccaaccctgtggagcaggcactattattaacttcatttgacatatgaggaaatggagctttacagagagataattacctgaggccacaagtaataggtggtagctctgggattggaaccaggtcgatctgattcccaagcaatgtctccccacctggctctagactggcaaattgcttaccctgcagtcgagaacttaagctgagtacacattcaaacaactaattgctacaacgttgttgctaaggaccaaaggaggctacacaaaggaaatgctgcagaggttctcagaagatcactgtggacaggggacgtcaaagaagacttcattcattcattcattcattcattcactcatcattcatccattcactcatttgttcacttatcaaatactatatggccagccctatagtacagttgcaaatagaaataaaatacaccaagacgaccagtagaggccaattatacgatgttttcggggagcagggagctatggtggcataggcgggagcaactaatcatcctggcaggctaggggaagctcagcagaggaaggatagccaaggtgggtcccgaaaagattggagaagacaggtaatgggggctcagggaggaccctgaagaatggagccagagccctctggcataagcatctgtaaaggtgggagagggaggaggagtaccgggatttctggaagcctcggaggactctctggttagtccagccattctcgtgctctgagcctgtgagctggtgtttcctcgcacattaattatggaggcggtgtctatca

SEQ ID NO: 32858 - DNA, 2364 bp, Homo sapiens
  misc_feature (1831)..(1831): n is a, c, g, or t
  misc_feature (2097)..(2097): n is a, c, g, or t
  misc_feature (2322)..(2322): n is a, c, g, or t
  misc_feature (2363)..(2364): n is a, c, g, or t
ctttaccctacatgcctgagaagccaggggccaagatggatcttctcctcgacatcagctaagcctggaggactcttcccctcagagaccatggagagggacagccacgggaatgcatctccagcaagaacaccttcagctggagcatctccagcccaggcatctccagctgggacacctccaggccgggcatctccagcccaggcatctccagcccaggcatctccagctgggacacctccgggccgggcatctccagcccaggcatctccagctggtacacctccaggccgggcatctccaggccgggcatctccagcccaggcatctccagcccgggcatctccggctctggcatcactttccaggtcctcatccggcaggtcatcatccgccaggtcagcctcggtgacaacctccccaaccagagtgtaccttgttagagcaacaccagtgggggctgtacccatccgatcatctcctgccaggtcagcaccagcaaccagggccaccagggagagcccaggtacgagcctgcccaagttcacctggcgggagggccagaagcagctaccgctcatcgggtgcgtgctcctcctcattgccctggtggtttcgctcatcatcctcttccagttctggcagggccacacagggatcaggtacaaggagcagagggagagctgtcccaagcacgctgttcgctgtgacggggtggtggactgcaagctgaagagtgacgagctgggctgcgtgaggtttgactgggacaagtctctgcttaaaatctactctgggtcctcccatcagtggcttcccatctgtagcagcaactggaatgactcctactcagagaagacctgccagcagctgggtttcgagagtgctcaccggacaaccgaggttgcccacagggattttgccaacagcttctcaatcttgagatacaactccaccatccaggaaagcctccacaggtctgaatgcccttcccagcggtatatctccctccagtgttcccactgcggactgagggccatgaccgggcggatcgtgggaggggcgctggcctcggatagcaagtggccttggcaagtgagtctgcacttcggcaccacccacatctgtggaggcacgctcattgacgcccagtgggtgctcactgccgcccactgcttcttcgtgacccgggagaaggtcctggagggctggaaggtgtacgcgggcaccagcaacctgcaccagttgcctgaggcagcctccattgccgagatcatcatcaacagcaattacaccgatgaggaggacgactatgacatcgccctcatgcggctgtccaagcccctgaccctgtccgctcacatccaccctgcttgcctccccatgcatggacagacctttagcctcaatgagacctgctggatcacaggctttggcaagaccagggagacagatgacaagacatcccccttcctccgggaggtgcaggtcaatctcatcgacttcaagaaatgcaatgactacttggtctatgacagttaccttaccccaaggatgatgtgtgctggggaccttcgtgggggcagagactcctgccagggagacagcggggggcctcttgtctgtgagcagaacaaccgctggtacctggcaggtgtcaccagctggggcacaggctgtggccagagaaacaaacctggtgtgtacaccaaagtgacagaagttcttccctggatttacagcaagatggaggtaagatccctgcagcaggacactgcacccagcaggctgggaacttcctcaggtggggaccctggaggagcacccaggntgtaggcagaggtcccctcagcgtccccatattcggggggtgttctggacagggtcaaatgtgatgcctggggtcaatcccagctgtctgtgtttctttccctgcttttcttccctcagaacagagctcagcgggttgaaaaagggtggacctacaggccaggcaggcagttgctgggcagatgttctcccagaagtatttttttgtgtaaggttgcaatggactttgaaaacgtttcagtttctgcagaggattttgtgatagtntttgttatcaagcatttatgcatgggaatccgctcttcatggcctttcccagctctgtttgttttagtctttttgattttctttttgttgttgttgttgtctttttttaaaaacacaagtgactccattttaactctgacaactttcacagctgtcaccagaatgctccctgagaactaccattctttccctttcccacttaaaatatttcatcagaacctcacnactatcataaaagagtataaagtaataaaataataaaaagnn

SEQ ID NO: 32859 - DNA, 2368 bp, Homo sapiens
ctttaccctacatgcctgagaagccaggggccaagatggatcttctcctcgacatcagctaagcctggaggactcttcccctcagagaccatggagagggacagccacgggaatgcatctccagcaagaacaccttcagctggagcatctccagcccaggcatctccagctgggacacctccaggccgggcatctccagcccaggcatcactttccaggtcctcatccggcaggtcatcatccgccaggtcagcctcggtgacaacctccccaaccagagtgtaccttgttagagcaacaccagtgggggctgtacccatccgatcatctcctgccaggtcagcaccagcaaccagggccaccagggagagcccaggtacgagcctgcccaagttcacctggcgggagggccagaagcagctaccgctcatcgggtgcgtgctcctcctcattgccctggtggtttcgctcatcatcctcttccagttctggcagggccacacagggatcaggtacaaggagcagagggagagctgtcccaagcacgctgttcgctgtgacggggtggtggactgcaagctgaagagtgacgagctgggctgcgtgaggtttgactgggacaagtctctgcttaaaatctactctgggtcctcccatcagtggcttcccatctgtagcagcaactggaatgactcctactcagagaagacctgccagcagctgggtttcgagagtgctcaccggacaaccgaggttgcccacagggattttgccaacagcttctcaatcttgagatacaactccaccatccaggaaagcctccacaggtctgaatgcccttcccagcggtatatctccctccagtgttcccactgcggactgagggccatgaccgggcggatcgtgggaggggcgctggcctcggatagcaagtggccttggcaagtgagtctgcacttcggcaccacccacatctgtggaggcacgctcattgacgcccagtgggtgctcactgccgcccactgcttcttcgtgacccgggagaaggtcctggagggctggaaggtgtacgcgggcaccagcaacctgcaccagttgcctgaggcagcctccattgccgagatcatcatcaacagcaattacaccgatgaggaggacgactatgacatcgccctcatgcggctgtccaagcccctgaccctgtccggtgagggaatctgcactccccgctctcctgccccccagccccagcaccctctgcagccctcgcacttgtcagcatctgtcaactcatatccgggccccaaagcttctgcagggcagaagtcaaagactcttaaagatccttacatggaacacttctgttttataattagggaaactgaagcccaagggttataaataagtttgctccaaatgacacatctcacattacaaattgatgacggagtcagggcttgggtactgatcttaatcaatagattgaattctttcactggtattaactgagcacctaggggccaaacgctatggtaggcatttcacacatatgatttcatttactcttcacaaccaaccctgtggagcaggcactattattaacttcatttgacatatgaggaaatggagctttacagagagataattacctgaggccacaagtaataggtggtagctctgggattggaaccaggtcgatctgattcccaagcaatgtctccccacctggctctagactggcaaattgcttaccctgcagtcgagaacttaagctgagtacacattcaaacaactaattgctacaacgttgttgctaaggaccaaaggaggctacacaaaggaaatgctgcagaggttctcagaagatcactgtggacaggggacgtcaaagaagacttcattcattcattcattcattcattcactcatcattcatccattcactcatttgttcacttatcaaatactatatggccagccctatagtacagttgcaaatagaaataaaatacaccaagacgaccagtagaggccaattatacgatgttttcggggagcagggagctatggtggcataggcgggagcaactaatcatcctggcaggctaggggaagctcagcagaggaaggatagccaaggtgggtcccgaaaagattggagaagacaggtaatgggggctcagggaggaccctgaagaatggagccagagccctctggcataagcatctgtaaaggtgggagagggaggaggagtaccgggatttctggaagcctcggaggactctctggttagtccagccattctcgtgctctgagcctgtgagctggtgtttcctcgcacattaattatggaggcggtgtctatca

SEQ ID NO: 32860 - DNA, 632 bp, Homo sapiens
tttcattggatggaatgaggccttagaggggacccatcttggaccggatgaggacaacagtccagaaatgctggaagaccaagctgcatctttggcagattatattttccaaagatagaggcaacactatatcccattccacgagcacttcttctgctgtgactttgacacccctcccattgaggggtggcatctatgtcccctcctcatgagctgcagcaggaggagctttgtgactctcttgaccaatagagtatgccagcattgacagcgtgtggcttccaaggctagttcaaaaaaatgcctttcacttccaccttattctcctgggatgttcactcttggaacccagccaccatgctgcacggaagcacaagagtccttggaaaggcctacatggatgggaaccatggcccccagcccaaataccctgctgagctccccagctgacagcaccaacttgccagccacatgagtgagctgtcctggaagtgattctccagccttggggcgagccacctcagctgatgccatgtgaagcagagacaaattacctccaccaggccctgcccaaattgcagatctgtgagcaaaacaaatgactgtgactgttataagcagaaaaaaaaaaa

SEQ ID NO: 32861 - DNA, 421 bp, Homo sapiens
gaaacccatgttcttagagagtcgtctggctactgcgtagtcctggaatattctttttttcaaaaggcctcttccagttgattccaaccgggttcgggttattgttctcaccaccgatagggggcagcaggtgtcctgcgatgccccggggatgtgcgcgcagactgccctgctgtccccgggaatccgactacactgaacgtttggggcagaagcaggagctgctgcctctaagtccaccgcagcagctgccgggacttgggcctcccagcctgggcgcctggggggggcttgccctgtgcaaagggtgggcgaaaccatctgtgcaccaagcctgcccctaaacttagcgtacagcatagataaataaactcagttgtatgcaaatgctataattaaaatatacagtcatttgaaagta

SEQ ID NO: 32862 - DNA, 450 bp, Homo sapiens
gcaggcacttgaccagcactgtcttcttgaatccccattctagctctgaaggttaggttttattttccctatttacctgagaagaaacctgagaatcagaaaggttcagtaacttggccaagatcacacagcttttgagtgactcttaaccacctggaaagcgttggggagatagaggcactttgccgaggcaagtagctgtttaaaaaggagggtggctctgtccagcccttctgaggagcccaggagccctgcgggggggggccacgtggacaggcaggaatgtgtcatcccgtccctgagtgggcttctcagtgactgtagccagcagtcctgcttctccaagggcctgagctgggcctctgctgccatgtgccagccattcccagggcaggaggccgtgcagtggatacacgcattgcaacacgaattccctctcatgcctgcttc

SEQ ID NO: 32863 - DNA, 388 bp, Homo sapiens
gtgataacatcatacacatcatgaatcgtatatacaatggtggtcagctacattataattttatgggaccaccattgtatatatgattcatcacttactgaaacaatgttatgtgatgcatgactatatatgtgaagtggcatgttgtttgacagttaacttttgacataattagtgacatcatagccattttaacatcatagcacaatgcattactcacatatttgtgatgatggtggtggaaacaaacctactgcactgctagttataaaaagtatagcaaatacaattatgtacagtatacaatacttgataataaatgactgtgttactgatttatgtgtttattatacttttgactgttattttagagtatactttttctaat

SEQ ID NO: 32864 - DNA, 614 bp, Homo sapiens
aaaggaggaactggcgtatcacatggctagaggagcaagagagaaatagaggaagtcccagatcatttttaagaatcagatctcacattaactcatggagcaagaactcgtcatctcaacgagggcaccaagccatttatgagggatccagatatccatccccataacccgaacacctcccaccagccctcacctccaacactggggatcacatttcaacatgatatttgcaggggacaaatatccaaaccatatttctccatatcttggtcagtgctggtgttaacagtttttgtttttaattttgccaatctggtggatgtgcaattgtatctcattgaagtgtcactctgcatttctctattacctgtgaagttgagtattttttcataagtttattggccaatttgactttctgtttttgtaaagtatcttgtcaggactgccacacatgtttttgttgtgttgctaatctttttcctcattgattcataaaggatctttataaatcttattctttgttggctgtatagttgccaatatcttctcccaatttgtggcttgcctttccctcccttatgatgttctttgataaaaacaatttattaatggtt

SEQ ID NO: 32865 - DNA, 359 bp, Homo sapiens
ggatatgcaaggtaaaggcatcacggtattcttgagacagccaatgaattttctgaagatttttgagcattcagtatagtaagaattttaatgatcttcagctcctcttagatctagacacaaatatggaaatgtatattgtgcaatgcaaatgaactggaaatgggtttagtggaaggtactgccatccctgggatggttgcattaatacccagaaccaaaaactgctcaaaaggtaacactcttccatcagcaaaagagaacaggcaaactgctctaacaaaataataaactatgtgtccaaacaggggaagtaaatacttttacataacacaaaagagaatggagctagggagaaa

SEQ ID NO: 32866 - DNA, 408 bp, Homo sapiens
tttattgctggaaatttctttatttccaagtgataggtatttgtaaactcaaaagccaaattttgtctgaaaagtcagatatcaagaaagtgtgcagccataaaaaggcatgagatcatgtcctttgcagggatacggatgaagctagaagccatcattctcagcaaactaacacaggaacagaaaaccaaacaccgcatgttctcactcataagtgggagttgaacaatgagaacacatggacacagggaggggaacaacacacaccagggcctgttggggggtaggggggcgcgaaaggagggaacttagagagcgggtcaataggtgcacaaaccaccatggcacatgtatacctgtgtaacaaacctgcacgttctgcacatgtatcccagaacttaaaataat

SEQ ID NO: 32867 - DNA, 842 bp, Homo sapiens
ctggggctgccatgtgtcagacagtggtgatgtgatggggggacacaggtcagtggcagggtactgggagtttcccctttcctttctcagttctttgcacccattttccatgggctgcctccccagatccagaagccccagcagcccctcaccccagcagtggaaaaagcccgtcattgacacggctgtgggtggccggctttgcaaaagcctcacatttggggctttggagggctttttgcatttcatctttacacaggctcctgcacctcattcctcttgccctcctctcagctttcctcccacttccagttagagagatggcagctctggcaggaccaaatattgatgtttatcacagttttagggccatttgtctcaccatctgaagggctcagcgcaggcccacgggatcctctctccttgagtgacctctgggggcaggtatctggtttggatgctggagctggtccctactcttcccttgggggccgtgcggccgggtgctcaagtgttttaacctcaggaccctgattagttatcatgaagctaccccaccagctcctgggtctgttcatggattagtggcataaaggacgtaatattgttttgcaaaatctgctctccctcccatgtctcctgcccaagaagttggtcttcgtggggccaaaggcaaggaggacccgaggaaggaagaggaaccactgtccccagcccctggtatggcatggcgtcagcctagtgaccagaaattgcttttgaactctgaggcttccagaggacaagaggaagaggaggacagggctgccctgcccactgctcagccttgagccctgcacctg

SEQ ID NO: 32868 - DNA, 886 bp, Homo sapiens
  misc_feature (498)..(498): n is a, c, g, or t
ctggggctgccatgtgtcagacagtggtgatgtgatggggggacacaggtcagtggcagggtactgggagtttcccctttcctttctcagttctttgcacccattttccatgggctgcctccccagatccagaagccccagcagcccctcaccccagcagtggaaaaagcccgtcattgacacggctgtgggtggccggctttgcaaaagcctcacatttggggctttggagggctttttgcatttcatctttacacaggctcctgcacctcattcctcttgccctcctctcagctttcctcccacttccagttagagagatggcagctctggcaggaccaaatattgatgtttatcacagttttagggccatttgtctcaccatctgaagggctcagcgcaggcccacgggatcctctctccttgagtgacctctgggggcaggtatctggtttgtaggcaatcggctggggaggcatggagttcccataacgtacntttgcgcacgtttggggggggacccagtttggccagggccccgaggggtgtctcaaggtgttttaacctcaggaccctgattagttatcatgaagctaccccaccagctcctgggtctgttcatggattagtggcataaaggacgtaatattgttttgcaaaatctgctctccctcccatgtctcctgcccaagaagttggtcttcgtggggccaaaggcaaggaggacccgaggaaggaagaggaaccactgtccccagcccctggtatggcatggcgtcagcctagtgaccagaaattgcttttgaactctgaggcttccagaggacaagaggaagaggaggacagggctgccctgcccactgctcagccttgagccctgcacctg

SEQ ID NO: 32869 - DNA, 953 bp, Homo sapiens
ggagctaggagtccaccaacagactaacagccttcagtgaactcagggatcccaaaggacaggaacagcttgaaagtacttgcatccttcctgcagggaccagccctttgcctccaaaagcaataggaaatttaaaagatttcactgagaaggggccacgtttaagttataatgtctaaggagaagtcacttcaaaatgcagcatcacatacaataggaatttgggttccagagtcagacatatctaggtttgaaaactggatctgccacttatcagttatgtgaccttaaagaactccgttaatttctcagagcctcagtttccttgtctataagttgggagtaatattaatactatcatttttccaaggattgatgtgaacattaatgaggtgaaatgacagatgtgtatcatggttcctaataaacatccaaaatatagtacttactattgtcattattattacttgtttgaagctaaagacctcacaatagaatcccatccagcccaccagacagagctctgagttttctagtttggaagagctattaaataacaacgtctagtgtcaattctatacttgttatggtcaagtactgggctcagcattttacattcattgtctctttaagttctagcaatgtgaagcaggaactatgattatattgactacataaatgaagaaattgaggctcagatacattaagtaattctcccagggtcacacagctagaactggcaaagcctgggattgatccatgatcttccagcattgaagaatcataaatgtaaataactgcaaggccttttcctcagaagagctcctggtgcttgcaccaacccactagcacttgttctctacaggggaacatctgtgggcctgggaatcactgcacgtcgcaagagatgttgcttctgatgaattattgttcctgtcagtggtgtgaaggca

SEQ ID NO: 32870 - DNA, 337 bp, Homo sapiens
acttggatgtctttatcagcagcatgaaaacggactaagacagggtttcaacatatgaattttgagggggcacacagattcagttcacagcagtgaggatgcagggaaatgaagactctctacgctttgggttggaatttaaacttgtaaattagacttgtaaagtcttcagagactcacatatgacttgcgagatcaaggctgtgttctggcaggtctctcaccattggcaaaaaaaccaaaaaagtatcattcccattgaatatcctgctacataatgaattttcacattgaacatttaatttcccatttaaataaacccatctggaatttgatt

SEQ ID NO: 32871 - DNA, 532 bp, Homo sapiens
accaacccccacccactaccccccatctccaaaaatggacactcctagaaatctactctcaagtagcttttctcatggacttaagtccccatcggtgacacggagggaaaagaacttcagaaccaactgttggccctgaaaagacctcaaagagggtgcaatccagttgatttttacattgaaaggtcacagttccccctctgagagtctgacggattgtacaacccctccccaggaacctgtatacacagtcaccacccatgaagcagtctcaggctaagaactctattatggaccgtagcccaatctgttcattttacagatgaggcaactgagtccacaggagagcagaacgtgacgtgcgtagaacacaaagttagttagaggcagacctaggacccaggtaaccagaccctcagtcacgtgggccttctggtaagaggccacctctagtgccttcagaaggcagaaacaaactgtcccttgacctattgggattctggtaaaagaaagtatttaatttgaaaaaaaa

SEQ ID NO: 32872 - DNA, 524 bp, Homo sapiens
gtgaaatctgactacttaactcttctccgtggtgctctgacaaacttgccttatttgctgtgagttgaaaggataaaacagacacacactttaatttttcccatttaactcttcacatactatattcatataggttttcactggatggggaaagagagcagaggtcggcaaacattttgtaaaggacagattttgtaaatgctttgtgggacatatggtctcttaaaactagtaagctttgctgtgagtatgaaagtgtctgtagctagtatgtaaacaaaggagtgtcactgtgcttcaatacaactttattatggacactgaaatttgaatttcatgtgatggtcatgtgtcgtgaaatattattgttttgaattatgtttccagccattaaaaaaatgtaaaatctcagccgggcacagcggctcatgcctgtaattctgccactttgggaggctgaggcaggcggatcacttgaggtcaggagttcgtgaccagcctggctaacatggggaaaccttgtc

SEQ ID NO: 32873 - DNA, 338 bp, Homo sapiens
gtcttacaatcagttaatatgagtcttccaacttttttttttaaatctaaattgtttttactattctcattcattggcctttccatacagatattagagttagcttgttaggcagacatgggaggatagcttgagcccaggagttcaagaccagcctgggcaatagagtgagactttgtctctacaaaatataaaaattagccaaacttagtgatgcatgcctgtagtcccagctactcaggaggctgaggtgagaggaacacttgcgcccaggaggcagaggttacagtgagcagagatcatatcactgcactccagcctgggtgacagagcaagac

SEQ ID NO: 32874 - DNA, 362 bp, Homo sapiens
gagattttctactacctctaggaactatacaatattctgtatgtgttcccttggttgcatgacaatattcaagacaactttgtaaataatagataaaaaattttaatttttaacatctagtctttctagatgtatagagtctcacaaagtataattttgtaaataagtcattgtaaaatttcatggtttcattgtgttttgcaaatgtcttggcaaagaacttgataaaattttgggcttcttgacctatacatattttggtatctctttattgggttgtttagtgtaaggaaaaagttgaaagaatgtattttcaactttgaattgtaatcagaaagaaaatatattttaaccattgttta

SEQ ID NO: 32875 - DNA, 298 bp, Homo sapiens
  misc_feature (75)..(75): n is a, c, g, or t
  misc_feature (89)..(89): n is a, c, g, or t
  misc_feature (201)..(201): n is a, c, g, or t
aaatcatccactttcccgagaatctagggattatgctccactgtctagagactatgcataccatgattatggtcnttctagttgggatnaacatttctctagaggatatagtgattgtgatggctgtggtgaggtgatgttagagatcattctgaacgtccaagtggaagttcttatagagatgcatttcagagatagggnacctctcatggtgcaccatctgcaggagtgcctctgttgtcttatggtggaagcagccaccatgattatagcaataaatgagatagatatggcataa

SEQ ID NO: 32876 - DNA, 528 bp, Homo sapiens
caagaccagtctggccataatttcagatggtgagattatagtgaaaccccatctctactaaaaatgcaaaaattagctgggcgtgatggcacacatctacaattccagctactcaggaggctgaggctgcagtgagctgagatcgcaccactgcactctagcctgggcaacacagtgagactccatctaaaaaaaaatctgagattaataggttgccattttaggcgctctttatagaccagctggcctagtggtcctggttctgtaatatgtgaagtaaaggtctcgcaggggagcaccagtttcaaactctgtcctagtttgcagccttggctggagtgaccccagtcatgaggcaaactgagcacaagtgtgcaagtgtcatggattcagccagaacatcagtgttcccagcatcagacacagattcgggagaaatcaagtcacagtgtagagatgtattgtgatgtgtcactacactattatgaaatggaagaaaataaaattacaagcctcaacctttaaaca

SEQ ID NO: 32877 - DNA, 540 bp, Homo sapiens
gaattttaaattttattcatacaataaacattcatcggacacttattttatgccaagctgtgctctgtttgctgaagatacatcagagaacaaaagagatatcaatcgctgtccttatggaacttatagtctaattgggagagatacaatagacaacatgatgaatggcaaagtatatagtatgctaaaggtaatatgctatgaaaaacagaacaaaggaagggggattggagtctcagccattgaggaaggaaggtggcaatttaaaatagagtagaaaggtttggcattaggccaggagtgttggctcctgcttgtaatcccaacactttgggaggtcaaagcaggccgatcgctggagcccaggagttcgagaccagcctgagcaacatggcagaactccatatctacaaaaagtagcagggtgtggtggtgtgcgcctgtcgtcccaactactcagggggctgaggcaggaggatcacctgagccttaggagttcaaggctgcagtgagccgtgatcataccactgcactccagcc

SEQ ID NO: 32878 - DNA, 428 bp, Homo sapiens
aattataatatattcatattaaaaaataatattcagtcttaaagcaaatagttaaagcaactaaaccagttgtaataggcagatttccaaaaaacggttatgtaagaaaacaagatacaaacattgtaatatcatttcatgttttcaatataaattatttaaaaatttcatatatgtatatgtatgtttaccaaactatgtgagtactgagaaaaatatgaaagaatgcatgcttgattgtcatatcccatgggtgtgtaatgggagtagtgaagaagataaatggggtagtataaaaaatataaaaccataatacactaaaatgtaatatgaatgttatactttacatttgtttaaaattacatatgtgatttgtacaactaaagtggtataaaaattagaagcaaagttaaatgagaaggaattga

SEQ ID NO: 32879 - DNA, 402 bp, Homo sapiens
gccatccttttccactggcctctactcggcatgcatgagaaagactggaaacagcacagtaggcctgggagacccttcccccttggtggtacagccctacagcacctgccaaggttttagggtggagcaggcatacctagggaagcccattcatgctttgagccttgtctgaggacaaggtagtgcctgtctgcccctgggggaggggcaagaaacacactctgatataaattagcggtctactattgccaggtgaaggacagaaatctctcttgggccccagacactccaccactacaaagtcagagttcagtagctacaggagaaaggggaggaaacctgcctgtgctctagatccagaactcagcaggaagcagaggttatccctaggagaagccctga

SEQ ID NO: 32880 - DNA, 1045 bp, Homo sapiens
ctgcgtacctcatataaatagagtgatatgttagtcgtctcttgtgtctggtttcttcctcttagcatcatgttttgaaagtttatccctgcgacagcatctaccagttcatcatttctttttgtggctaagtaatacgccattgtatggatataccacattttgtgtatccattcattagttcatggattttgtgtctattatgaataatgctgccatgagcatctgtgttgtccacaagtttcagcatggacttctgttttcattccaatatcctttgatgacatgtcttggcagtgatgtctatgacactgggcaagtgtcttaaaatgttgtgcatcagaaaaaagtcatcattgccaaggccagcagatctcgaaaagggggctgggatacgttggtgatttttttcatgctctacttacagtatgactcgtaactgttaatggctgagctcctccttaggtgaagaaggaaggcaatggcgttttctattctgggcctccctgcttccagcgatagcaaggagcgaaatgagatgctgtctaagaaaggaaggtgctgcgatctttgattactacacagcctcggcagtgtttgtatgattaatgagtccatgtttcagacgttcccatttaatgtatttgagccttctaacaacattgcctttcatatgttgctgactgtttttgagatttatgaggcctaactcgcaagcgatgtgtgtctggattaagagaacctgagaatctctatttatgtctgacccccaggaaattccctttaagctgcttatcagaggtgcatgctgagagcatgatgggaagatggagtcttccatccgctggtaaaatctggaatctgctctcatttcattttcactgaactgaaaataaggtaacagaccctcaggtctacctataagtaccttccaactgttccacttttgtaaatttagttcagataatacatatgctgaaattcctatatcccccccatactccagatcttcagtgtggaatttaaatataattccttattgtaa

SEQ ID NO: 32881 - DNA, 271 bp, Homo sapiens
tagttataaattttccatctaatttcttctttatgtattctatttatttgctgaaacttcttatctttccattcatttcaagaaagttttctcttcttggagcattactataatagctattttaaagtcttgtcaaataattctctgtcatcttagtgttagtgtttgttgattgtctttcccatgagaattgagatttgtttttgttcttcataggctgagtaatttgggttgtatccagggcaatttgaatatgctgtatgttaggaga

SEQ ID NO: 32882 - DNA, 481 bp, Homo sapiens
catgagccaccacgccagccttctgggagttcttaagggcaggtggcactgagatatatgagtaccgagaggtaaggacactcataactagaacacacatctgtctctacctttaaagctcatgtgatctgctgtggaggttcagaccacaggggaacaatagacagatggcccaattacatcgtgtgggtgtatgtcatattcaaaccatctacagaagtacccagggtgcagactacatgcccagagctcatggatttgagagtgagctacacttgaaaaatggaaatttcctcccttctctcctccccagaagaagaaaaaatataacacttcctcctctttgcatccaagtcctagtcctttctttccttgtggtttgtttttaatctagtgcttttataagaatcctttatatttgaataaaaatgctgaagaacccactgcagtttgccaatttgtcattcacactgggaggtgg

SEQ ID NO: 32883 - DNA, 584 bp, Homo sapiens
gtaatacttctgtagtttttctgccctggtgaagcctgcttataactcaaaatccagggtgtttactggggtctggtcatgtaggcacctctgcctgtgtgcctaaccacagtcacctgaattccagacccagaaggaaagtaggtgttcaccacaaatcatgttatttttgcagtttacgcaagctggccccgcaggttgtgtcccaggcaggcagagcaatgtaacatgccaaaagtcaagttctcagacaccagccaagggccagcctcataagcagacccttctaaagatagcagcatcagacctgctatcccttacctttatttactaatacattgtaaggcaaagaatccagtttcttgcccccacaaaggagcagaaacagcaagatactctctagcaacccatctccctcacttatttcagatacttgtaaagatatatgttgaaatgacagcaattctaacatatagaacttttttattgataaagctagataacgctaacatactaatagtatcttagttcatttcctgttgcttatgatagaaatcttctgggtaattaataaaagaaatgca

SEQ ID NO: 32884 - DNA, 321 bp, Homo sapiens
gacctttcaaaaactgttttttaaatagactttatgttttagagaagttttaggttcacaacagcattgagcagaaagtaaagagagttcccttgcattcctttcccatcccgtattagaagaagagggatcaagggtaactcttgctcaccccaaggagggttgttgggtggtataatttttgtatggcatgagcttcagagtatttgaagtttttgaaggggagggaaagaaaagtagtgtcgaagagagaatacagagcataaaaagacatctcttttagggccttcagtcaatataaagggtgtaaataaaaaaatt

SEQ ID NO: 32885 - DNA, 1060 bp, Homo sapiens
gggcactcccccgggagtgagggttgctgggcctgatgacgtggcttggcaacgtccctaccgccgctgcttcccgggaacctggcgccgccggaactgatcgcggcctagtcccgacgcgtgtgtgctagtgagccggagccggcgacggcggcagtggcggcccggcctgcaggagcccgacggggtctctgccatgggggagtgacgcgcctgcacccgctgttccgcggcagcggcgagacatgaggagaccccgcgacaggggcagcggcggcggctcgtgagccccgggatggaggagaaatacggcggggacgtgctggccggccccggcggcggcggcggcttgggccggtggacgtacccagcgctcgattaacaaaatatattgtgttactatgtttcactaaatttttgaaggctgtgggacttttcgaatcatatgatctcctaaaagctgttcacattgttcagttcatttttatattaaaacttgggactgcattttttatggtttgtttcaaaagccattttcttctgggaaaactattaccaaacaccagataattggatcactaaaaattcctggtagaaaagaatttaaagacaaaaagttaaatgatcctaggaaactagtgggaaactgagaaatcataaaattgtactctgaagaaaaagatttcaaaatctaccagcagacaagaatatagataatggaaaacagaatactgtcctttttttttttctttctttttttgagaaagagtcttgctccatcgcccaggctgcagtgcagtgacacgatcttgtctcactgcaacctctgcctcccgggttcaagcgattctcctgcctcagcctcctgagtagctggaattacaggcacccaccaccacacccagctcatttttgtatttttagtagagacggggcttcattcaccacattggccagcctggtcttgaactcctgacctcaggtgatctgcctgcctcggcctcacaaagtgctaggattacaggcatgagccacagcacccggcccagaataagaatac

SEQ ID NO: 32886 - DNA, 3026 bp, Homo sapiens
  misc_feature (2846)..(2846): n is a, c, g, or t
gggcactcccccgggagtgagggttgctgggcctgatgacgtggcttggcaacgtccctaccgccgctgcttcccgggaacctggcgccgccggaactgatcgcggcctagtcccgacgcgtgtgtgctagtgagccggagccggcgacggcggcagtggcggcccggcctgcaggagcccgacggggtctctgccatgggggagtgacgcgcctgcacccgctgttccgcggcagcggcgagacatgaggagaccccgcgacaggggcagcggcggcggctcgtgagccccgggatggaggagaaatacggcggggacgtgctggccggccccggcggcggcggcggcttgggccggtggacgtacccagcgctcgattaacaaaatatattgtgttactatgtttcactaaatttttgaaggctgtgggacttttcgaatcatatgatctcctaaaagctgttcacattgttcagttcatttttatattaaaacttgggactgcattttttatggtttgtttcaaaagccattttcttctgggaaaactattaccaaacaccagtggatcaaaatatttaaacatgcagttgctgggtgtattatttcactcttgtggttttttggcctcactctttgtggaccactaaggactttgctgctatttgagcacagtgatattgttgtcatttcactactcagtgttttgttcaccagttctggaggaggaccagcaaagacaaggggagctgcttttttcattattgctgtgatctgtttattgctttttgacaatgatgatctcatggctaaaatggctgaacaccctgaaggacatcatgacagtgctctaactcatatgctttacacagccattgccttcttaggtgtggcagatcacaagggtggagtattattgctagtactggctttgtgttgtaaagttggttttcatacagcttccagaaagctctctgtcgacgttggtggagctaaacgtcttcaagctttatctcatcttgtttctgtgcttctcttgtgcccatgggtcattgttctttctgtgacaactgagagtaaagtggagtcttggttttctctcattatgccttttgcaacggttatcttttttgtcatgatcctggatttctacgtggattccatttgttcagtcaaaatggaagtttccaaatgtgctcgttatggatcctttcccatttttattagtgctctcctttttggaaatttttggacacatccaataacagaccagcttcgggctatgaacaaagcagcacaccaggagagcactgaacacgtcctgtctggaggagtggtagtgagtgctatattcttcattttgtctgccaatatcttatcatctccctctaagagaggacaaaaaggtacccttattggatattctcctgaaggaacacctctttataacttcatgggtgatgcttttcagcatagctctcaatcgatccctaggtttattaaggaatcactaaaacaaattcttgaggagagtgactctaggcagatcttttacttcttgtgcttgaatctgctttttacctttgtggaattattctatggcgtgctgaccaatagtctgggcctgatctcggatggattccacatgctttttgactgctctgctttagtcatgggactttttgctgccctgatgagtaggtggaaagccactcggattttctcctatgggtacggccgaatagaaattctgtctggatttattaatggactttttctaatagtaatagcgttttttgtgtttatggagtcagtggctagattgattgatcctccagaattagacactcacatgttaacaccagtctcagttggagggctgatagtaaaccttattggtatctgtgcctttagccatgcccatagccatgcccatggagcttctcaaggaagctgtcactcatctgatcacagccattcacatcatatgcatggacacagtgaccatgggcatggtcacagccacggatctgcgggtggaggcatgaatgctaacatgaggggtgtatttctacatgttttggcagatactcttggcagcattggtgtgatcgtatccacagttcttatagagcagtttggatggttcatcgctgacccactctgttctctttttattgctatattaatatttctcagtgttgttccactgattaaagatgcctgccaggttctactcctgagattgccaccagaatatgaaaaagaactacatattgctttagaaaagatacagaaaattgaaggattaatatcataccgagaccctcatttttggcgtcattctgctagtattgtggcaggaacaattcatatacaggtgacatctgatgtgctagaacaaagaatagtacagcaggttacaggaatacttaaagatgctggagtaaacaatttaacaattcaagtggaaaaggaggcatactttcaacatatgtctggcctaagtactggatttcatgatgttctggctatgacaaaacaaatggaatccatgaaatactgcaaagatggtacttacatcatgtgagataactcaagaattacccctggagaataaacaatgaagattaaatgactcagtatttgtaatattgccagaaggataaaaattacacattaactgtacagaaacagagttccctactactggatcaaggaatctttcttgaaggaaatttaaatacagaatgaaacattaatggtaaaagtggagtaattatttaaattatgtgtataaaaggaatcaaattttgagtaaacatgatgtattacatcatcttcnaaaatagatatgatggattctagtgaagaccaaaattacttctgtttactttctatcaggaagcatctccattgtaaatatgtatttacatgtttattacaaagacccaaatgaaaaatttttagtccattttttgcatagcctaaagataaaataggaataaaagttctatatttatgg

SEQ ID NO: 32887 - DNA, 3238 bp, Homo sapiens
  misc_feature (2846)..(2846): n is a, c, g, or t
gggcactcccccgggagtgagggttgctgggcctgatgacgtggcttggcaacgtccctaccgccgctgcttcccgggaacctggcgccgccggaactgatcgcggcctagtcccgacgcgtgtgtgctagtgagccggagccggcgacggcggcagtggcggcccggcctgcaggagcccgacggggtctctgccatgggggagtgacgcgcctgcacccgctgttccgcggcagcggcgagacatgaggagaccccgcgacaggggcagcggcggcggctcgtgagccccgggatggaggagaaatacggcggggacgtgctggccggccccggcggcggcggcggcttgggccggtggacgtacccagcgctcgattaacaaaatatattgtgttactatgtttcactaaatttttgaaggctgtgggacttttcgaatcatatgatctcctaaaagctgttcacattgttcagttcatttttatattaaaacttgggactgcattttttatggtttgtttcaaaagccattttcttctgggaaaactattaccaaacaccagtggatcaaaatatttaaacatgcagttgctgggtgtattatttcactcttgtggttttttggcctcactctttgtggaccactaaggactttgctgctatttgagcacagtgatattgttgtcatttcactactcagtgttttgttcaccagttctggaggaggaccagcaaagacaaggggagctgcttttttcattattgctgtgatctgtttattgctttttgacaatgatgatctcatggctaaaatggctgaacaccctgaaggacatcatgacagtgctctaactcatatgctttacacagccattgccttcttaggtgtggcagatcacaagggtggagtattattgctagtactggctttgtgttgtaaagttggttttcatacagcttccagaaagctctctgtcgacgttggtggagctaaacgtcttcaagctttatctcatcttgtttctgtgcttctcttgtgcccatgggtcattgttctttctgtgacaactgagagtaaagtggagtcttggttttctctcattatgccttttgcaacggttatcttttttgtcatgatcctggatttctacgtggattccatttgttcagtcaaaatggaagtttccaaatgtgctcgttatggatcctttcccatttttattagtgctctcctttttggaaatttttggacacatccaataacagaccagcttcgggctatgaacaaagcagcacaccaggagagcactgaacacgtcctgtctggaggagtggtagtgagtgctatattcttcattttgtctgccaatatcttatcatctccctctaagagaggacaaaaaggtacccttattggatattctcctgaaggaacacctctttataacttcatgggtgatgcttttcagcatagctctcaatcgatccctaggtttattaaggaatcactaaaacaaattcttgaggagagtgactctaggcagatcttttacttcttgtgcttgaatctgctttttacctttgtggaattattctatggcgtgctgaccaatagtctgggcctgatctcggatggattccacatgctttttgactgctctgctttagtcatgggactttttgctgccctgatgagtaggtggaaagccactcggattttctcctatgggtacggccgaatagaaattctgtctggatttattaatggactttttctaatagtaatagcgttttttgtgtttatggagtcagtggctagattgattgatcctccagaattagacactcacatgttaacaccagtctcagttggagggctgatagtaaaccttattggtatctgtgcctttagccatgcccatagccatgcccatggagcttctcaaggaagctgtcactcatctgatcacagccattcacatcatatgcatggacacagtgaccatgggcatggtcacagccacggatctgcgggtggaggcatgaatgctaacatgaggggtgtatttctacatgttttggcagatactcttggcagcattggtgtgatcgtatccacagttcttatagagcagtttggatggttcatcgctgacccactctgttctctttttattgctatattaatatttctcagtgttgttccactgattaaagatgcctgccaggttctactcctgagattgccaccagaatatgaaaaagaactacatattgctttagaaaagatacagaaaattgaaggattaatatcataccgagaccctcatttttggcgtcattctgctagtattgtggcaggaacaattcatatacaggtgacatctgatgtgctagaacaaagaatagtacagcaggttacaggaatacttaaagatgctggagtaaacaatttaacaattcaagtggaaaaggaggcatactttcaacatatgtctggcctaagtactggatttcatgatgttctggctatgacaaaacaaatggaatccatgaaatactgcaaagatggtacttacatcatgtgagataactcaagaattacccctggagaataaacaatgaagattaaatgactcagtatttgtaatattgccagaaggataaaaattacacattaactgtacagaaacagagttccctactactggatcaaggaatctttcttgaaggaaatttaaatacagaatgaaacattaatggtaaaagtggagtaattatttaaattatgtgtataaaaggaatcaaattttgagtaaacatgatgtattacatcatcttcnaaaatagatatgatggattctagtgaagaccaaaattacttctgtttactttctatcaggaagcatctccattgtaaatatgtatttacatgtttattacaaagacccaaatgaaaaatttttagtccattttttgcatagcctaaagataaaataggaataaaagttctatatttatggattttctgtatataaaactggtttctaattataacttaagtccattaagtaaaatctgtattgccactttaaatgtaaactaaattatttgggagaaacttcaaccactgatatgagataagcaatgagaatagggaagtgtataacatcacagtttttgatgtattacaaaaatcaaccactctataaaataaattttttttacttttggt

SEQ ID NO: 32888 - DNA, 1639 bp, Homo sapiens
  misc_feature (1459)..(1459): n is a, c, g, or t
ctgactctagcaggatccccatgaggctcctggatattctcctgaaggaacacctctttataacttcatgggtgatgcttttcagcatagctctcaatcgatccctaggtttattaaggaatcactaaaacaaattcttgaggagagtgactctaggcagatcttttacttcttgtgcttgaatctgctttttacctttgtggaattattctatggcgtgctgaccaatagtctgggcctgatctcggatggattccacatgctttttgactgctctgctttagtcatgggactttttgctgccctgatgagtaggtggaaagccactcggattttctcctatgggtacggccgaatagaaattctgtctggatttattaatggactttttctaatagtaatagcgttttttgtgtttatggagtcagtggctagattgattgatcctccagaattagacactcacatgttaacaccagtctcagttggagggctgatagtaaaccttattggtatctgtgcctttagccatgcccatagccatgcccatggagcttctcaaggaagctgtcactcatctgatcacagccattcacatcatatgcatggacacagtgaccatgggcatggtcacagccacggatctgcgggtggaggcatgaatgctaacatgaggggtgtatttctacatgttttggcagatactcttggcagcattggtgtgatcgtatccacagttcttatagagcagtttggatggttcatcgctgacccactctgttctctttttattgctatattaatatttctcagtgttgttccactgattaaagatgcctgccaggttctactcctgagattgccaccagaatatgaaaaagaactacatattgctttagaaaagatacagaaaattgaaggattaatatcataccgagaccctcatttttggcgtcattctgctagtattgtggcaggaacaattcatatacaggtgacatctgatgtgctagaacaaagaatagtacagcaggttacaggaatacttaaagatgctggagtaaacaatttaacaattcaagtggaaaaggaggcatactttcaacatatgtctggcctaagtactggatttcatgatgttctggctatgacaaaacaaatggaatccatgaaatactgcaaagatggtacttacatcatgtgagataactcaagaattacccctggagaataaacaatgaagattaaatgactcagtatttgtaatattgccagaaggataaaaattacacattaactgtacagaaacagagttccctactactggatcaaggaatctttcttgaaggaaatttaaatacagaatgaaacattaatggtaaaagtggagtaattatttaaattatgtgtataaaaggaatcaaattttgagtaaacatgatgtattacatcatcttcnaaaatagatatgatggattctagtgaagaccaaaattacttctgtttactttctatcaggaagcatctccattgtaaatatgtatttacatgtttattacaaagacccaaatgaaaaatttttagtccattttttgcatagcctaaagataaaataggaataaaagttctatatttatgg

SEQ ID NO: 32889 - DNA, 2417 bp, Homo sapiens
gggcactcccccgggagtgagggttgctgggcctgatgacgtggcttggcaacgtccctaccgccgctgcttcccgggaacctggcgccgccggaactgatcgcggcctagtcccgacgcgtgtgtgctagtgagccggagccggcgacggcggcagtggcggcccggcctgcaggagcccgacggggtctctgccatgggggagtgacgcgcctgcacccgctgttccgcggcagcggcgagacatgaggagaccccgcgacaggggcagcggcggcggctcgtgagccccgggatggaggagaaatacggcggggacgtgctggccggccccggcggcggcggcggcttgggccggtggacgtacccagcgctcgattaacaaaatatattgtgttactatgtttcactaaatttttgaaggctgtgggacttttcgaatcatatgatctcctaaaagctgttcacattgttcagttcatttttatattaaaacttgggactgcattttttatggtttgtttcaaaagccattttcttctgggaaaactattaccaaacaccagtggatcaaaatatttaaacatgcagttgctgggtgtattatttcactcttgtggttttttggcctcactctttgtggaccactaaggactttgctgctatttgagcacagtgatattgttgtcatttcactactcagtgttttgttcaccagttctggaggaggaccagcaaagacaaggggagctgcttttttcattattgctgtgatctgtttattgctttttgacaatgatgatctcatggctaaaatggctgaacaccctgaaggacatcatgacagtgctctaactcatatgctttacacagccattgccttcttaggtgtggcagatcacaagggtggagtattattgctagtactggctttgtgttgtaaagttggttttcatacagcttccagaaagctctctgtcgacgttggtggagctaaacgtcttcaagctttatctcatcttgtttctgtgcttctcttgtgcccatgggtcattgttctttctgtgacaactgagagtaaagtggagtcttggttttctctcattatgccttttgcaacggttatcttttttgtcatgatcctggatttctacgtggattccatttgttcagtcaaaatggaagtttccaaatgtgctcgttatggatcctttcccatttttattagtgctctcctttttggaaatttttggacacatccaataacagaccagcttcgggctatgaacaaagcagcacaccaggagagcactgaacacgtcctgtctggaggagtggtagtgagtgctatattcttcattttgtctgccaatatcttatcatctccctctaagagaggacaaaaaggtacccttattggatattctcctgaaggaacacctctttataacttcatgggtgatgcttttcagcatagctctcaatcgatccctaggtttattaaggaatcactaaaacaaattcttgaggagagtgactctaggcagatcttttacttcttgtgcttgaatctgctttttacctttgtggaattattctatggcgtgctgaccaatagtctgggcctgatctcggatggattccacatgctttttgactgctctgctttagtcatgggactttttgctgccctgatgagtaggtggaaagccactcggattttctcctatgggtacggccgaatagaaattctgtctggatttattaatggactttttctaatagtaatagcgttttttgtgtttatggagtcagtggctagattgattgatcctccagaattagacactcacatgttaacaccagtctcagttggagggctgatagtaaaccttattggtatctgtgcctttagccatgcccatagccatgcccatggagcttctcaaggaagctgtcactcatctgatcacagccattcacatcatatgcatggacacagtgaccatgggcatggtcacagccacggatctgcgggtggaggcatgaatgctaacatgaggggtgtatttctacatgttttggcagatactcttggcagcattggtgtgatcgtatccacagttcttatagagcagtttggatggttcatcgctgacccactctgttctctttttattgctatattaatatttctcagtgttgttccactgattaaagatgcctgccaggttctactcctgagattgccaccagaatatgaaaaagaactacatattgctttagaaaagatacggtactgtatgtaatttcttcactactttcttccttgaaaatcacatttttgaagtctttgctggaagtaaaacagacaaccaaataaataataaaacaaaacgaggccaaaaaagaaatat

SEQ ID NO: 32890 - DNA, 3139 bp, Homo sapiens
  misc_feature (2747)..(2747): n is a, c, g, or t
gggcactcccccgggagtgagggttgctgggcctgatgacgtggcttggcaacgtccctaccgccgctgcttcccgggaacctggcgccgccggaactgatcgcggcctagtcccgacgcgtgtgtgctagtgagccggagccggcgacggcggcagtggcggcccggcctgcaggagcccgacggggtctctgccatgggggagtgacgcgcctgcacccgctgttccgcggcagcggcgagacatgaggagaccccgcgacaggggcagcggcggcggctcgtgagccccgggatggaggagaaatacggcggggacgtgctggccggccccggcggcggcggcggcttgggccggtggacgtacccagcgctcgattaacaaaatatattgtgttactatgtttcactaaatttttgaaggctgtgggacttttcgaatcatatgatctcctaaaagctgttcacattgttcagttcatttttatattaaaacttgggactgcattttttatggtttgtttcaaaagccattttcttctgggaaaactattaccaaacaccagtggatcaaaatatttaaacatgcagttgctgggtgtattatttcactcttgtggttttttggcctcactctttgtggaccactaaggactttgctgctatttgagcacagtgatattgttgtcatttcactactcagtgttttgttcaccagttctggaggaggaccagcaaagacaaggggagctgcttttttcattattgctgtgatctgtttattgctttttgacaatgatgatctcatggctaaaatggctgaacaccctgaaggacatcatgacagtgctctaactcatatgctttacacagccattgccttcttaggtgtggcagatcacaagggtggagtattattgctagtactggctttgtgttgtaaagttggttttcatacagcttccagaaagctctctgtcgacgttggtggagctaaacgtcttcaagctttatctcatcttgtttctgtgcttctcttgtgcccatgggtcattgttctttctgtgacaactgagagtaaagtggagtcttggttttctctcattatgccttttgcaacggttatcttttttgtcatgatcctggatttctacgtggattccatttgttcagtcaaaatggaagtttccaaatgtgctcgttatggatcctttcccatttttattagtgctctcctttttggaaatttttggacacatccaataacagaccagcttcgggctatgaacaaagcagcacaccaggagagcactgaacacgtcctgtctggaggagtggtagtgagtgctatattcttcattttgtctgccaatatcttatcatctccctctaagagaggacaaaaaggtacccttattggatattctcctgaaggaacacctctttataacttcatgggtgatgcttttcagcatagctctcaatcgatccctaggtttattaaggaatcactaaaacaaattcttgaggagagtgactctaggcagatcttttacttcttgtgcttgaatctgctttttacctttgtggaattattctatggcgtgctgaccaatagtctgggcctgatctcggatggattccacatgctttttgactgctctgctttagtcatgggactttttgctgccctgatgagtaggtggaaagccactcggattttctcctatgggtacggccgaatagaaattctgtctggatttattaatggactttttctaatagtaatagcgttttttgtgtttatggagtcagtggctagattgattgatcctccagaattagacactcacatgttaacaccatgcccatagccatgcccatggagcttctcaaggaagctgtcactcatctgatcacagccattcacatcatatgcatggacacagtgaccatgggcatggtcacagccacggatctgcgggtggaggcatgaatgctaacatgaggggtgtatttctacatgttttggcagatactcttggcagcattggtgtgatcgtatccacagttcttatagagcagtttggatggttcatcgctgacccactctgttctctttttattgctatattaatatttctcagtgttgttccactgattaaagatgcctgccaggttctactcctgagattgccaccagaatatgaaaaagaactacatattgctttagaaaagatactcattctgctagtattgtggcaggaacaattcatatacaggtgacatctgatgtgctagaacaaagaatagtacagcaggttacaggaatacttaaagatgctggagtaaacaatttaacaattcaagtggaaaaggaggcatactttcaacatatgtctggcctaagtactggatttcatgatgttctggctatgacaaaacaaatggaatccatgaaatactgcaaagatggtacttacatcatgtgagataactcaagaattacccctggagaataaacaatgaagattaaatgactcagtatttgtaatattgccagaaggataaaaattacacattaactgtacagaaacagagttccctactactggatcaaggaatctttcttgaaggaaatttaaatacagaatgaaacattaatggtaaaagtggagtaattatttaaattatgtgtataaaaggaatcaaattttgagtaaacatgatgtattacatcatcttcnaaaatagatatgatggattctagtgaagaccaaaattacttctgtttactttctatcaggaagcatctccattgtaaatatgtatttacatgtttattacaaagacccaaatgaaaaatttttagtccattttttgcatagcctaaagataaaataggaataaaagttctatatttatggattttctgtatataaaactggtttctaattataacttaagtccattaagtaaaatctgtattgccactttaaatgtaaactaaattatttgggagaaacttcaaccactgatatgagataagcaatgagaatagggaagtgtataacatcacagtttttgatgtattacaaaaatcaaccactctataaaataaattttttttacttttggt

SEQ ID NO: 32891 - DNA, 438 bp, Homo sapiens
atttgaaaaaaagtattgtgtactgatgccctagactagagagcctctatctgtcactgtccccctgtataaattcctcagctgtactcaggaagacctaagtggtgaataaatgccctcagttgtgggctggtacctgtggcaggtcccctgagttttctagcattggctattggattaatggtttgtcttttattgagcaatagtttgttgtgatttaagggtgccatgcttacattctcttatcatgtattccctgggaatctaatttgtaaataattacttgacagaaactgaactggctggaaaattctgagtatgcagaggcagaggcaggccctgggaggggacttcagctgaaaggctgagcacctgaatggtctgaccacaatttctcatctcagcagttagcagctaataaggtcccctgttaaaaaa

SEQ ID NO: 32892 - DNA, 378 bp, Homo sapiens
ggctcaagtgatcctcccgccttggcctcccaaagtgcagggattgcgggagtgagccaccactcctagcccatttttttttctttgaatatttgtccttacccacaaagcatgaatttgttagtgaaattcattcatctttgttctctacccccattgatggagttgccaatgggttggaaaagtgtgataatactcatttctctctactctttttgagccgtgcttagttttgcagccctcttctggcagctatgacctagctttgtggtttgtgtatgtatgagtatatatacatatatatgttttctgaccttagtttctagttccgttttatatccctaccccatcctccttgttgatacataacaagtgtag

SEQ ID NO: 32893 - DNA, 343 bp, Homo sapiens
aattaatgcattaagcactcatctatgcacttttcatggcatagagccatttcatcctcatggcaactcaacggtttaagtgccaggtgtagccccatttcacagatgaactagttgaggcatagagaagttcatctgactgtcccagggtccctcgttagtaactagcagagcctggatttgaactgcagcattctgactccacagcctgtgctcccccccaccggattccactgccattgggtgggttttgtgtctatccacaggtgcctcttgaaacaggtggggcagttgtgtcatgtgattttgagcaagttgtttcttttcttcaggcttctgcacc

SEQ ID NO: 32894 - DNA, 408 bp, Homo sapiens
  misc_feature (364)..(364): n is a, c, g, or t
gaatttttagtttcaggagtcagtgaccttcaaggatgtgtccatagatttctcttgggaagagtggattcaagcagattctgctcagaggatgaccgtgtatggggaggtgatgctggagaactacaggaacccggtctcactgggtaaggacttcttgtaactcaaaacccacctcttgacaatcataaggcctgatcataaggcattgttttagggtgtttgcttggtgtcctctctttcaaggcagaagattgaaattttctgtaggagaatgggaaaatgggggaacttcataagccacaccttccttgttttcagaagccctgaagggagaaatgatccagaactctgctagggattnggtttttagggctcagtttcaggaaccccaattttatgtctctc

SEQ ID NO: 32895 - DNA, 540 bp, Homo sapiens
ttctggtgattatctgctgttatgtgaaacacactttacaaaatattgttaaagaaacagaagctcataacaggaattcaaacaatatattataagccagttcaggataattcatagaggatattccttatttttttcatcagtcagcgtttcaaaatgaattaagaacacctgaaacgttaaaatggcggtaattggctttttcccagctaaaaacaagagctaacaaaagcagagatcggtagcgaatgcaaggatgctgtaaatcatttttgtctacttgaaaattcactccttgatttacatacttagagaatgggactaattctctatcatacccaggaaaaaaaaaaagaaaagcaaggaagcatgcaaacaaactaaagaaaaatggggttaataaaggaaaacttagaaaagtgagggaagaagaaacgagagaaaatgaagttagaggaatactgatggacataactttcttaaaagggcgttggctttttaaattgcaaggtcacataatgttcattgtagaaaaagaaa

SEQ ID NO: 32896 - DNA, 444 bp, Homo sapiens
ggaaatcagatgagtgtttgccaggggctgggcagagagtggaatggggaatgactaactaatgggtccaggattttcttttgtggtagtgaaaatgatttgccactacatagtggtaatgcttgcactgcattgtgagtgtcctaaatgccattgaaattaatacattttaatggttaattttatgttatatgaagtttacaaactcagtttttaaaagtgccaatacttttaaagctatcattatttccatgaattattaattatatttgaaaagtactccagttatcagtgaaacaaacttgttttaacagctatagtacatggtggccagtcaaggtgcctcgtgcctgtaatcctagcactttgggagtccaagatgggaggatcgcttgagaccagtggttcgagatcagcctggtcaacagagtgaaaccccatatc

SEQ ID NO: 32897 - DNA, 633 bp, Homo sapiens
atttttaaagtatattttgttttgctgggattacaggcatgagccaccgtgccaggcctatgtttgtttcttttgccaacaatacccagagcctaggacagcatctggaaatgactgatcctttgatatgtactaaaggaataattcaacagattatatgtttcaaagtgagacagacatggtgtggtagtcttcctccaggatggcacccaagggctccacctcctgatattcttccatttgtgtagttccttcccacactagtaggattggtctccactaccaaaagagtacagcagaagtgatagcatgttacatataagatgggcttataaaaggcactgttgcttctaatttgattgctatctctctttcttctatcacttgctctggaggaagccagttgctatgtcatgaactgctctatgaagaagcctgtttgtcaaggatctgaagcctcctgccaatagctgcatgaacgagtttggaagatccagttctacccttcagatgactgtagcttgacgtcaacctcatgagagaccctgagacagaaccacaaagcgaagtccctcctggatccctgatgctacacaactatgtaataaatgtttgctgttttaaaaaattagt

SEQ ID NO: 32898 - DNA, 431 bp, Homo sapiens
gtggtgtggtcctgcaactccagggcagacctagactcatgggaaagtccctgctttgtgatgaggctgaaagaggatgagtggggagtggccggaagaagaaagggtgtaaccagagaccagtgtcaacaaggaatctggcttggaacgcttttgtctgcagccctctttggagcgtgacttgctctttcagagagccagttgctatgtcatgaactgctctatgaagaagcctgtttgtcaaggatctgaagcctcctgccaatagctgcatgaacgagtttggaagatccagttctacccttcagatgactgtagcttgacgtcaacctcatgagagaccctgagacagaaccacaaagcgaagtccctcctggatccctgatgctacacaactatgtaataaatgtttgctgttttaaaaaattagt

SEQ ID NO: 32899 - DNA, 406 bp, Homo sapiens
acagaagcaacattcaaattaacatcagtcaactgatggaatattttagatgaagtaagagaagccaaggcatgtaccctcaggctctgggcttctccctgcaaggttgggaagaaatttggaggaggcaaagtgggagcaagtcagatggaagagacattatgggtcagagccagttgctatgtcatgaactgctctatgaagaagcctgtttgtcaaggatctgaagcctcctgccaatagctgcatgaacgagtttggaagatccagttctacccttcagatgactgtagcttgacgtcaacctcatgagagaccctgagacagaaccacaaagcgaagtccctcctggatccctgatgctacacaactatgtaataaatgtttgctgttttaaaaaattagt

SEQ ID NO: 32900 - DNA, 616 bp, Homo sapiens
gtggtgtggtcctgcaactccagggcagacctagactcatgggaaagtccctgctttgtgatgaggctgaaagaggatgagtggggagtggccggaagaagaaagggtgtaaccagagaccagtgtcaacaaggaatctggcttggaacgcttttgtctgcagccctctttggagcgtgacttgctctttcagaggtctgtatttctctacctggactaccctgagagctaaccccagttattggtctggaagcaacgaatgaaggccggggcagagcttgaggagggcaacatcattttgtcacagtcgccatcaagaatctagttgcagactgggcgctgtggctcacgcctgtaatccctgcactttgggagccaagagccagttgctatgtcatgaactgctctatgaagaagcctgtttgtcaaggatctgaagcctcctgccaatagctgcatgaacgagtttggaagatccagttctacccttcagatgactgtagcttgacgtcaacctcatgagagaccctgagacagaaccacaaagcgaagtccctcctggatccctgatgctacacaactatgtaataaatgtttgctgttttaaaaaattagt

SEQ ID NO: 32901 - DNA, 365 bp, Homo sapiens
tttccagacctcactgcaagaccccctaccccaggctcaagtcagagagagaggaggtggcagtgccggaatttcagctgcgcatccgtcccagctctgcactgcgggcgtccgtcccagctctgcactgcgtgcgtcccgccctggctggagcttgcagacggcagccctgcaggaacccaccggggctgactccttcctccccagatcccacaaaacagcagtggatctccactcggcacgcattcccctctacattcacacgaagtgtcttttaatggaaagtgtataaactcgttaattttggttactgcactgaagttaggcaagcttctgcagctttattaaatgaccaatgctgtccc

SEQ ID NO: 32902 - DNA, 1127 bp, Homo sapiens
atgaagagagtttttctaattgaaaaatctttaagtcattcagaagaataaaactgaaaatgtttccaataactgagccctagaagctcttaggtctgaagggttcagtcccagtgaagtccacaagggcaatatgagggccctcactggggtgtctctgcatggggaagcaggtagtactgtgagccaggagcaagtctggggttcctttcctttcctgcttccaccatgtatttagccttttttcacagcttcagcggtggcctgtgctctccaaggcactctggacatgtgtctgtccacctccccaagtgctggcttttagctaatgtaagctccattgggatgcagcatctgtgtcttcttgaaggaactgcggcatcttggcaagttcagtcattgattcttaggcaggtgggtctcagtgttttggcctctctcaactctgggaatgtctccttgccctgtgtataccaacacaacagccaacatgcacgagagttcaaaaagggcagctggggtgatacttacctgattcggtgttttcaaatttccgagtttcacccttagggagctagtttgcagtttggttctttgcagtttggttctgagagccattcctgaagttcagttgaaaatctgccttcacctttccatcaaattttaagttatctttaacccctaataaatctctataggcttaaactatttgagtgtgctgtttcttttcctaaaaaccagaaaaggaaatatgagtgatatcacattcaattttatgtctacaaacttattacatcctttttaaaaataatgttcttaaagaaatgaatctaggccgggcacggtggctcatgcctgtaatcccagcactttcggaggccgaggtggtcggatcacgaggttaggagattgagaccatcctggctaacacagtgaaaccccatctctaataaaaatacaaaaaaactagccgggcgtggtggcaggtgcctgtagtcccagctactctggaggctgaggcaggaggatggtgtgaacctgggaggcagagcttgcagtgagccgagatcgcgccaccacactccagcctgagcgacagagcaagactccgtctcagaaaaaaaaaa

SEQ ID NO: 32903 - DNA, 408 bp, Homo sapiens
tcctcagtgtgggggcttcattcaatcagttgaagtcctgagaaaaaaagatggccctcccacagtgagaattatcctgttcaacagcatttcggacttgtcagcctccataatcatgtgagctaatgccttagagtaaaactgcctgtctgtctgtctgtctgtctatctatcatctatctttctatctatctgtctattgcctactgtttgtttctctggagtactctgttatgtctgcatttctgtcaccttcatctgttgacaatatggggttaatattgccttgattctcagactgtgtggttggagggaagtgacattcttgtcaagtcaaatggctttgttaaaataatctcagaaaagctgggtgtgtcctgtaatcccagcactttgggaggtcaaggt

SEQ ID NO: 32904 - DNA, 266 bp, Homo sapiens
tgcttcaggtccttaaattatccacttaattctaatgtgaaaaccattctctttgtcatatggcaacttagagtcaacatttttatattcaaagtctttaactgagaaaactaagcactagaaactttcctctccttgtttcttgctgccaggcaagcagaaacaaacctagaaatgtgtttaaaagtagaacggtgtcagcagtgaatggctgactaacgtccactgctgaagagcctcttgtgatgtgtaaaatagaacatcgt

SEQ ID NO: 32905 - DNA, 462 bp, Homo sapiens
ttcttgggaggctgaggtgggagaattgcttgaacccgggaggcggagattgcagtgagccgagatcacgccactcactgcactccagtctgggcaatgggaatgagaccctgtctcagaaaaatgtaaaaaagtgcttgctgctgttgtaaccaagcgagttatagagaaacaccacactttgagacaaattgaggagtcctttattagctggcaaccgagaggcagctaatgctcaaaattctcttggccctgaggaaggggctagttttgtttttatactgtggtctaaataggggaggggggagtttagctgaagcaatttttacagaagcagaactggcaaaaagttaaaaaattaattggttacaaaagcagttacaaaaaataaacagttccaggtgcaggggcttaaactatcacaaagggataaatgcaggggctttatgtgccatccactgc

SEQ ID NO: 32906 - DNA, 594 bp, Homo sapiens
acacggacaatggtgaacacatgaaaagcacttcgcgggacatgctggggaacccactaaccaatagtcttttattgactttccttgtgttactggtttaaacaaattttttttgctctttttgtttgttttctagtagagtagtcaccaatgtttgtgtagacagagggttaaatctctgagtcagaactccccgctttctttcagcatattcaaagatttcaggatgcatgagcaaaaggtatcaaatggtttccatttaaaaggggacttgaaattgagccatagggcttggctgcagtcctcatgctaagagatttcaatggggacaggctaacctttttattgaggagatgtttgcccattaccaagaggagaaataaagcaggaaagaggtgcagaggcatcccaggaaccaaatgaaatggcctctttaaatggccattgttactatttccaacatatttttttttttttttttttttttttttgagacagagtctcgctctgttgcccagactggactgcagtggtgtgatctcggctcactgcaacctccgcctcctgggctcaagcgattctcctgcctcagcc

SEQ ID NO: 32907 - DNA, 115 bp, Homo sapiens
cttcaggataaaatatcacaattagaagaatggtttttaattcagcccctgaaaggaagcctttgctagaaaatgatggatgagggtagaagagcaaagagaaagaggaaaacaa

SEQ ID NO: 32908 - DNA, 384 bp, Homo sapiens
gttctacagatcactcaaatgtaacaccttcccttcctgccttcaacagatatgacatccccccagctgcttgagccaaaaactggttgtcatcctcgcctttccctcactgtctcctctctgttgcagttaactaccaagttctatcaattctaacttttaaaaacctgccattcgggtggatcacgaggtcaggagaccaagaccatcctggccaacatggtaaaaccctgtctactaaaatacaaaaaattagctgggcatggtggcacgcacctttagttctagctacccgggagactgaggcaggggaatcacttgaactggggaggcggaggttgcagtgagctgagatcatgccattgcactctagcctggcgacag

SEQ ID NO: 32909 - DNA, 449 bp, Homo sapiens
gaaattgcttcattgcacttgagcctgggcaacaacagtgaaactccattgagtataaatggataataataataattaatgataatcacattattattataacttagaaaaatactctactagtgaacatttcaattattaatgataacaatgcatcagtatataagaataaaatataaatgaccaatgagcacatagatgcttagcatctcttttcattagaaaaatgcaaatcaaaaccacaattaaatgtcagtttacacacactaggataggtatattcaagaaaagaaataaatgtggatgagaatgtggagaaattagaaccctcataccgtgctgatggcatggtaaaataatacagccattttggaaaatattttggcaggtcctccacaggttaagatagagttaccatatagctcagcaattctactcctgagtatata

SEQ ID NO: 32910 - DNA, 5213 bp, Homo sapiens
cagccaggtcggccgcccccaccaggtccagttccagagcccaggccggtcggccgggcccgcgtgccctcggcgggctgcgcagagcgcgggagcggtttggggctgggcatgctgggagcccctcgggcaacggccgccgccgccacagccacacagccgccgccactgcgtccgtccccggtgagcgccgctgacgcgcggagatgaaattcccggcctcggtgctggcgtccgtgttcctgttcgtggccgagacaacggcggcgctcagcctgagcagcacctaccgctcgggcggggaccgcatgtggcaggcgctgacgttgcttttctcgctactgccttgcgcgctcgtgcagctcacgcttctcttcgtacaccgcgacctcagccgcgaccgcccgctcgtactgctgctgcacctgctgcaacttgggccccttttcaggtgttttgaagtcttctgcatctactttcagtcaggcaacaatgaagagccttatgtcagtatcaccaagaagaggcaaatgccaaaaaatggcctctcagaggagattgagaaggaggtgggccaggcagaaggcaaactaatcacccaccgatcagcgttcagccgggcgtcggtgatccaggctttcttgggctcagccccccagctgaccctacagctgtacataagtgtcatgcagcaggacgtcactgttggaagaagtctcctcatgaccatatccctgttgtccattgtgtatggagccttgcgctgcaacatcctagccatcaaaatcaagtacgatgagtatgaagtcaaagtgaagcctctggcctatgtctgtatcttcctgtggaggagctttgagattgccactcgagttgtagtcctggtcctctttacctccgtcctgaagacctgggtggtggttataatactcatcaacttcttcagtttcttcttgtacccctggatcctcttctggtgcagtggttccccattccctgagaacatagagaaggccctcagtagagtgggcaccaccattgtactatgctttctaactttactctatactggtatcaacatgttctgctggtctgctgtacagctgaaaattgacagccctgacctcatcagcaagtcccataattggtaccagctactggtgtattacatgataagattcatcgagaatgccatcctcctcctcctgtggtatcttttcaagactgacatctatatgtatgtgtgcgcacctctgttggtcctgcagctgctcattgggtactgcacagccattctcttcatgcttgtattctatcagttcttccacccttgcaaaaagctcttttcttccagtgtttctgaaggctttcagaggtggctcaggtgtttttgctgggcctgcaggcagcaaaaaccctgtgagccgataggaaaggaagatctacagtcatccagagatagagatgagacaccttctagcagtaaaacaagtcctgagcctggtcagttcttgaatgctgaagatctctgctctgcttaatgggacccaaggtctcagagcacaggcatattattttctgggtttgatactcgttattcatacaaataatgagccctacacagggaacaaggcaggaagttagctgttaactccttgtgagctgcttctctttatagagctcttgggtatgtagaactgtatgggaagaagccaggaaaacctctgagtgttgaaggggcaacccaaggcatcacagttcacaggtaaccatgttgtgttcttctaggcattactggccttttcactgacaagttacccctgaaatctgagttgtactggttagattcattaggttgaatgaggagaggggcttacctgttctctagttttccagactgctggtttgggtaacctgaagttttatgatccctgaacatagttttcacccaagagctgtcctggtgaccaaaaaagattactagggttttgccatcagcaacatcattcctgtcagagctttcagggagggctgttcaagtttggtttttgaatagacagaggtttcattttcatctcattagggcttttttgtacatagccaactgtagccaccctggcatgctgtctctaattgattcaagggcctagatttggagactttgttccttagcatccatggatgcagaaatgagtgataaatttggccatgaaagccctggaattttaggaaagttgtgattctttgatatgttgatgaaattctggatcaggaggggtgttaaaacatcaaaatgatggcgacttgtataagtagaattcttaccatcttactcctgcctccccattccttgcctgtcaggaccattttagaagagttaccttggttaacttaagggttttttagaaaaccccacagaaatctctcacccagttcaggtgtatagggaattttcattttcattatttcaaggaatagagttttcctcactaccacttgtaattagagattgacttcagaaactttttctaaattataaagacggaatgaccagaaaatttttgtctttcatggaatgcaatttgacttggcataattgtgagttaatttgataaagatctccagttgtatcctctgacaccctttaatgttctatataatttttcctttaatcggagaccctatttgtttcattaaagaggattgggtagcatatcctcaattatcttggaaaaatgcgtagatctagtgccattatttctaccattaaaatcttgaaagcgaaatacttgaaaagaggtgaccataaagatcacaccaatttagaatgaatattaaagtctgagaaatttacaaaagggactctatggactcgattttaccatatggaatagggatccacttctctgttaacctacaaaacgtatttatctggccattgcacttcggataattttcatttttaattcctcttggtgtcaaatttttaagtaatttcatgcacacaggagaaaatgcaatttgataatcagtttccactacattcggaggtcaagaaagcagtatatattctttcacaaggcatccatactgtttaatatttatagagttcatagaaatacatcaataagctcctaaattatagagcctcaattttggtttttctcatttgaaatgtttttgatttatcaatatttgtggtttaactttgtgggggtgtccaggcagtagatcattttttgtctatttttaaccaaataagaataacactcaagactatgttctccatcccaacacatcacttaccacttgcactattcttaataggcctaaaatagtgagcatatataatcaaaataatacttcatacaacatatacttccatgcactcttcatgtaatcacatatgtgcatagatacacaatcgtattacataaaacacccttgaaaatatatgactttgaataaaataaagctaccatgttaatacatcattttttgtttcttcctaattaacaaaagggctctataatgattaggagagctgtaaggccattctttagtcattccaagtgtatatttgtatcacaccagttacttgtgttcattgacaccaaatattttcaagctttttgtgagaaagagattcttgccttgaggctctgcagtggcaaatggtaggggcaatagcgctcccttttcacctgaaatgccttcagctcaggccttgggagtgaggtgtgggagtagccaccagcctcccactgactaggcatgttaggaattagacaaggatggagagactggttttttccagccttggtttggaagcttgtctcaaaaaccattacaaaatcttaaccttcaaatacattctaaatcactttaatttagaagataggtgagcaacttgagtgatcccaaaccaaactaacagtgctggtttgtccgacacccaaagcccacttcacacatttataaggacagagatttggtaactcatttgggtattttgtcagttttaacccttaatatacaggtatcccagctttgggcacatgtatgtccattcactttcaggaaggggtgtcagtactttctttctgtgtggtgaaaacataagccatggtgaactgataatttttgtttttaaattatttatattactgaattggcaaaattacagttcacactgcagagctaggttgtcctattggcataaaacaaaccagcaacttttctcatgtgtttggagttaaaatgtgtttttcagttataatttcaatttttaaatttcttggtgctttgtctaattaattacatcccataacttgtcaggatagttgctccaactgaattgctatcatttggctggatgggggtgaagtatgtcttcaaaatatattgaagtaagttcatcaaacatgtttagacttcctctcattgctggagacagcccagtgtagagattggcacttccctgtccagcactacaacttaattgctctatgcctcagtttccccataatacccttttccaacctacctcacaaggttatcagaaagatcaaattaaataatagatgtgaaaatgctttgaaaatgtttttaagtgctatgcatatttatagagttattatagttattcaaatccataagcaggttatttttatttttttactgtttgaaaagaaataagtagtgtcattcatatgagttcctgagtggatatgcgaatctttggtcttctcgacaggtgccctttctcttaccactagttgcttacaaaaatagcacccaaacacatggcacttggaagaaaaagacccactgaatctgagaaagtactttctggtggcaaatgaatttatcattttagtatagttttcgataaaggatatagcaacatcttttgataattgtgctttacaacttgaatgctgattcaaggcattatttggatgtgagtttaatcttttcagccttgtaaatgggaaaatatatattaaaattgattgtcaaatacagcatttctttggaaaccaccttaaaacattagtgctatggttatgagtgtatgtgccagtacttaccagtcaatgcattgtggatatgagctttcgttgactgcttctctgcagtcgttgatgctaataaatattgtcctgtttcttcatataataaattaatttttcaatttctccttgtaaaaa

SEQ ID NO: 32911 - DNA, 873 bp, Homo sapiens
cagccaggtcggccgcccccaccaggtccagttccagagcccaggccggtcggccgggcccgcgtgccctcggcgggctgcgcagagcgcgggagcggtttggggctgggcatgctgggagcccctcgggcaacggccgccgccgccacagccacacagccgccgccactgcgtccgtccccggtgagcgccgctgacgcgcggagatgaaattcccggcctcggtgctggcgtccgtgttcctgttcgtggccgagacaacggcggcgctcagcctgagcagcacctaccgctcgggcggggaccgcatgtggcaggcgctgacgttgcttttctcgctactgccttgcgcgctcgtgcagctcacgcttctcttcgtacaccgcgacctcagccgcgaccgcccgctcgtactgctgctgcacctgctgcaacttgggccccttttcaggtgttttgaagtcttctgcatctactttcagtcaggcaacaatgaagagccttatgtcagtatcaccaagaagaggcaaatgccaaaaaatggcctctcagaggagattgagaaggaggtgggccaggcagaaggcaaactaatcacccaccgatcagcgttcagccgggcgtcggtgatccaggctttcttgggctcagccccccagctgaccctacagctgtacataagtgtcatgcagcaggacgtcactgttggaagaagtacgtgtattttttatttctgcctgcatttggggatcaaaatgagaagcaaaatatgcagtttattttgtttcaaaggaaatttgttcttaagtgcacttaattctgaatctgtgttctagttactatgctcaaaactcaattaaaataacaacgttt

SEQ ID NO: 32912 - DNA, 518 bp, Homo sapiens
tggtgattgagttttatgcctctacaaaataggttgtgaattaacttcaacatctgttgaaatgcatcaactgggaaatgtccacctccttaatacagggctcaaataagaataataccttgggataccacaacatttacatttgataccccctgtgatcttagaggaagctactatacctaaaacaattatgccttcctttaaccatgaacatagtatcatttttgcctgcattctctataaatgtacccattgtgcaaagatatcccacagtggggatcgattccttgacttaatgagtcatgtattaaaattaaatattttccattttcaaatgttcttgacaaatcgggaacccctgggacccactagtttaaataagttaatatgggctaaacataatgttttggcaatatggtaaaatgttttggaagggttattggggtattcccattttcatccttttgcgagttttagtagattgggtctttcaaggaattaattggtccaactgatct

SEQ ID NO: 32913 - DNA, 701 bp, Homo sapiens
tcccctaaaatctctcctcttgacgtcttttttctggcataaggacccggagctttgaggagcgcagcagcccagaagctcctaaggagagaagctgttttggtgagattggttccaccaggctacatgccttgactgggacagaaatgggctgggaaggccgaaatttgacttctgcacctggatttgggctaaaaagtctcacagctcagcctccttgataagggttcttctatctcccctctatacttcctctgcagcagaaaagagtatcttggccgtgcagggaacgctcttctctcactctcgccactggggttaagggcagcctacattactatagctccaagtcttggttgcccccagagagaggcagagatgtagcctgcccacatctggacacttgaagactctccaaacacctagaggagctgtggattcaagtgaagcaaccatctgatgccaccacggtccctccttccctttgccttcccttcttcccacaaaagagaagcccaaatccgccaccagaccagcccatctgcccgtggaaaccaagggaaccaaatgcatcgtactgggttgcaggccttaatctactctcgctgaattattcagggatggcattaacttataaatgagtgtgtttgactgattttgtggttgatgtacagataaagtctaatgaaagacagttataa

SEQ ID NO: 32914 - DNA, 1518 bp, Homo sapiens
catgccaacttcattgaggggaaagaggaggaagcttcatattgagttaatgttttatacttttcaactcatttctccaaccttagttcatttgattcttaaagcatctactagtgtcagtagctgtacacttgtacacataaagctgaacaagatgaaaatggcatctcctggctgtgcaacacaatggtcctgctgaggatgtgaatataggacttgatagtcaactattcttgctatataaacagagatactgatgcagaagataagtaagtagtatttaagagttcacagtaaggtcattgcttttccccattttatgatttgtagtgctttctctgattccatttcctaaatctttcatccattaactatactatactatatactatagcagtagtttacctcaccctccttctatctcgctacacggactctttatcagtaaagttagcataacagtaggatcacttccctgacacatgttgtttgtgagaatgaaagtgagacaatgtaggtgaatacaactttattaactctagaatactttttatagaagttatttgtctttccatgtacctcagattttaccaactgatatttacttacctgcctctgaacacataaattttttaaaaggatgtgatttcttgctcatgtagttccctcagctcttctccctcagccttaccccttctcctcatgccattcaaagatcgtatgtgtttcaagaagactacactcagctgacacatccttcaggaaaccttctataattctgtgtcgtatatgaagataacctctccttatctcctgagttagccttgaaataccacacagtgatattgtgcctcatacaacattcatttgtataattggtttaggccatcttatagcctatatactcttcgaggaggggtactatatcttactgatgtttatattctctatacagaattttttaagaagagtcaaagaacaaatagtatttgttgaaattaattcaatttcattaaaccaatctacatcacgttctatctatattgtagcagttattggtgttaacttgcaaacattccattgaagttattagttgaatgctcgagcttagtgcaaaaaagctgattattaaatattcaggaattttgtgaatctgacaaagtgttggtaccttgaaattggcttcagtgggatcgtttatctcatggagattggcaaactcttaaaaacactgctttttgttttgggagagccatttaccggtatatcattggttgtatgtctgtaacccccactagagtatgagcttcttcaagttcatctctgcctgaatgcctcgactgtgataggaacattctttgctgaattaatgaataaataagtgattgagtatatcagctgctttattcctctactgcctgacccctgctggcagagaccgaatttcagaatctagtgaattttttgagactgagttttaaaatggtccattgtcatagactgtagtttctttctgct

SEQ ID NO: 32915 - DNA, 424 bp, Homo sapiens
tcctaaacgaaagagcccccaccttccgccagccaccacctcttctcagcttctctgtcctgccccaggcaccttccctgcctcaagttcccccaggggctccgtcttaaccactctggagcagtaagtccctcatgggaagggggcaccccaggaatctggacagagtgtaggtgtcccccatcttcatccaggtgatggttacatggaaggccccagaggggacccctgcacactccctgcactgcacacacttccctgtatgtgtggactcctcagtacagagcaaaaagattgtcctgtgaaaaaggaatgaaacattgattacaggtgagccaccgtgcctgtcatcacagccctttcggaggccgagttggaaggatcgcttgaggccgggagttcaagaccagcctgggcaacttag

SEQ ID NO: 32916 - DNA, 220 bp, Homo sapiens
actcctacccacctagtagggtagaggttcattaagaaaattatgtgccttaaagggaatagataattacatttttaaaaaacaactttgaggctgggggcggtagctcatgcctataatcctagcacttggggaggctgaggcaggtggattgcttgagcccaggagttctaaatgagcttgggcaacatagggagaccccatctctaccaaaaaataa

SEQ ID NO: 32917 - DNA, 802 bp, Homo sapiens
tgagtatgaattctggtgtcagcattcactaagcatatgaccttggacaagtgatttaagtttcttttaaacagagaatagtaatacctacctcatattattattgtcagtgtatcatcttacaatcacagtctttctccttagggctgggctcagtgggtggattgacactgcagaaatggccagatctaaaggatcaacatttacgtagctgggaaatgtagctgggacttcagtttcactgcccctggtgatttttcctaccactaagcagctcagtccatacccctacgagacccacaagcttatgagatactgttcttccaggaaagcagtggggccagggccaccttttaattgtgtttcttggcctggtcccatctttctcacaatacatagcaacagttatttacttgctgattttctaatgcacatcacacatagtcatattaaacacacacacacacacccacacacacccccacccctcaagaaacattttctgagacgtgatttcctgatttcatcaaaaaagaaaagagcgggccaggcacagtgggaagtcaaggtgggtggatcacttgaggtcaggagtttgaaaccagcctggccaacacggtggaacctcgtctctactaaaaatacaaaaattagccaggcgtggtggcgcacacctgtaatcccagctactggggaggctgaggcaggagaattgcttcaacctgcgaggctgaggttgcagtgagccgagattgcgccattgcactccagcctgggcaacagagtgagactctgtctcaaa

SEQ ID NO: 32918 - DNA, 311 bp, Homo sapiens
ctgaaagtcagagacatacttaagttctaattctagctgctctgcttctgacctcctgtggggccttaggcaacttgcactccttctctgggccttggtttccccagctttgacagctgatgtccctgagtcacgaaggggtacttctggcccacgaagcctgacaaaggacaggttttgccaaggctcttcagagaggtgccccccggggtaaggtgatccaaatgagcctgctcttccaggaagggaagcattggcacaagggctcccctcttgcctgcaggacctgtgggcacagacagtggcagcta

SEQ ID NO: 32919 - DNA, 393 bp, Homo sapiens
ggggcatttattacgtagaacaactgctgtatgcctaatataaaaggattataaatgtaactaaaatacctattataattatatacaacaaaagatacttgggataaatctaacatggcaagattgttttggatgaaacataaaattttttaaaatcaagtaggggaatgggttttgaggaaaggtactctgggagatttaattatgtctatgctgtttcatttcttagtggttaggagcaaagatgaaaaaaatactaagatttggccaggtgcggtggctcacacctgtaatcccagcactttgggaggccgaagtgggcagatcacgaggtcaggagttcgagaccagcctggccaacatggcgaaactccgtctctaccaaaaatacaa

SEQ ID NO: 32920 - DNA, 394 bp, Homo sapiens
cagctggacaggtgtctccaagaagcagctcatgtggcttctgaaccgactacaaggcctgcaggagctggtgctctctggctgctcctggctctctgtctctgccctgggctcagccccactgccagccctgcggctcctggacctccgctggatcgaggatgttaaagactcccagctccgggagttgctgctgcctccaccagacaccaaaccagctgagcgccctggacctgagccactgcgcccacgtcggggaccccagtgttcacctcctcacggcccccacgtccccactccgcgagaccctggtgcacctcaatcttgctggttgccaccgcctaacggaccactgcactccagcctgggtgacagagtgagactctctctctta

SEQ ID NO: 32921 - DNA, 4652 bp, Homo sapiens
cagctggacaggtgtctccaagaagcagctcatgtggcttctgaaccgactacaaggcctgcaggagctggtgctctctggctgctcctggctctctgtctctgccctgggctcagccccactgccagccctgcggctcctggacctccgctggatcgaggatgttaaagactcccagctccgggagttgctgctgcctccaccagacaccaaaccagggcaaacagagagccgtggtcggctgcagggggtggcagaactgcgtctggcaggtttggagctgacagatgcctccctgcgtctcctgctgcgtcacgcaccccagctgagcgccctggacctgagccactgcgcccacgtcggggaccccagtgttcacctcctcacggcccccacgtccccactccgcgagaccctggtgcacctcaatcttgctggttgccaccgcctaacggaccactgcctcccgctgttccgccgctgccctcgtctacgccgcctagacctgcgctcctgccgccagctctcacccgaagcttgtgcccggctggcagctgccgggccccctggccccttccgctgccctgaggagaagctgcttctcaaggacagctagttgggcgccccccaccctcccccggactcgacaggagcctggacctccggcttcatttcacccctgctgggaggccaggttcccacctcaccaccctgggattcctgagtgtcagtgacttgggattcccacccagggactcaagccagccacccccttctttcccccctgcactgatatctctgggggtttctccttcctatgtcctgcccctgctacctgcttcattgtccatcccctgggggagtgggtcagaggtactggagggtgctgagccgaagggacggtgggaggggggttatggtgcaagtgttgggggggagaatggggaaaggacacacacaggatatgggagccaggggctgggggaggtggaaggggcggggggcggggcagacagcagaccaccaagggttcagggaacaaagaccagttacttggagtggggggtgggggtggggccacaaaaggaaaaccggaggagcaattggggatccaggtgtcagaggtaggggaaccaggggcaagctggggctgagctggaggtggggatgagagcaggtgtggggacagcaatacccccttgggggtcacctctctgcttcccccctccccaggcttcagttccttccccctgaccctgactccttgaacgtcactgaaaacggcagctattgcaaggagtgggggccgcgggcagccgctcttcagctcgcggcccaggggagtggcgaggggcgccccaaccccctgcccgcctctccgcacaatacttgaacattcatctgtactgaagtgttacttgaaccgggggaatctcggacctgggggagccggggtgtgaggggactggaccagcttggactgagacctgagaccgggccggtgggcgcccatttgggactgcgccacccccaggcttgttcttgttttactgtattgagcggcggcacccgccggacccgcattatggctgggggcgccagcccaagaatggggaccatgggactcctccagcctggctcttcccactctttcatcgtcatggaaacttgtatcccatttgcccagggaactgccactcctggttgccatggaaatagcagccaacggacacctcccgatgccagtgctaaggctggaaatggccccctcttagttgccatgggaacctagtaacagactctgctggccctccttccctgccccttcctcgagcgcggggtggggcttcgggaccccggggatgagccgggccaggtcccgcccctccgcgcaggcctccggggggccggggcttaccatgtaggggaggggagatctatccacatacctcaggtaacagggaggtgcgcgggtggggggagggctgggcggaccaaaggccggaggggtggggcctggggatagcgagaggcttgagaatggggccgcttgggggagggaagaggcagcccggcgaggggcaagcgggggacccagccgggctgggcccctgggccccgggtctgtacaatacggtttgctataaaactcaaaatcttccagccggggctgcggagttcgtgtgtgtatctgcggggtccctacctacagatgagtgggctcacctctcctggactcagggagggatttggaagtgtggacacctggggtgtccagctgtaccttggagggggctggggttggcgtgcacctcggtggggtccgggcgcttggataacgttcttggtgggtaggggtcgcggggaatctctgcgggcccgggactgcggggacttggtccccggctccaccccatcatgtggctagccccggctccgcctctgtcccagttcctgttttggcctccgctgtcccgctccggctcctggggctccccgcagacgctgcttttcttgctccactgggggtgcctcttcctgggcgcccgccgcctgcatcctgctcgccctgtctgggaatggggccgcccccgggcttgggccggcccggctggggcccccgaggcgcttccgccccgtagtgaccgcctggtgccgccccccccccaggatgaagggcggcgagggggacgcgggcgagcaggccccgctgaaccctgagggcgagagccctgcaggctcggccacgtaccgggagttcgtgcaccgcggctacctggacctcatgggggccagtcagcactcgctgcgggcgctcagctggcgccgcctctacctcagccgggccaagctcaaagcttccagccgcacgtctgccttgctctcgggcttcgccatggtggccatggtggaggtgcagctggagagtgaccacgagtacccaccaggcctgctggtggccttcagtgcctgcaccaccgtgctggtggctgtgcacctctttgcactcatggtctccacgtgtctgctgccccacattgaagctgtgagcaacatccacaacctcaactctgtccaccagtcgccacaccagagactgcaccgctacgtggagctggcctggggcttctccactgccctgggcacctttctcttccttgctgaagttgtcctggttggttgggtcaagtttgtgcccattggggctcccttggacacaccgacccccatggtgcccacatcccgggtgcccgggactctggcaccagtggctacctcccttagtccagcttccaatctcccacggtcctctgcgtctgcagcaccgtcccaggctgagccagcctgcccaccccggcaagcctgtggtggtggtggggcccatgggccaggctggcaagcagccatggcctccacagccatcatggtacccgtggggctcgtgtttgtggcctttgccctgcatttctaccgctccttggtggcacacaagacagaccgctacaagcaggaactagaggaactgaatcgcctgcagggggagctgcaggctgtgtgagactggtgttagccaccgctcactgcaagcactgcctccctccggggtctgtaagaggccgcaggggcctacagacctcatccccccatcccctggctggagccacttccagtggccactctcaggcagagttcagattcctgcccgcagggtcctctgggctgggccttggggcagctcccacattcccagggattttccccatcagtctgtcccttgggttttgcaagctactctgcacctgggctggcctcagttgaaggatcatgcagtagatagaggggaggcagggagagcttgtgggaccttcagtgctgactttagccaccatttccattcctatacaggatgtgaaggtcagaaggcagccaattgttggtttaattttttttttttttgagacagtctgtttcccaggctggagtgtagtgatacagtcacagctcactgtagcctcgaccttccaggctcaaaagatgctcccaccacagcctcccaggtagtgagtagctggtactacaggtgtgtgctgccacacccgactaatttttttgtagagacggggtttcgctgttcccaggctggtctcaaactcctgggctcaagtgaacctcccgcctcggcctcccaaagtgctgggattcctttctttatttctgtagaatctattttatggttggcattttgggggaagatttcgatgggttccacattcttgctttagttgttgtagagggatttgggtgtttctacccaaggcattggtctagcttttcctacaatgaacctatctttggaggttcaagctccccaccttcccccactgtggtgacctgtggccacttgcagaagggatggtgcctgacccactgccctagccccacgctatgcaccaaacttgttctccccgtcctggtccagggctggggtctttagagactgacagcctctgccccaggcctgagtccttagcaagggttgggtaaggaggttttaagggagaaggtccagtccttagcccttgaaatacaaagctcttctgacactgaatttggatgcaccttgttttatataataaatcgtgtttcacaga

SEQ ID NO: 32922 - DNA, 2889 bp, Homo sapiens
  misc_feature (54)..(54): n is a, c, g, or t
  misc_feature (60)..(60): n is a, c, g, or t
  misc_feature (116)..(116): n is a, c, g, or t
  misc_feature (118)..(118): n is a, c, g, or t
  misc_feature (137)..(137): n is a, c, g, or t
  misc_feature (140)..(140): n is a, c, g, or t
  misc_feature (144)..(145): n is a, c, g, or t
  misc_feature (147)..(148): n is a, c, g, or t
  misc_feature (174)..(174): n is a, c, g, or t
cagacaagaaggagaaccccccagagatatcaagtgcagggggaaagaaggggngctgcngagtccctggttggaatccaagtcactgcactcaggatcccaggtggttaggtggnanctggcctcccagcagggtnaantganncnnaggtccaggctcctgtcgagtcgggnaagggtggggggcgcccaactagctgtccttgagaagcagcttctcctcagggcagcggaaggggccagggggcccggcagctgccagccgggcacaagcttcgggtgagagctggcggcaggagcgcaggtctaggcggcgtagacgacgggggacccagccgggctgggcccctgggccccgggtctgtacaatacggtttgctataaaactcaaaatcttccagccggggctgcggagttcgtgtgtgtatctgcggggtccctacctacagatgagtgggctcacctctcctggactcagggagggatttggaagtgtggacacctggggtgtccagctgtaccttggagggggctggggttggcgtgcacctcggtggggtccgggcgcttggataacgttcttggtgggtaggggtcgcggggaatctctgcgggcccgggactgcggggacttggtccccggctccaccccatcatgtggctagccccggctccgcctctgtcccagttcctgttttggcctccgctgtcccgctccggctcctggggctccccgcagacgctgcttttcttgctccactgggggtgcctcttcctgggcgcccgccgcctgcatcctgctcgccctgtctgggaatggggccgcccccgggcttgggccggcccggctggggcccccgaggcgcttccgccccgtagtgaccgcctggtgccgccccccccccaggatgaagggcggcgagggggacgcgggcgagcaggccccgctgaaccctgagggcgagagccctgcaggctcggccacgtaccgggagttcgtgcaccgcggctacctggacctcatgggggccagtcagcactcgctgcgggcgctcagctggcgccgcctctacctcagccgggccaagctcaaagcttccagccgcacgtctgccttgctctcgggcttcgccatggtggccatggtggaggtgcagctggagagtgaccacgagtacccaccaggcctgctggtggccttcagtgcctgcaccaccgtgctggtggctgtgcacctctttgcactcatggtctccacgtgtctgctgccccacattgaagctgtgagcaacatccacaacctcaactctgtccaccagtcgccacaccagagactgcaccgctacgtggagctggcctggggcttctccactgccctgggcacctttctcttccttgctgaagttgtcctggttggttgggtcaagtttgtgcccattggggctcccttggacacaccgacccccatggtgcccacatcccgggtgcccgggactctggcaccagtggctacctcccttagtccagcttccaatctcccacggtcctctgcgtctgcagcaccgtcccaggctgagccagcctgcccaccccggcaagcctgtggtggtggtggggcccatgggccaggctggcaagcagccatggcctccacagccatcatggtacccgtggggctcgtgtttgtggcctttgccctgcatttctaccgctccttggtggcacacaagacagaccgctacaagcaggaactagaggaactgaatcgcctgcagggggagctgcaggctgtgtgagactggtgttagccaccgctcactgcaagcactgcctccctccggggtctgtaagaggccgcaggggcctacagacctcatccccccatcccctggctggagccacttccagtggccactctcaggcagagttcagattcctgcccgcagggtcctctgggctgggccttggggcagctcccacattcccagggattttccccatcagtctgtcccttgggttttgcaagctactctgcacctgggctggcctcagttgaaggatcatgcagtagatagaggggaggcagggagagcttgtgggaccttcagtgctgactttagccaccatttccattcctatacaggatgtgaaggtcagaaggcagccaattgttggtttaattttttttttttttgagacagtctgtttcccaggctggagtgtagtgatacagtcacagctcactgtagcctcgaccttccaggctcaaaagatgctcccaccacagcctcccaggtagtgagtagctggtactacaggtgtgtgctgccacacccgactaatttttttgtagagacggggtttcgctgttcccaggctggtctcaaactcctgggctcaagtgaacctcccgcctcggcctcccaaagtgctgggattcctttctttatttctgtagaatctattttatggttggcattttgggggaagatttcgatgggttccacattcttgctttagttgttgtagagggatttgggtgtttctacccaaggcattggtctagcttttcctacaatgaacctatctttggaggttcaagctccccaccttcccccactgtggtgacctgtggccacttgcagaagggatggtgcctgacccactgccctagccccacgctatgcaccaaacttgttctccccgtcctggtccagggctggggtctttagagactgacagcctctgccccaggcctgagtccttagcaagggttgggtaaggaggttttaagggagaaggtccagtccttagcccttgaaatacaaagctcttctgacactgaatttggatgcaccttgttttatataataaatcgtgtttcacaga

SEQ ID NO: 32923 - DNA, 4900 bp, Homo sapiens
  misc_feature (4676)..(4677): n is a, c, g, or t
  misc_feature (4704)..(4704): n is a, c, g, or t
  misc_feature (4712)..(4712): n is a, c, g, or t
  misc_feature (4720)..(4720): n is a, c, g, or t
  misc_feature (4735)..(4735): n is a, c, g, or t
  misc_feature (4900)..(4900): n is a, c, g, or t
cagctggacaggtgtctccaagaagcagctcatgtggcttctgaaccgactacaaggcctgcaggagctggtgctctctggctgctcctggctctctgtctctgccctgggctcagccccactgccagccctgcggctcctggacctccgctggatcgaggatgttaaagactcccagctccgggagttgctgctgcctccaccagacaccaaaccagggcaaacagagagccgtggtcggctgcagggggtggcagaactgcgtctggcaggtttggagctgacagatgcctccctgcgtctcctgctgcgtcacgcaccccagctgagcgccctggacctgagccactgcgcccacgtcggggaccccagtgttcacctcctcacggcccccacgtccccactccgcgagaccctggtgcacctcaatcttgctggttgccaccgcctaacggaccactgcctcccgctgttccgccgctgccctcgtctacgccgcctagacctgcgctcctgccgccagctctcacccgaagcttgtgcccggctggcagctgccgggccccctggccccttccgctgccctgaggagaagctgcttctcaaggacagctagttgggcgccccccaccctcccccggactcgacaggagcctggacctccggcttcatttcacccctgctgggaggccaggttcccacctcaccaccctgggattcctgagtgtcagtgacttgggattcccacccagggactcaagccagccacccccttctttcccccctgcactgatatctctgggggtttctccttcctatgtcctgcccctgctacctgcttcattgtccatcccctgggggagtgggtcagaggtactggagggtgctgagccgaagggacggtgggaggggggttatggtgcaagtgttgggggggagaatggggaaaggacacacacaggatatgggagccaggggctgggggaggtggaaggggcggggggcggggcagacagcagaccaccaagggttcagggaacaaagaccagttacttggagtggggggtgggggtggggccacaaaaggaaaaccggaggagcaattggggatccaggtgtcagaggtaggggaaccaggggcaagctggggctgagctggaggtggggatgagagcaggtgtggggacagcaatacccccttgggggtcacctctctgcttcccccctccccaggcttcagttccttccccctgaccctgactccttgaacgtcactgaaaacggcagctattgcaaggagtgggggccgcgggcagccgctcttcagctcgcggcccaggggagtggcgaggggcgccccaaccccctgcccgcctctccgcacaatacttgaacattcatctgtactgaagtgttacttgaaccgggggaatctcggacctgggggagccggggtgtgaggggactggaccagcttggactgagacctgagaccgggccggtgggcgcccatttgggactgcgccacccccaggcttgttcttgttttactgtattgagcggcggcacccgccggacccgcattatggctgggggcgccagcccaagaatggggaccatgggactcctccagcctggctcttcccactctttcatcgtcatggaaacttgtatcccatttgcccagggaactgccactcctggttgccatggaaatagcagccaacggacacctcccgatgccagtgctaaggctggaaatggccccctcttagttgccatgggaacctagtaacagactctgctggccctccttccctgccccttcctcgagcgcggggtggggcttcgggaccccggggatgagccgggccaggtcccgcccctccgcgcaggcctccggggggccggggcttaccatgtaggggaggggagatctatccacatacctcaggtaacagggaggtgcgcgggtggggggagggctgggcggaccaaaggccggaggggtggggcctggggatagcgagaggcttgagaatggggccgcttgggggagggaagaggcagcccggcgaggggcaagcgggggacccagccgggctgggcccctgggccccgggtctgtacaatacggtttgctataaaactcaaaatcttccagccggggctgcggagttcgtgtgtgtatctgcggggtccctacctacagatgagtgggctcacctctcctggactcagggagggatttggaagtgtggacacctggggtgtccagctgtaccttggagggggctggggttggcgtgcacctcggtggggtccgggcgcttggataacgttcttggtgggtaggggtcgcggggaatctctgcgggcccgggactgcggggacttggtccccggctccaccccatcatgtggctagccccggctccgcctctgtcccagttcctgttttggcctccgctgtcccgctccggctcctggggctccccgcagacgctgcttttcttgctccactgggggtgcctcttcctgggcgcccgccgcctgcatcctgctcgccctgtctgggaatggggccgcccccgggcttgggccggcccggctggggcccccgaggcgcttccgccccgtagtgaccgcctggtgccgccccccccccaggatgaagggcggcgagggggacgcgggcgagcaggccccgctgaaccctgagggcgagagccctgcaggctcggccacgtaccgggagttcgtgcaccgcggctacctggacctcatgggggccagtcagcactcgctgcgggcgctcagctggcgccgcctctacctcagccgggccaagctcaaagcttccagccgcacgtctgccttgctctcgggcttcgccatggtggccatggtggaggtgcagctggagagtgaccacgagtacccaccaggcctgctggtggccttcagtgcctgcaccaccgtgctggtggctgtgcacctctttgcactcatggtctccacgtgtctgctgccccacattgaagctgtgagcaacatccacaacctcaactctgtccaccagtcgccacaccagagactgcaccgctacgtggagctggcctggggcttctccactgccctgggcacctttctcttccttgctgaagttgtcctggttggttgggtcaagtttgtgcccattggggctcccttggacacaccgacccccatggtgcccacatcccgggtgcccgggactctggcaccagtggctacctcccttagtccagcttccaatctcccacggtcctctgcgtctgcagcaccgtcccaggctgagccagcctgcccaccccggcaagcctgtggtggtggtggggcccatgggccaggctggcaagcagccatggcctccacagccatcatggtacccgtggggctcgtgtttgtggcctttgccctgcatttctaccgctccttggtggcacacaagacagaccgctacaagcaggaactagaggaactgaatcgcctgcagggggagctgcaggctgtgtgagactggtgttagccaccgctcactgcaagcactgcctccctccggggtctgtaagaggccgcaggggcctacagacctcatccccccatcccctggctggagccacttccagtggccactctcaggcagagttcagattcctgcccgcagggtcctctgggctgggccttggggcagctcccacattcccagggattttccccatcagtctgtcccttgggttttgcaagctactctgcacctgggctggcctcagttgaaggatcatgcagtagatagaggggaggcagggagagcttgtgggaccttcagtgctgactttagccaccatttccattcctatacaggatgtgaaggtcagaaggcagccaattgttggtttaattttttttttttttgagacagtctgtttcccaggctggagtgtagtgatacagtcacagctcactgtagcctcgaccttccaggctcaaaagatgctcccaccacagcctcccaggtagtgagtagctggtactacaggtgtgtgctgccacacccgactaatttttttgtagagacggggtttcgctgttcccaggctggtctcaaactcctgggctcaagtgaacctcccgcctcggcctcccaaagtgctgggattcctttctttatttctgtagaatctattttatggttggcattttgggggaagatttcgatgggttccacattcttgctttagttgttgtagagggatttgggtgtttctacccaaggcattggtctagcttttcctacaatgaacctatctttggaggttcaagctccccaccttcccccactgtggtgacctgtggccacttgcagaagggatggtgcctgacccactgccctagccccacgctatgcaccaaacttgttctccccgtcctggtccagggctggggtctttagagactgacagcctctgccccaggcctgagtccttagcaagggttgggtaaggaggttttaagggagaaggtccagtccttagcccttgaaatacaaagctcttctgacactgaatttggatgcaccttgttttatataataaatcgtgtttcacagaaaaaaaaaaaaaaaaaaaaaaaanncgttggtggggcgcggcactgggcccnggaaaagncttcaganacccatcggttgggngcgccggggggcccacaaaaagaaagttgagacatgtgcgtcgaacagcggtggaccatgagaagacaacccgggggcgaaagacacaacaggcgcgagagaatctcccacccggatacaaagaaggccgcgggtggaacccagcggaggagttttcggagacgn

SEQ ID NO: 32924 - DNA, 3955 bp, Homo sapiens
  misc_feature (3731)..(3732): n is a, c, g, or t
  misc_feature (3759)..(3759): n is a, c, g, or t
  misc_feature (3767)..(3767): n is a, c, g, or t
  misc_feature (3775)..(3775): n is a, c, g, or t
  misc_feature (3790)..(3790): n is a, c, g, or t
  misc_feature (3955)..(3955): n is a, c, g, or t
cagctggacaggtgtctccaagaagcagctcatgtggcttctgaaccgactacaaggcctgcaggagctggtgctctctggctgctcctggctctctgtctctgccctgggctcagccccactgccagccctgcggctcctggacctccgctggatcgaggatgttaaagactcccagctccgggagttgctgctgcctccaccagacaccaaaccagggcaaacagagagccgtggtcggctgcagggggtggcagaactgcgtctggcaggtttggagctgacagatgcctccctgcgtctcctgctgcgtcacgcaccccagctgagcgccctggacctgagccactgcgcccacgtcggggaccccagtgttcacctcctcacggcccccacgtccccactccgcgagaccctggtgcacctcaatcttgctggttgccaccgcctaacggaccactgcctcccgctgttccgccgctgccctcgtctacgccgcctagacctgcgctcctgccgccagctctcacccgaagcttgtgcccggctggcagctgccgggccccctggccccttccgctgccctgaggagaagctgcttctcaaggacagctagttgggcgccccccaccctcccccggactcgacaggagcctggacctccggcttcatttcacccctgctgggaggccaggttcccacctcaccaccctgggattcctgagtgtcagtgacttgggattcccacccagggactcaagccagccacccccttctttcccccctgcactgatatctctgggggtttctccttcctatgtcctgcccctgctacctgcttcattgtccatcccctgggggagtgggtcagaggtactggagggtgctgagccgaagggacggtgggaggggggttatggtgcaagtgttgggggggagaatggggaaaggacacacacaggatatgggagccaggggctgggggaggtggaaggggcggggggcggggcagacagcagaccaccaagggttcagggaacaaagaccagttacttggagtggggggtgggggtggggccacaaaaggaaaaccggaggagcaattggggatccaggtgtcagaggtaggggaaccaggggcaagctggggctgagctggaggtggggatgagagcaggtgtggggacagcaatacccccttgggggtcacctctctgcttcccccctccccaggcttcagttccttccccctgaccctgactccttgaacgtcactgaaaacggcagctattgcaaggagtgggggccgcgggcagccgctcttcagctcgcggcccaggggagtggcgaggggcgccccaaccccctgcccgcctctccgcacaatacttgaacattcatctgtactgaagtgttacttgaaccgggggaatctcggacctgggggagccggggtgtgaggggactggaccagcttggactgagacctgagaccgggccggtgggcgcccatttgggactgcgccacccccaggcttgttcttgttttactgtattgagcggcggcacccgccggacccgcattatggctgggggcgccagcccaagaatggggaccatgggactcctccagcctggctcttcccactctttcatcgtcatggaaacttgtatcccatttgcccagggaactgccactcctggttgccatggaaatagcagccaacggacacctcccgatgccagtgctaaggctggaaatggccccctcttagttgccatgggaacctagtaacagactctgctggccctccttccctgccccttcctcgagcgcggggtggggcttcgggaccccggggatgagccgggccaggtcccgcccctccgcgcaggcctccggggggccggggcttaccatgtaggggaggggagatctatccacatacctcaggtggccatggtggaggtgcagctggagagtgaccacgagtacccaccaggcctgctggtggccttcagtgcctgcaccaccgtgctggtggctgtgcacctctttgcactcatggtctccacgtgtctgctgccccacattgaagctgtgagcaacatccacaacctcaactctgtccaccagtcgccacaccagagactgcaccgctacgtggagctggcctggggcttctccactgccctgggcacctttctcttccttgctgaagttgtcctggttggttgggtcaagtttgtgcccattggggctcccttggacacaccgacccccatggtgcccacatcccgggtgcccgggactctggcaccagtggctacctcccttagtccagcttccaatctcccacggtcctctgcgtctgcagcaccgtcccaggctgagccagcctgcccaccccggcaagcctgtggtggtggtggggcccatgggccaggctggcaagcagccatggcctccacagccatcatggtacccgtggggctcgtgtttgtggcctttgccctgcatttctaccgctccttggtggcacacaagacagaccgctacaagcaggaactagaggaactgaatcgcctgcagggggagctgcaggctgtgtgagactggtgttagccaccgctcactgcaagcactgcctccctccggggtctgtaagaggccgcaggggcctacagacctcatccccccatcccctggctggagccacttccagtggccactctcaggcagagttcagattcctgcccgcagggtcctctgggctgggccttggggcagctcccacattcccagggattttccccatcagtctgtcccttgggttttgcaagctactctgcacctgggctggcctcagttgaaggatcatgcagtagatagaggggaggcagggagagcttgtgggaccttcagtgctgactttagccaccatttccattcctatacaggatgtgaaggtcagaaggcagccaattgttggtttaattttttttttttttgagacagtctgtttcccaggctggagtgtagtgatacagtcacagctcactgtagcctcgaccttccaggctcaaaagatgctcccaccacagcctcccaggtagtgagtagctggtactacaggtgtgtgctgccacacccgactaatttttttgtagagacggggtttcgctgttcccaggctggtctcaaactcctgggctcaagtgaacctcccgcctcggcctcccaaagtgctgggattcctttctttatttctgtagaatctattttatggttggcattttgggggaagatttcgatgggttccacattcttgctttagttgttgtagagggatttgggtgtttctacccaaggcattggtctagcttttcctacaatgaacctatctttggaggttcaagctccccaccttcccccactgtggtgacctgtggccacttgcagaagggatggtgcctgacccactgccctagccccacgctatgcaccaaacttgttctccccgtcctggtccagggctggggtctttagagactgacagcctctgccccaggcctgagtccttagcaagggttgggtaaggaggttttaagggagaaggtccagtccttagcccttgaaatacaaagctcttctgacactgaatttggatgcaccttgttttatataataaatcgtgtttcacagaaaaaaaaaaaaaaaaaaaaaaaanncgttggtggggcgcggcactgggcccnggaaaagncttcaganacccatcggttgggngcgccggggggcccacaaaaagaaagttgagacatgtgcgtcgaacagcggtggaccatgagaagacaacccgggggcgaaagacacaacaggcgcgagagaatctcccacccggatacaaagaaggccgcgggtggaacccagcggaggagttttcggagacgn

SEQ ID NO: 32925 - DNA, 1929 bp, Homo sapiens
  misc_feature (1705)..(1706): n is a, c, g, or t
  misc_feature (1733)..(1733): n is a, c, g, or t
  misc_feature (1741)..(1741): n is a, c, g, or t
  misc_feature (1749)..(1749): n is a, c, g, or t
  misc_feature (1764)..(1764): n is a, c, g, or t
  misc_feature (1929)..(1929): n is a, c, g, or t
gtggacggtcggatgtggatatgtgacagcgtcggcatcatggtctccacgtgtctgctgccccacattgaagctgtgagcaacatccacaacctcaactctgtccaccagtcgccacaccagagactgcaccgctacgtggagctggcctggggcttctccactgccctgggcacctttctcttccttgctgaagttgtcctggttggttgggtcaagtttgtgcccattggggctcccttggacacaccgacccccatggtgcccacatcccgggtgcccgggactctggcaccagtggctacctcccttagtccagcttccaatctcccacggtcctctgcgtctgcagcaccgtcccaggctgagccagcctgcccaccccggcaagcctgtggtggtggtggggcccatgggccaggctggcaagcagccatggcctccacagccatcatggtacccgtggggctcgtgtttgtggcctttgccctgcatttctaccgctccttggtggcacacaagacagaccgctacaagcaggaactagaggaactgaatcgcctgcagggggagctgcaggctgtgtgagactggtgttagccaccgctcactgcaagcactgcctccctccggggtctgtaagaggccgcaggggcctacagacctcatccccccatcccctggctggagccacttccagtggccactctcaggcagagttcagattcctgcccgcagggtcctctgggctgggccttggggcagctcccacattcccagggattttccccatcagtctgtcccttgggttttgcaagctactctgcacctgggctggcctcagttgaaggatcatgcagtagatagaggggaggcagggagagcttgtgggaccttcagtgctgactttagccaccatttccattcctatacaggatgtgaaggtcagaaggcagccaattgttggtttaattttttttttttttgagacagtctgtttcccaggctggagtgtagtgatacagtcacagctcactgtagcctcgaccttccaggctcaaaagatgctcccaccacagcctcccaggtagtgagtagctggtactacaggtgtgtgctgccacacccgactaatttttttgtagagacggggtttcgctgttcccaggctggtctcaaactcctgggctcaagtgaacctcccgcctcggcctcccaaagtgctgggattcctttctttatttctgtagaatctattttatggttggcattttgggggaagatttcgatgggttccacattcttgctttagttgttgtagagggatttgggtgtttctacccaaggcattggtctagcttttcctacaatgaacctatctttggaggttcaagctccccaccttcccccactgtggtgacctgtggccacttgcagaagggatggtgcctgacccactgccctagccccacgctatgcaccaaacttgttctccccgtcctggtccagggctggggtctttagagactgacagcctctgccccaggcctgagtccttagcaagggttgggtaaggaggttttaagggagaaggtccagtccttagcccttgaaatacaaagctcttctgacactgaatttggatgcaccttgttttatataataaatcgtgtttcacagaaaaaaaaaaaaaaaaaaaaaaaanncgttggtggggcgcggcactgggcccnggaaaagncttcaganacccatcggttgggngcgccggggggcccacaaaaagaaagttgagacatgtgcgtcgaacagcggtggaccatgagaagacaacccgggggcgaaagacacaacaggcgcgagagaatctcccacccggatacaaagaaggccgcgggtggaacccagcggaggagttttcggagacgn

SEQ ID NO: 32926 - DNA, 2169 bp, Homo sapiens
cagctggacaggtgtctccaagaagcagctcatgtggcttctgaaccgactacaaggcctgcaggagctggtgctctctggctgctcctggctctctgtctctgccctgggctcagccccactgccagccctgcggctcctggacctccgctggatcgaggatgttaaagactcccagctccgggagttgctgctgcctccaccagacaccaaaccagggcaaacagagagccgtggtcggctgcagggggtggcagaactgcgtctggcaggtttggagctgacagatgcctccctgcgtctcctgctgcgtcacgcaccccagctgagcgccctggacctgagccactgcgcccacgtcggggaccccagtgttcacctcctcacggcccccacgtccccactccgcgagaccctggtgcacctcaatcttgctggttgccaccgcctaacggaccactgcctcccgctgttccgccgctgccctcgtctacgccgcctagacctgcgctcctgccgccagctctcacccgaagcttgtgcccggctggcagctgccgggccccctggccccttccgctgccctgaggagaagctgcttctcaaggacagctagttgggcgccccccaccctcccccggactcgacaggagcctggacctccggcttcatttcacccctgctgggaggccaggttcccacctcaccaccctgggattcctgagtgtcagtgacttgggattcccacccagggactcaagccagccacccccttctttcccccctgcactgatatctctgggggtttctccttcctatgtcctgcccctgctacctgcttcattgtccatcccctgggggagtgggtcagaggtactggagggtgctgagccgaagggacggtgggaggggggttatggtgcaagtgttgggggggagaatggggaaaggacacacacaggatatgggagccaggggctgggggaggtggaaggggcggggggcggggcagacagcagaccaccaagggttcagggaacaaagaccagttacttggagtggggggtgggggtggggccacaaaaggaaaaccggaggagcaattggggatccaggtgtcagaggtaggggaaccaggggcaagctggggctgagctggaggtggggatgagagcaggtgtggggacagcaatacccccttgggggtcacctctctgcttcccccctccccaggcttcagttccttccccctgaccctgactccttgaacgtcactgaaaacggcagctattgcaaggagtgggggccgcgggcagccgctcttcagctcgcggcccaggggagtggcgaggggcgccccaaccccctgcccgcctctccgcacaatacttgaacattcatctgtactgaagtgttacttgaaccgggggaatctcggacctgggggagccggggtgtgaggggactggaccagcttggactgagacctgagaccgggccggtgggcgcccatttgggactgcgccacccccaggcttgttcttgttttactgtattgagcggcggcacccgccggacccgcattatggctgggggcgccagcccaagaatggggaccatgggactcctccagcctggctcttcccactctttcatcgtcatggaaacttgtatcccatttgcccagggaactgccactcctggttgccatggaaatagcagccaacggacacctcccgatgccagtgctaaggctggaaatggccccctcttagttgccatgggaacctagtaacagactctgctggccctccttccctgccccttcctcgagcgcggggtggggcttcgggaccccggggatgagccgggccaggtcccgcccctccgcgcaggcctccggggggccggggcttaccatgtaggggaggggagatctatccacatacctcaggtaacagggaggtgcgcgggtggggggagggctgggcggaccaaaggccggaggggtggggcctggggatagcgagaggcttgagaatggggccgcttgggggagggaagaggcagcccggcgaggggcaagcgggggacccagccgggctgggcccctgggccccgggtctgtacaatacggtttgctataaaactcaaaatcttccagccggg

SEQ ID NO: 32927 - DNA, 3492 bp, Homo sapiens
cagctggacaggtgtctccaagaagcagctcatgtggcttctgaaccgactacaaggcctgcaggagctggtgctctctggctgctcctggctctctgtctctgccctgggctcagccccactgccagccctgcggctcctggacctccgctggatcgaggatgttaaagactcccagctccgggagttgctgctgcctccaccagacaccaaaccagggcaaacagagagccgtggtcggctgcagggggtggcagaactgcgtctggcaggtttggagctgacagatgcctccctgcgtctcctgctgcgtcacgcaccccagctgagcgccctggacctgagccactgcgcccacgtcggggaccccagtgttcacctcctcacggcccccacgtccccactccgcgagaccctggtgcacctcaatcttgctggttgccaccgcctaacggaccactgcctcccgctgttccgccgctgccctcgtctacgccgcctagacctgcgctcctgccgccagctctcacccgaagcttgtgcccggctggcagctgccgggccccctggccccttccgctgccctgaggagaagctgcttctcaaggacagctagttgggcgccccccaccctcccccggactcgacaggagcctggacctccggcttcatttcacccctgctgggaggccaggttcccacctcaccaccctgggattcctgagtgtcagtgacttgggattcccacccagggactcaagccagccacccccttctttcccccctgcactgatatctctgggggtttctccttcctatgtcctgcccctgctacctgcttcattgtccatcccctgggggagtgggtcagaggtactggagggtgctgagccgaagggacggtgggaggggggttatggtgcaagtgttgggggggagaatggggaaaggacacacacaggatatgggagccaggggctgggggaggtggaaggggcggggggcggggcagacagcagaccaccaagggttcagggaacaaagaccagttacttggagtggggggtgggggtggggccacaaaaggaaaaccggaggagcaattggggatccaggtgtcagaggtaggggaaccaggggcaagctggggctgagctggaggtggggatgagagcaggtgtggggacagcaatacccccttgggggtcacctctctgcttcccccctccccaggcttcagttccttccccctgaccctgactccttgaacgtcactgaaaacggcagctattgcaaggagtgggggccgcgggcagccgctcttcagctcgcggcccaggggagtggcgaggggcgccccaaccccctgcccgcctctccgcacaatacttgaacattcatctgtactgaagtgttacttgaaccgggggaatctcggacctgggggagccggggtgtgaggggactggaccagcttggactgagacctgagaccgggccggtgggcgcccatttgggactgcgccacccccaggcttgttcttgttttactgtattgagcggcggcacccgccggacccgcattatggctgggggcgccagcccaagaatggggaccatgggactcctccagcctggctcttcccactctttcatcgtcatggaaacttgtatcccatttgcccagggaactgccactcctggttgccatggaaatagcagccaacggacacctcccgatgccagtgctaaggctggaaatggccccctcttagttgccatgggaacctagtaacagactctgctggccctccttccctgccccttcctcgagcgcggggtggggcttcgggaccccggggatgagccgggccaggtcccgcccctccgcgcaggcctccggggggccggggcttaccatgtaggggaggggagatctatccacatacctcaggtaacagggaggtgcgcgggtggggggagggctgggcggaccaaaggccggaggggtggggcctggggatagcgagaggcttgagaatggggccgcttgggggagggaagaggcagcccggcgaggggcaagcgggggacccagccgggctgggcccctgggccccgggtctgtacaatacggtttgctataaaactcaaaatcttccagccggggctgcggagttcgtgtgtgtatctgcggggtccctacctacagatgagtgggctcacctctcctggactcagggagggatttggaagtgtggacacctggggtgtccagctgtaccttggagggggctggggttggcgtgcacctcggtggggtccgggcgcttggataacgttcttggtgggtaggggtcgcggggaatctctgcgggcccgggactgcggggacttggtccccggctccaccccatcatgtggctagccccggctccgcctctgtcccagttcctgttttggcctccgctgtcccgctccggctcctggggctccccgcagacgctgcttttcttgctccactgggggtgcctcttcctgggcgcccgccgcctgcatcctgctcgccctgtctgggaatggggccgcccccgggcttgggccggcccggctggggcccccgaggcgcttccgccccgtagtgaccgcctggtgccgccccccccccaggatgaagggcggcgagggggacgcgggcgagcaggccccgctgaaccctgagggcgagagccctgcaggctcggccacgtaccgggagttcgtgcaccgcggctacctggacctcatgggggccagtcagcactcgctgcgggcgctcagctggcgccgcctctacctcagccgggccaagctcaaagcttccagccgcacgtctgccttgctctcgggcttcgccatggtggccatggtggaggtgcagctggagagtgaccacgagtacccaccaggcctgctggtggccttcagtgcctgcaccaccgtgctggtggctgtgcacctctttgcactcatggtctccacgtgtctgctgccccacattgaagctgtgagcaacatccacaacctcaactctgtccaccagtcgccacaccagagactgcaccgctacgtggagctggcctggggcttctccactgccctgggcacctttctcttccttgctgaagttgtcctgagataaggaaacaggcccaagaaggctgaagatcttgcccaaaaccacacagctagtccatgaaactgaacttggactatctacccctcacacgggaatctctctttgatttgagaaaaggaaccagtgcctttcaactggaacagaaaggaatctgatctcaacacctatgcctccacgtaaattatttttttcagccttatttccctcaaaattgtagagtcctaatcttcttctatcttgtggtgtgagaccttggataagtctcccttccaccttttcctattacttaaaatggtgaatttgcataaaccagg

SEQ ID NO: 32928 - DNA, 3216 bp, Homo sapiens
cagctggacaggtgtctccaagaagcagctcatgtggcttctgaaccgactacaaggcctgcaggagctggtgctctctggctgctcctggctctctgtctctgccctgggctcagccccactgccagccctgcggctcctggacctccgctggatcgaggatgttaaagactcccagctccgggagttgctgctgcctccaccagacaccaaaccagggcaaacagagagccgtggtcggctgcagggggtggcagaactgcgtctggcaggtttggagctgacagatgcctccctgcgtctcctgctgcgtcacgcaccccagctgagcgccctggacctgagccactgcgcccacgtcggggaccccagtgttcacctcctcacggcccccacgtccccactccgcgagaccctggtgcacctcaatcttgctggttgccaccgcctaacggaccactgcctcccgctgttccgccgctgccctcgtctacgccgcctagacctgcgctcctgccgccagctctcacccgaagcttgtgcccggctggcagctgccgggccccctggccccttccgctgccctgaggagaagctgcttctcaaggacagctagttgggcgccccccaccctcccccggactcgacaggagcctggacctccggcttcatttcacccctgctgggaggccaggttcccacctcaccaccctgggattcctgagtgtcagtgacttgggattcccacccagggactcaagccagccacccccttctttcccccctgcactgatatctctgggggtttctccttcctatgtcctgcccctgctacctgcttcattgtccatcccctgggggagtgggtcagaggtactggagggtgctgagccgaagggacggtgggaggggggttatggtgcaagtgttgggggggagaatggggaaaggacacacacaggatatgggagccaggggctgggggaggtggaaggggcggggggcggggcagacagcagaccaccaagggttcagggaacaaagaccagttacttggagtggggggtgggggtggggccacaaaaggaaaaccggaggagcaattggggatccaggtgtcagaggtaggggaaccaggggcaagctggggctgagctggaggtggggatgagagcaggtgtggggacagcaatacccccttgggggtcacctctctgcttcccccctccccaggcttcagttccttccccctgaccctgactccttgaacgtcactgaaaacggcagctattgcaaggagtgggggccgcgggcagccgctcttcagctcgcggcccaggggagtggcgaggggcgccccaaccccctgcccgcctctccgcacaatacttgaacattcatctgtactgaagtgttacttgaaccgggggaatctcggacctgggggagccggggtgtgaggggactggaccagcttggactgagacctgagaccgggccggtgggcgcccatttgggactgcgccacccccaggcttgttcttgttttactgtattgagcggcggcacccgccggacccgcattatggctgggggcgccagcccaagaatggggaccatgggactcctccagcctggctcttcccactctttcatcgtcatggaaacttgtatcccatttgcccagggaactgccactcctggttgccatggaaatagcagccaacggacacctcccgatgccagtgctaaggctggaaatggccccctcttagttgccatgggaacctagtaacagactctgctggccctccttccctgccccttcctcgagcgcggggtggggcttcgggaccccggggatgagccgggccaggtcccgcccctccgcgcaggcctccggggggccggggcttaccatgtaggggaggggagatctatccacatacctcaggtaacagggaggtgcgcgggtggggggagggctgggcggaccaaaggccggaggggtggggcctggggatagcgagaggcttgagaatggggccgcttgggggagggaagaggcagcccggcgaggggcaagcgggggacccagccgggctgggcccctgggccccgggtctgtacaatacggtttgctataaaactcaaaatcttccagccggggctgcggagttcgtgtgtgtatctgcggggtccctacctacagatgagtgggctcacctctcctggactcagggagggatttggaagtgtggacacctggggtgtccagctgtaccttggagggggctggggttggcgtgcacctcggtggggtccgggcgcttggataacgttcttggtgggtaggggtcgcggggaatctctgcgggcccgggactgcggggacttggtccccggctccaccccatcatgtggctagccccggctccgcctctgtcccagttcctgttttggcctccgctgtcccgctccggctcctggggctccccgcagacgctgcttttcttgctccactgggggtgcctcttcctgggcgcccgccgcctgcatcctgctcgccctgtctgggaatggggccgcccccgggcttgggccggcccggctggggcccccgaggcgcttccgccccgtagtgaccgcctggtgccgccccccccccaggatgaagggcggcgagggggacgcgggcgagcaggccccgctgaaccctgagggcgagagccctgcaggctcggccacgtaccgggagttcgtgcaccgcggctacctggacctcatgggggccagtcagcactcgctgcgggcgctcagctggcgccgcctctacctcagccgggccaagctcaaagcttccagccgcacgtctgccttgctctcgggcttcgccatgagataaggaaacaggcccaagaaggctgaagatcttgcccaaaaccacacagctagtccatgaaactgaacttggactatctacccctcacacgggaatctctctttgatttgagaaaaggaaccagtgcctttcaactggaacagaaaggaatctgatctcaacacctatgcctccacgtaaattatttttttcagccttatttccctcaaaattgtagagtcctaatcttcttctatcttgtggtgtgagaccttggataagtctcccttccaccttttcctattacttaaaatggtgaatttgcataaaccagg

SEQ ID NO: 32929 - DNA, 2312 bp, Homo sapiens
cagctggacaggtgtctccaagaagcagctcatgtggcttctgaaccgactacaaggcctgcaggagctggtgctctctggctgctcctggctctctgtctctgccctgggctcagccccactgccagccctgcggctcctggacctccgctggatcgaggatgttaaagactcccagctccgggagttgctgctgcctccaccagacaccaaaccagggcaaacagagagccgtggtcggctgcagggggtggcagaactgcgtctggcaggtttggagctgacagatgcctccctgcgtctcctgctgcgtcacgcaccccagctgagcgccctggacctgagccactgcgcccacgtcggggaccccagtgttcacctcctcacggcccccacgtccccactccgcgagaccctggtgcacctcaatcttgctggttgccaccgcctaacggaccactgcctcccgctgttccgccgctgccctcgtctacgccgcctagacctgcgctcctgccgccagctctcacccgaagcttgtgcccggctggcagctgccgggccccctggccccttccgctgccctgaggagaagctgcttctcaaggacagctagttgggcgccccccaccctcccccggactcgacaggagcctggacctccggcttcatttcacccctgctgggaggccaggttcccacctcaccaccctgggattcctgagtgtcagtgacttgggattcccacccagggactcaagccagccacccccttctttcccccctgcactgatatctctgggggtttctccttcctatgtcctgcccctgctacctgcttcattgtccatcccctgggggagtgggtcagaggtactggagggtgctgagccgaagggacggtgggaggggggttatggtgcaagtgttgggggggagaatggggaaaggacacacacaggatatgggagccaggggctgggggaggtggaaggggcggggggcggggcagacagcagaccaccaagggttcagggaacaaagaccagttacttggagtggggggtgggggtggggccacaaaaggaaaaccggaggagcaattggggatccaggtgtcagaggtaggggaaccaggggcaagctggggctgagctggaggtggggatgagagcaggtgtggggacagcaatacccccttgggggtcacctctctgcttcccccctccccaggcttcagttccttccccctgaccctgactccttgaacgtcactgaaaacggcagctattgcaaggagtgggggccgcgggcagccgctcttcagctcgcggcccaggggagtggcgaggggcgccccaaccccctgcccgcctctccgcacaatacttgaacattcatctgtactgaagtgttacttgaaccgggggaatctcggacctgggggagccggggtgtgaggggactggaccagcttggactgagacctgagaccgggccggtgggcgcccatttgggactgcgccacccccaggcttgttcttgttttactgtattgagcggcggcacccgccggacccgcattatggctgggggcgccagcccaagaatggggaccatgggactcctccagcctggctcttcccactctttcatcgtcatggaaacttgtatcccatttgcccagggaactgccactcctggttgccatggaaatagcagccaacggacacctcccgatgccagtgctaaggctggaaatggccccctcttagttgccatgggaacctagtaacagactctgctggccctccttccctgccccttcctcgagcgcggggtggggcttcgggaccccggggatgagccgggccaggtcccgcccctccgcgcaggcctccggggggccggggcttaccatgtaggggaggggagatctatccacatacctcaggtaacagggaggtgcgcgggtggggggagggctgggcggaccaaaggccggaggggtggggcctggggatagcgagaggcttgagaatggggccgcttgggggagggaagaggcagcccggcgaggggcaagcgggggacccagccgggctgggcccctgggccccgggtctgtacaatacggtttgctataaaactcaaaatcttccagccgggaaaagcaaagaacacaggaacaaaaaaaaggggggcgtaaatacaccggagagccgcgagacgcccgctgtgacggaggcccaaaaggagaaaaaaaagccgggcgcgacaaccgggagaagcggcgcgcgaccccccgggcc

SEQ ID NO: 32930 - DNA, 2271 bp, Homo sapiens
cagctggacaggtgtctccaagaagcagctcatgtggcttctgaaccgactacaaggcctgcaggagctggtgctctctggctgctcctggctctctgtctctgccctgggctcagccccactgccagccctgcggctcctggacctccgctggatcgaggatgttaaagactcccagctccgggagttgctgctgcctccaccagacaccaaaccagggcaaacagagagccgtggtcggctgcagggggtggcagaactgcgtctggcaggtttggagctgacagatgcctccctgcgtctcctgctgcgtcacgcaccccagctgagcgccctggacctgagccactgcgcccacgtcggggaccccagtgttcacctcctcacggcccccacgtccccactccgcgagaccctggtgcacctcaatcttgctggttgccaccgcctaacggaccactgcctcccgctgttccgccgctgccctcgtctacgccgcctagacctgcgctcctgccgccagctctcacccgaagcttgtgcccggctggcagctgccgggccccctggccccttccgctgccctgaggagaagctgcttctcaaggacagctagttgggcgccccccaccctcccccggactcgacaggagcctggacctccggcttcatttcacccctgctgggaggccaggttcccacctcaccaccctgggattcctgagtgtcagtgacttgggattcccacccagggactcaagccagccacccccttctttcccccctgcactgatatctctgggggtttctccttcctatgtcctgcccctgctacctgcttcattgtccatcccctgggggagtgggtcagaggtactggagggtgctgagccgaagggacggtgggaggggggttatggtgcaagtgttgggggggagaatggggaaaggacacacacaggatatgggagccaggggctgggggaggtggaaggggcggggggcggggcagacagcagaccaccaagggttcagggaacaaagaccagttacttggagtggggggtgggggtggggccacaaaaggaaaaccggaggagcaattggggatccaggtgtcagaggtaggggaaccaggggcaagctggggctgagctggaggtggggatgagagcaggtgtggggacagcaatacccccttgggggtcacctctctgcttcccccctccccaggcttcagttccttccccctgaccctgactccttgaacgtcactgaaaacggcagctattgcaaggagtgggggccgcgggcagccgctcttcagctcgcggcccaggggagtggcgaggggcgccccaaccccctgcccgcctctccgcacaatacttgaacattcatctgtactgaagtgttacttgaaccgggggaatctcggacctgggggagccggggtgtgaggggactggaccagcttggactgagacctgagaccgggccggtgggcgcccatttgggactgcgccacccccaggcttgttcttgttttactgtattgagcggcggcacccgccggacccgcattatggctgggggcgccagcccaagaatggggaccatgggactcctccagcctggctcttcccactctttcatcgtcatggaaacttgtatcccatttgcccagggaactgccactcctggttgccatggaaatagcagccaacggacacctcccgatgccagtgctaaggctggaaatggccccctcttagttgccatgggaacctagtaacagactctgctggccctccttccctgccccttcctcgagcgcggggtggggcttcgggaccccggggatgagccgggccaggtcccgcccctccgcgcaggcctccggggggccggggcttaccatgtaggggaggggagatctatccacatacctcagagataaggaaacaggcccaagaaggctgaagatcttgcccaaaaccacacagctagtccatgaaactgaacttggactatctacccctcacacgggaatctctctttgatttgagaaaaggaaccagtgcctttcaactggaacagaaaggaatctgatctcaacacctatgcctccacgtaaattatttttttcagccttatttccctcaaaattgtagagtcctaatcttcttctatcttgtggtgtgagaccttggataagtctcccttccaccttttcctattacttaaaatggtgaatttgcataaaccagg

SEQ ID NO: 32931 - DNA, 1106 bp, Homo sapiens
cagctggacaggtgtctccaagaagcagctcatgtggcttctgaaccgactacaaggcctgcaggagctggtgctctctggctgctcctggctctctgtctctgccctgggctcagccccactgccagccctgcggctcctggacctccgctggatcgaggatgttaaagactcccagctccgggagttgctgctgcctccaccagacaccaaaccagggcaaacagagagccgtggtcggctgcagggggtggcagaactgcgtctggcaggtttggagctgacagatgcctccctgcgtctcctgctgcgtcacgcaccccagctgagcgccctggacctgagccactgcgcccacgtcggggaccccagtgttcacctcctcacggcccccacgtccccactccgcgagaccctggtgcacctcaatcttgctggttgccaccgcctaacggaccactgcctcccgctgttccgccgctgccctcgtctacgccgcctagacctgcgctcctgccgccagctctcacccgaagcttgtgcccggctggcagctgccgggccccctggccccttccgctgccctgaggagaagctgcttctcaaggacagctagttgggcgccccccaccctcccccggactcgacaggagcctggacctccggcttcatttcacccctgctgggaggccaggttcccacctcaccaccctgggattcctgagtgtcagtgacttgggattcccacccagggactcaagccagccacccccttctttcccccctgcactgatatctctgggggtttctccttcctatgtcctgcccctgctacctgcttcattgtccatcccctgggggagtgggtcagaggtactggagggtgctgagccgaagggacggtgggaggggggttatggtgcaagtgttgggggggagaatggggaaaggacacacacaggatatgggagccaggggctgggggaggtggaaggggcggggggcggggcagacagcagaccacgggggacccagccgggctgggcccctgggccccgggtctgtacaatacggtttgctataaaactcaaaatcttccagccggg

SEQ ID NO: 32932 - DNA, 466 bp, Homo sapiens
aagtctttatcattttcatttcagagataaggaaacaggcccaagaaggctgaagatcttgcccaaaaccacacagctagtccatgaaactgaacttggactatctacccctcacacgggaatctctctttgatttgagaaaaggaaccagtgcctttcaactggaacagaaaggaatctgatctcaacacctatgcctccacgtaaattatttttttcagccttatttccctcaaaattgtagagtcctaatcttcttctatcttgtggtgtgagaccttggataagtctcccttccaccttttcctattacttaaaatggtgaatttgcataaaccaggctctaagggtcttttctgcactgttcggatgtgtacaaattgacatccaagtttaaaggaagactctgaaacttaggtcaatgacttgcccaaggccatatagcgagggcctgatgtacacatat

SEQ ID NO: 32933 - DNA, 2682 bp, Homo sapiens
cccgcctcttcctcccttccttctttccttgctttcgccgcgcactccgccgccatggagcagcgccgcgtcaccgacttcttcgcgcgccgccgccccgggcccccccgcatcgcgccgcccaagctggcctgccgcacccccagccccgccaggcccgcactccgcgccccggcctccgctaccagtggcagccgcaagcgcgcccgcccgcccgccgcccccggacgcgaccaggccaggccaccggcccgcaggagactgcggctgtcggtggacgaggtttccagccccagtacccccgaggccccagacatcccagcctgcccttctccgggccagaagataaagaaatccaccccggcagcaggtcagccgccccacctgacatccgcgcaggaccaggacaccatctctgagcttgcgtcatgcctgcaacgggcccgggagctgggggcaagagtccgggcgctgaaggccagtgcccaggatgctggggagtcctgcaccccagaggccgagggccgccctgaggagccatgtggcgagaaggcgcccgcctaccagcgcttccatgccctggcccagcccggcctgccgggactcgtgctgccctacaagtaccaggtgctggcggagatgttccgcagcatggacaccatcgtgggcatgctccacaaccgctccgagacgcccacctttgccaaggtccagcggggcgtccaggacatgatgcgtaggcgttttgaggagcgcaatgttggccagatcaaaaccgtgtacccggcctcctaccgcttccgccaggagcgcagtgtccccaccttcaaggatggcgccaggaggtcagattaccagctcaccatcgagccactgctggagcaggaggctgacggagcagccccccagctcacggcctcgcgcctcctgcagcgacggcagatcttcagccagaagctggtggagcacgtcaaggagcaccacaaggccttcctggcctccctgagccccgccatggtggtgccggaggaccagctgacccgctggcacccgcgcttcaacgtggatgaagtacccgacatcgagccggccgcgctgccccagccacccgccacggagaagctcaccactgctcaggaggtgctggcccgggcccgcaacctgatttcacccaggatggagaaggccttgagtcaattggccctgcgctctgctgcgcccagcagccccgggtctcccaggccagcactgccggctaccccaccagccaccccgcctgcagcctctcccagtgctctgaagggggtgtcccaggatctgctggagcggatccgagccaaggaggcacagaagcagctggcacagatgacgcggtgcccggagcaggagcagcggctgcagcgcttagaacggctgcctgagctggcccgcgtgctgcggagcgtctttgtgtccgaacgcaagcctgcgctcagcatggaggtggcctgtgccaggatggtgggcagctgttgtactatcatgagccctggggaaatggagaagcacctgctgctcctctccgagctgctgccggactggctcagcctccaccgcatccgcaccgacacctacgtcaagctggacaaggccgcggacctggcccacatcactgcacgcctggcccaccagacacgtgctgaggaggggctgtgagcctgggggccactgtggacagacgtgggcttcagaagctcgctggcctgggcccaccagcattttcttttatgaacatgatacactttggtcttcctttccccagcgcccctgagggccagaggcagatgtgggctgcaggctgcacagcccgagggtctctggctgcgggcggtgggccccttcatggggctcacctggtggattcacattaaaccggtttctgtgggcacctctgtccttgctgctggtggggaagggaagccagatccagcaccccctggggggccatcgggagtgtggctgggggtgaagggggctctgtggcaatatggggttgggtagtgtgggtggcaggccatcccctctaatcttggaacctctgaatatgggacctcccacagcaaagggtgacttttgtcattaagaaagactggggtgggtgtggtggctcacgcctgtaaccccagcactttgggaggccaaggtgggcagatcacgaggtcaagagatcgagaccatcctggcgaacatggtgaaaccccatctctactaaaaatacaaaaaattagccgggtgtggtggtgggcacctgtcgtcccagctactagggaggctgaggcaggagaatggtgtgaacccaggaggcacagcttgcagtgagcgaagatcgcaccactgcacgcactccagcctgggtgacagagcgagactccgtctcaaaaaaaaaaatttcaagactggagaggtgatcctgaattgtccagctacgccccatgtcatcacagggccttcatgacagggccagagccagccagctttgaagacgcggccctgccccgacacaggcagcctggagaagctgggcaggacaagtaggacatccctggagcctccagaagggactggcctctgcccacaccttgacttcagtatttctgacctcctaaactctaataaagtcatgcttacagccactagatctgc

SEQ ID NO: 32934 - DNA, 314 bp, Homo sapiens
ggggttatggatatcgtcgacccacgcggtccgcatcactgcacgcctggcccaccagacacgtgctgaggaggggctgtgagcctgggggccactgtggacagacgtgggcttcagaagctcgctggcctgggcccaccagcattttcttttatgaacatgatacactttggtcttcctttccccagcgcccctgagggccagaggcagatgtgggctgcaggctgcacagcccgagggtctctggctgcgggcggtgggccccttcatggggctcacctggtggattcacattaaaccggtttctgtgggca

SEQ ID NO: 32935 - DNA, 1964 bp, Homo sapiens
taaaccaacaacaacacaaaaacacaacaaaaccaaaaacttacggctaggtacgaggctgggtgttgctttcgccgcgcactccgccgccatggagcagcgccgcgtcaccgacttcttcgcgcgccgccgccccgggcccccccgcatcgcgccgcccaagctggcctgccgcacccccagccccgccaggcccgcactccgcgccccggcctccgctaccagtggcagccgcaagcgcgcccgcccgcccgccgcccccggacgcgaccaggccaggccaccggcccgcaggagactgcggctgtcggtggacgaggtttccagccccagtacccccgaggccccagacatcccagcctgcccttctccgggccagaagataaagaaatccaccccggcagcaggtcagccgccccacctgacatccgcgcaggaccaggacaccatctctgagcttgcgtcatgcctgcaacgggcccgggagctgggggcaagagtccgggcgctgaaggccagtgcccaggatgctggggagtcctgcaccccagaggccgagggccgccctgaggagccatgtggcgagaaggcgcccgcctaccagcgcttccatgccctggcccagcccggcctgccgggactcgtgctgccctacaagtaccaggtgctggcggagatgttccgcagcatggacaccatcgtgggcatgctccacaaccgctccgagacgcccacctttgccaaggtccagcggggcgtccaggacatgatgcgtaggcgttttgaggagcgcaatgttggccagatcaaaaccgtgtacccggcctcctaccgcttccgccaggagcgcagtgtccccaccttcaaggatggcgccaggaggtcagattaccagctcaccatcgagccactgctggagcaggaggctgacggagcagccccccagctcacggcctcgcgcctcctgcagcgacggcagatcttcagccagaagctggtggagcacgtcaaggagcaccacaaggccttcctggcctccctgagccccgccatggtggtgccggaggaccagctgacccgctggcacccgcgcttcaacgtggatgaagtacccgacatcgagccggccgcgctgccccagccacccgccacggagaagctcaccactgctcaggaggtgctggcccgggcccgcaacctgatttcacccaggatggagaaggccttgagtcaattggccctgcgctctgctgcgcccagcagccccgggtctcccaggccagcactgccggctaccccaccagccaccccgcctgcagcctctcccagtgctctgaagggggtgtcccaggatctgctggagcggatccgagccaaggaggcacagaagcagctggcacagatgacgcggtgcccggagcaggagcagcggctgcagcgcttagaacggctgcctgagctggcccgcgtgctgcggagcgtctttgtgtccgaacgcaagcctgcgctcagcatggaggtggcctgtgccaggatggtgggcagctgttgtactatcatgagccctggggaaatggagaagcacctgctgctcctctccgagctgctgccggactggctcagcctccaccgcatccgcaccgacacctacgtcaagctggacaaggccgcggacctggcccacatcactgcacgcctggcccaccagacacgtgctgaggaggggctgtgagcctgggggccactgtggacagacgtgggcttcagaagctcgctggcctgggcccaccagcattttcttttatgaacatgatacactttggtcttcctttccccagcgcccctgagggccagaggcagatgtgggctgcaggctgcacagcccgagggtctctggctgcgggcggtgggccccttcatggggctcacctggtggattcacattaaaccggtttctgtgggca

SEQ ID NO: 32936 - DNA, 2221 bp, Homo sapiens
taaaccaacaacaacacaaaaacacaacaaaaccaaaaacttacggctaggtacgaggctgggtgttgctttcgccgcgcactccgccgccatggagcagcgccgcgtcaccgacttcttcgcgcgccgccgccccgggcccccccgcatcgcgccgcccaagctggcctgccgcacccccagccccgccaggcccgcactccgcgccccggcctccgctaccagtggcagccgcaagcgcgcccgcccgcccgccgcccccggacgcgaccaggccaggccaccggcccgcaggagactgcggctgtcggtggacgaggtttccagccccagtacccccgaggccccagacatcccagcctgcccttctccgggccagaagataaagaaatccaccccggcagcaggtcagccgccccacctgacatccgcgcaggaccaggacaccatctctgagcttgcgtcatgcctgcaacgggcccgggagctgggggcaagagtccgggcgctgaaggccagtgcccaggatgctggggagtcctgcaccccagaggccgagggccgccctgaggagccatgtggcgagaaggcgcccgcctaccagcgcttccatgccctggcccagcccggcctgccgggactcgtgctgccctacaagtaccaggtgctggcggagatgttccgcagcatggacaccatcgtgggcatgctccacaaccgctccgagacgcccacctttgccaaggtccagcggggcgtccaggacatgatgcgtaggcgttttgaggagcgcaatgttggccagatcaaaaccgtgtacccggcctcctaccgcttccgccaggagcgcagtgtccccaccttcaaggatggcgccaggaggtcagattaccagctcaccatcgagccactgctggagcaggaggctgacggagcagccccccagctcacggcctcgcgcctcctgcagcgacggcagatcttcagccagaagctggtggagcacgtcaaggagcaccacaaggccttcctggcctccctgagccccgccatggtggtgccggaggaccagctgacccgctggcacccgcgcttcaacgtggatgaagtacccgacatcgagccggccgcgctgccccagccacccgccacggagaagctcaccactgctcaggaggtgctggcccgggcccgcaacctgatttcacccaggatggagaaggccttgagtcaattggccctgcgctctgctgcgcccagcagccccgggtctcccaggccagcactgccggctaccccaccagccaccccgcctgcagcctctcccagtgctctgaagggggtgtcccaggatctgctggagcggatccgagccaaggaggcacagaagcagctggcacagatgacgcggtgcccggagcaggagcagcggctgcagcgcttagaacggctgcctgagctggcccgcgtgctgcggagcgtctttgtgtccgaacgcaagcctgcgctcagcatggaggtggcctgtgccaggatggtgggcagctgttgtactatcatgagccctggggaaatggagaagcacctgctgctcctctccgagctgctgccggactggctcagcctccaccgcatccgcaccgacacctacgtcaagctggacaaggccgcggacctggcccacatcactgcacgcctggcccaccagacacgtgctgaggaggggctgtgagcctgggggccactgtggacagacgtgggcttcagaagctcgctggcctgggcccaccagcattttcttttatgaacatgatacactttggtcttcctttccccagcgcccctgagggccagaggcagatgtgggctgcaggctgcacagcccgagggtctctggctgcgggcggtgggccccttcatggggctcacctggtggattcacattaaaccggtttctgtgggcaaaaaaaaaagagaaagatcatccacagccacacggcagaagacaagaaggagcagaacagaaaaagaaggggggggcgcagacaagcacccggagggccgccaatgtgaaggcacaccagctgcggcaacagggggccccatagggcgggcatatataacaacgacggcgggcgcgcgttaacacacgcgcgacgcggaaaaggaagaggggaacatcgggaaaaacaccccagggggggcacaacagggaacaccc

SEQ ID NO: 32937 - DNA, 1871 bp, Homo sapiens
tcagctggtaccccccgggtatgggatatgtcgaccacgccgtcggctcaccatcgagcctcttgctggagcaggaggctgacggagcagccccccagctcacggcctcgcgcctcctgcagcgacggcagatcttcagccagaagctggtggagcacgtcaaggagcaccacaaggccttcctggcctccctgagccccgccatggtggtgccggaggaccagctgacccgctggcacccgcgcttcaacgtggatgaagtacccgacatcgagccggccgcgctgccccagccacccgccacggagaagctcaccactgctcaggaggtgctggcccgggcccgcaacctgatttcacccaggatggagaaggccttgagtcaattggccctgcgctctgctgcgcccagcagccccgggtctcccaggccagcactgccggctaccccaccagccaccccgcctgcagcctctcccagtgctctgaagggggtgtcccaggatctgctggagcggatccgagccaaggaggcacagaagcagctggcacagatgacgcggtgcccggagcaggagcagcggctgcagcgcttagaacggctgcctgagctggcccgcgtgctgcggagcgtctttgtgtccgaacgcaagcctgcgctcagcatggaggtggcctgtgccaggatggtgggcagctgttgtactatcatgagccctggggaaatggagaagcacctgctgctcctctccgagctgctgccggactggctcagcctccaccgcatccgcaccgacacctacgtcaagctggacaaggccgcggacctggcccacatcactgcacgcctggcccaccagacacgtgctgaggaggggctgtgagcctgggggccactgtggacagacgtgggcttcagaagctcgctggcctgggcccaccagcattttcttttatgaacatgatacactttggtcttcctttccccagcgcccctgagggccagaggcagatgtgggctgcaggctgcacagcccgagggtctctggctgcgggcggtgggccccttcatggggctcacctggtggattcacattaaaccggtttctgtgggcacctctgtccttgctgctggtggggaagggaagccagatccagcaccccctggggggccatcgggagtgtggctgggggtgaagggggctctgtggcaatatggggttgggtagtgtgggtggcaggccatcccctctaatcttggaacctctgaatatgggacctcccacagcaaagggtgacttttgtcattaagaaagactggggtgggtgtggtggctcacgcctgtaaccccagcactttgggaggccaaggtgggcagatcacgaggtcaagagatcgagaccatcctggcgaacatggtgaaaccccatctctactaaaaatacaaaaaattagccgggtgtggtggtgggcacctgtcgtcccagctactagggaggctgaggcaggagaatggtgtgaacccaggaggcacagcttgcagtgagcgaagatcgcaccactgcacgcactccagcctgggtgacagagcgagactccgtctcaaaaaaaaaaatttcaagactggagaggtgatcctgaattgtccagctacgccccatgtcatcacagggccttcatgacagggccagagccagccagctttgaagacgcggccctgccccgacacaggcagcctggagaagctgggcaggacaagtaggacatccctggagcctccagaagggactggcctctgcccacaccttgacttcagtatttctgacctcctaaactctaataaagtcatgcttacagccactagatctgc

SEQ ID NO: 32938 - DNA, 273 bp, Homo sapiens
gaatgggttacaagtatgggtaggaattactgctatctgatataactattggtgggtgatggtattcttcaaattcagagaaaggcctcgctaaaacacacacacacactcatgtgctatttcattgcaaactgtttttgtggacctggacttgttgagaacctgttcaatgacagggtggaaatgcaaagcttggtattgtgtgctgtggttggtgttcaggagtcaatcatttccagggctacttaatgtctatttaaccaccagatgcca

SEQ ID NO: 32939 - DNA, 345 bp, Homo sapiens
gtgacttcttaattccttttccatggtctctgaaatattttctcttctaagctccagtatgaagtttaagtattccaatacatgcttctgctttctgggtccaagacatattgagaaggccatctcagctgtcccagggtcctaaccttattcaataaaatactttgtactagctctcttataatttagtaagatattctataccatagttattctatctgtatgaggacagggtataagacgcattctcttttctataggaaaggtttgtggccttaatgaatttgctttaatttaatttaatctgcaatcttcaattcttttacccctccttttttccttagc

SEQ ID NO: 32940 - DNA, 543 bp, Homo sapiens
ggatttaccgggagctggagccttcacatatattgattctaagccttatgtcagcattgcaagatagattaggaagaacaaagaactatattagtagtttaaaataatggctttaaactgctttacaccttgtttatcaaatcaagtgagcccttgaaatttaatcagggactggacggtagggggcacccatggtacttatgttgctctggctatgttgagagcgtcttaagtcataaacacagatttgttgaatgagtttgatactttgaaaattatcacctagaggctgggtgcggtggctcacgcctgtaatcccagcactttgggagactgaggcaggtggatcgcgtgaggtcaggagtttgagaccagcctggccaacatggtgaaacctcatctctactaaaaatagaaaaattatccgggtgtggtggtaggtgcctgtaatcccaactattcaggaggctgaggcaggagaattgcttgacgctgggaggtggaagttgcagtgagctgagattgcgccattgtagtccagcc

SEQ ID NO: 32941 - DNA, 2422 bp, Homo sapiens
agcgggctcggctcgcggggactggcctccttcggcagctggaggcggtcactcacgctgggctaggagctgaggcgagaagggccatgcggacggcgagggagtccagagccttgagcccggtgctcctccctcgcgcagcggtggctctgcggccgctggagtaaacactgcctttgttccctagcgcctcgtctttcgtcgccccgtgccctcacgccgccgggctctggccggcccgccctcggtccttgaaccccatttcggctcgtgccgtgcggatgcagctgccgggcctgggtttgggcattgagcgggaggaggaggaggagcggcggcgcctgggcggcatgcgatggggaactgctgctggacgcagtgcttcggactgcttcgcaaggaagcggggcggctgcagcgagtaggcggcggcggaggatccaagtattttagaacatgctcaagaggtgagcacttaacaatagagtttgagaatctagtagaaagtgatgaaggggagagcccaggaagcagtcataggcctcttactgaggaagaaattgttgacctaagagaaaggcattatgattccattgccgaaaaacaaaaagatcttgataagaaaattcaaaaagagcaagaaaggcagagaattgtgcagcaatatcatccttccaacaatggagaatatcaaagttcaggaccagaagatgacttcgaatcttgtttgagaaatatgaagtcacagtatgaagtttttcgaagtagtagactctcatcagatgctacagttttgacaccaaatacagaaagcagttgtgatttaatgaccaaaactaaatcaactagtggaaatgacgacagcacatccttagatctagagtgggaagatgaagaaggaatgaatagaatgcttccaatgagagaacgttccaaaacagaggaagacattctacgggcagcacttaagtatagcaacaagaagactggaagtaatcctacatcagcctctgatgattccaatgggctggagtgggaaaatgattttgttagtgccgaaatggatgataatggaaattccgagtattctggatttgtaaatcctgtattagaactgtctgattctggcataaggcattctgacacagatcaacagactcgatagggtaaaattgtgtgaccttgtttatcagttatgaccaaatgttaaaaaccaactagaatgtataagtgattgtgcttagcctttttgtaagggagatgtgtaagaaaccatgttgtaaatgcttattttattacaaaggagtagggatgataggatctgaattgatacagaattaagtgcaatttcatcatctgccttctgcttttcaagaccaatttaatggtcctgtcatgttactgattaaatttactttgtcttgtctttatagcatttctgtttactatggtagatttccactttcaatttttaaaattaattttactttgaatgatttatgaagcctatttcattgtctaactatgaaaatattaagacttttttgttaattctcagccgatgtgaaggaagcatgaggagggatcgtcagattcagatttagaatagtgttcccgtttccagcattatttatttctatgacttctttggattttattatctaatagtaagtacagttgatgtgggtagatgactctaagaaatgctgaagtatcggcattacatgtgtttatttacatgtcctagtatgataatgttgattcaatctgaacaaaagataatataaaaataacccttcagagtttggacatttcaagttggtaataataaaaaataatatttaagaagatatatatatatatatatttagttttttccacttcattttacatgccactatattgactttaattgatatacagtattaagtttttaggtgccattatttttaaaaaattctatatttccaatgaacgatgttagattttacacagaacatattctctgcatgatttcagaaaagaaaatctaaaaaggtaatacgggtatttcaaataaaatcctttctggtatgaaaggctccattgattttattaagccttcctttaccttgtagtacaaggtgctttaatgggatagaactaagcatatcaatatctataactgcattttgtgctagacaattactgttcttttctctaaaatgtatatgtcaatttacaaggccagggatagaaaacactccataattgctttccttgattttgctgaggatttggtatgattttagtaagcaaactgttttttggtttttccttaatgtttttaattttttttcctcttgcaacaatgacggtgcatgttcttataaatataggaaggtccagatataaatagtaacctaaagttcttgctgtgctt

SEQ ID NO: 32942 - DNA, 2361 bp, Homo sapiens
agcgggctcggctcgcggggactggcctccttcggcagctggaggcggtcactcacgctgggctaggagctgaggcgagaaggtggctctgcggccgctggagtaaacactgcctttgttccctagcgcctcgtctttcgtcgccccgtgccctcacgccgccgggctctggccggcccgccctcggtccttgaaccccatttcggctcgtgccgtgcggatgcagctgccgggcctgggtttgggcattgagcgggaggaggaggaggagcggcggcgcctgggcggcatgcgatggggaactgctgctggacgcagtgcttcggactgcttcgcaaggaagcggggcggctgcagcgagtaggcggcggcggaggatccaagtattttagaacatgctcaagaggtgagcacttaacaatagagtttgagaatctagtagaaagtgatgaaggggagagcccaggaagcagtcataggcctcttactgaggaagaaattgttgacctaagagaaaggcattatgattccattgccgaaaaacaaaaagatcttgataagaaaattcaaaaagagcaagaaaggcagagaattgtgcagcaatatcatccttccaacaatggagaatatcaaagttcaggaccagaagatgacttcgaatcttgtttgagaaatatgaagtcacagtatgaagtttttcgaagtagtagactctcatcagatgctacagttttgacaccaaatacagaaagcagttgtgatttaatgaccaaaactaaatcaactagtggaaatgacgacagcacatccttagatctagagtgggaagatgaagaaggaatgaatagaatgcttccaatgagagaacgttccaaaacagaggaagacattctacgggcagcacttaagtatagcaacaagaagactggaagtaatcctacatcagcctctgatgattccaatgggctggagtgggaaaatgattttgttagtgccgaaatggatgataatggaaattccgagtattctggatttgtaaatcctgtattagaactgtctgattctggcataaggcattctgacacagatcaacagactcgatagggtaaaattgtgtgaccttgtttatcagttatgaccaaatgttaaaaaccaactagaatgtataagtgattgtgcttagcctttttgtaagggagatgtgtaagaaaccatgttgtaaatgcttattttattacaaaggagtagggatgataggatctgaattgatacagaattaagtgcaatttcatcatctgccttctgcttttcaagaccaatttaatggtcctgtcatgttactgattaaatttactttgtcttgtctttatagcatttctgtttactatggtagatttccactttcaatttttaaaattaattttactttgaatgatttatgaagcctatttcattgtctaactatgaaaatattaagacttttttgttaattctcagccgatgtgaaggaagcatgaggagggatcgtcagattcagatttagaatagtgttcccgtttccagcattatttatttctatgacttctttggattttattatctaatagtaagtacagttgatgtgggtagatgactctaagaaatgctgaagtatcggcattacatgtgtttatttacatgtcctagtatgataatgttgattcaatctgaacaaaagataatataaaaataacccttcagagtttggacatttcaagttggtaataataaaaaataatatttaagaagatatatatatatatatatttagttttttccacttcattttacatgccactatattgactttaattgatatacagtattaagtttttaggtgccattatttttaaaaaattctatatttccaatgaacgatgttagattttacacagaacatattctctgcatgatttcagaaaagaaaatctaaaaaggtaatacgggtatttcaaataaaatcctttctggtatgaaaggctccattgattttattaagccttcctttaccttgtagtacaaggtgctttaatgggatagaactaagcatatcaatatctataactgcattttgtgctagacaattactgttcttttctctaaaatgtatatgtcaatttacaaggccagggatagaaaacactccataattgctttccttgattttgctgaggatttggtatgattttagtaagcaaactgttttttggtttttccttaatgtttttaattttttttcctcttgcaacaatgacggtgcatgttcttataaatataggaaggtccagatataaatagtaacctaaagttcttgctgtgctt

SEQ ID NO: 32943 - DNA, 1124 bp, Homo sapiens
agcgggctcggctcgcggggactggcctccttcggcagctggaggcggtcactcacgctgggctaggagctgaggcgagaagggccatgcggacggcgagggagtccagagccttgagcccggtgctcctccctcgcgcagcggtggctctgcggccgctggagtaaacactgcctttgttccctagcgcctcgtctttcgtcgccccgtgccctcacgccgccgggctctggccggcccgccctcggtccttgaaccccatttcggctcgtgccgtgcggatgcagctgccgggcctgggtttgggcattgagcgggaggaggaggaggagcggcggcgcctgggcggcatgcgatggggaactgctgctggacgcagtgcttcggactgcttcgcaaggaagcggggcggctgcagcgagtaggcggcggcggaggatccaagtattttagaacatgctcaagaggtgagcacttaacaatagagtttgagaatctagtagaaagtgatgaaggggagagcccaggaagcagtcataggcctcttactgaggaagaaattgttgacctaagagaaaggcattatgattccattgccgaaaaacaaaaagatcttgataagaaaattcaaaaagagttagccttacaagaagagaagttaagactagaagaagaagctttatacgctgcacagcgtgaagcagccagggcagcaaagcagcgaaagctcttggagcaagaaaggcagagaattgtgcagcaatatcatccttccaacaatggagaatatcaaagttcaggaccagaagatgacttcgaatcttgtttgagaaatatgaagtcacagtatgaagtttttcgaagtagtagactctcatcagatgctacagttttgacaccaaatacagaaagcagttgtgatttaatgaccaaaactaaatcaactagtggaaatgacgacagcacatccttagatctagagtgggaagatgaagaaggtattttataattcacaattttacctgaaaaatttaacgtaatctgtgttgatttatgtaaatctaccttggtctttatttaaatggaaataaattcaaggccttgaaaaatcatataaacacttt

SEQ ID NO: 32944 - DNA, 686 bp, Homo sapiens
agcgggctcggctcgcggggactggcctccttcggcagctggaggcggtcactcacgctgggctaggagctgaggcgagaagggccatgcggacggcgagggagtccagagccttgagcccggtgctcctccctcgcgcagcggtggctctgcggccgctggagtaaacactgcctttgttccctagcgcctcgtctttcgtcgccccgtgccctcacgccgccgggctctggccggcccgccctcggtccttgaaccccatttcggctcgtgccgtgcggatgcagctgccgggcctgggtttgggcattgagcgggaggaggaggaggagcggcggcgcctgggcggcatgcgatggggaactgctgctggacgcagtgcttcggactgcttcgcaaggaagcggggcggctgcagcgagtaggcggcggcggaggatccaagtattttagaacatgctcaagaggtgagcacttaacaatagagtttgagaatctagtagaaagtgatgaaggggagagcccaggaagcagtcatagtttagcaaacatttattaagcaactgtcgtgtgccaagcaccgtgctagacactgggattttaaaaatcagacatagtctctccattagaagaaagaacatcctggtctgggagatagattctcgagatgactaatttcaatatga

SEQ ID NO: 32945 - DNA, 542 bp, Homo sapiens
agcgggctcggctcgcggggactggcctccttcggcagctggaggcggtcactcacgctgggctaggagctgaggcgagaagggccatgcggacggcgagggagtccagagccttgagcccggtgctcctccctcgcgcagcggtggctctgcggccgctggagtaaacactgcctttgttccctagcgcctcgtctttcgtcgccccgtgccctcacgccgccgggctctggccggcccgccctcggtccttgaaccccatttcggctcgtgccgtgcggatgcagctgccgggcctgggtttgggcattgagcgggaggaggaggaggagcggcggcgcctgggcggcatgcgatggggaactgctgctggacgcagtgcttcggactgcttcgcaaggaagcggggcggctgcagcgagtaggcggcggcggaggatccaagtattttagaacatgctcaagaggtgagcacttaacaatagaggtaagtagtccttaatttgattgaattaaaaatgccttcagaaaggcggaagggg

SEQ ID NO: 32946 - DNA, 2913 bp, Homo sapiens
agcgggctcggctcgcggggactggcctccttcggcagctggaggcggtcactcacgctgggctaggagctgaggcgagaagggccatgcggacggcgagggagtccagagccttgagcccggtgctcctccctcgcgcagcggtggctctgcggccgctggagtaaacactgcctttgttccctagcgcctcgtctttcgtcgccccgtgccctcacgccgccgggctctggccggcccgccctcggtccttgaaccccatttcggctcgtgccgtgcggatgcagctgccgggcctgggtttgggcattgagcgggaggaggaggaggagcggcggcgcctgggcggcatgcgatggggaactgctgctggacgcagtgcttcggactgcttcgcaaggaagcggggcggctgcagcgagtaggcggcggcggaggatccaagtattttagaacatgctcaagaggtgagcacttaacaatagagtttgagaatctagtagaaagtgatgaaggggagagcccaggaagcagtcataggcctcttactgaggaagaaattgttgacctaagagaaaggcattatgattccattgccgaaaaacaaaaagatcttgataagaaaattcaaaaagagttagccttacaagaagagaagttaagactagaagaagaagctttatacgctgcacagcgtgaagcagccagggcagcaaagcagcgaaagctcttggagcaagaaaggcagagaattgtgcagcaatatcatccttccaacaatggagaatatcaaagttcaggaccagaagatgacttcgaatcttgtttgagaaatatgaagtcacagtatgaagtttttcgaagtagtagactctcatcagatgctacagttttgacaccaaatacagaaagcagttgtgatttaatgaccaaaactaaatcaactagtggaaatgacgacagcacatccttagatctagagtgggaagatgaagaaggaatgaatagaatgcttccaatgagagaacgttccaaaacagaggaagacattctacgggcagcacttaagtatagcaacaagaagactggaagtaatcctacatcagcctctgatgattccaatgggctggagtgggaaaatgattttgttagtgccgaaatggatgataatggaaattccgagtattctggatttgtaaatcctgtattagaactgtctgattctggcataaggcattctgacacagatcaacagactcgatagggtaaaattgtgtgaccttgtttatcagttatgaccaaatgttaaaaaccaactagaatgtataagtgattgtgcttagcctttttgtaagggagatgtgtaagaaaccatgttgtaaatgcttattttattacaaaggagtagggatgataggatctgaattgatacagaattaagtgcaatttcatcatctgccttctgcttttcaagaccaatttaatggtcctgtcatgttactgattaaatttactttgtcttgtctttatagcatttctgtttactatggtagatttccactttcaatttttaaaattaattttactttgaatgatttatgaagcctatttcattgtctaactatgaaaatattaagacttttttgttaattctcagccgatgtgaaggaagcatgaggagggatcgtcagattcagatttagaatagtgttcccgtttccagcattatttatttctatgacttctttggattttattatctaatagtaagtacagttgatgtgggtagatgactctaagaaatgctgaagtatcggcattacatgtgtttatttacatgtcctagtatgataatgttgattcaatctgaacaaaagataatataaaaataacccttcagagtttggacatttcaagttggtaataataaaaaataatatttaagaagatatatatatatatatatttagttttttccacttcattttacatgccactatattgactttaattgatatacagtattaagtttttaggtgccattatttttaaaaaattctatatttccaatgaacgatgttagattttacacagaacatattctctgcatgatttcagaaaagaaaatctaaaaaggtaatacgggtatttcaaataaaatcctttctggtatgaaaggctccattgattttattaagccttcctttaccttgtagtacaaggtgctttaatgggatagaactaagcatatcaatatctataactgcattttgtgctagacaattactgttcttttctctaaaatgtatatgtcaatttacaaggccagggatagaaaacactccataattgctttccttgattttgctgaggatttggtatgattttagtaagcaaactgttttttggtttttccttaatgtttttaattttttttcctcttgcaacaatgacggtgcatgttcttataaatataggaaggtccagatataaatagtaacctaaagttcttgctgtgcttaaaaaaaaaaatcatgtggccctttcaatatttgaactgctaagcaatgacatctgtagttttatctccttttttatgtcatagaaattaatatgatactttaaatatgtaaatataatacattaggtaatgctattatttatatctgtcttaacataatttaagttgtagctgtgtcttggaaatatttttaaggtaatctatattcacattgcctgtgttaatgctttttaaagtttgtatacatcagatgtatatttttggtttggcataagctacgattgtaatttttcttggctttttgttcataaagaattttttgaaggaatggtaacaaatggtaatttacaaatggttgtgaataaacacatttttacacttaaaggtaaaaa

SEQ ID NO: 32947 - DNA, 2604 bp, Homo sapiens
agcgggctcggctcgcggggactggcctccttcggcagctggaggcggtcactcacgctgggctaggagctgaggcgagaagggccatgcggacggcgagggagtccagagccttgagcccggtgctcctccctcgcgcagcggtggctctgcggccgctggagtaaacactgcctttgttccctagcgcctcgtctttcgtcgccccgtgccctcacgccgccgggctctggccggcccgccctcggtccttgaaccccatttcggctcgtgccgtgcggatgcagctgccgggcctgggtttgggcatttgatgctgtggatgtgagtgatgtgatgtgatgctgtgctgtgcttgccttgtggctgtgtcattgcctgattggtgtgacacttgcttgctgtgactgcatgttgcttcgtgacttgcttctgcaatggaatgctggggctgtgctgcagctgagtagtgctggctgtgctgtgatgtgatccaagtgtagttttaagaagcagttgctccaaggatgtgttgatgcacttaagcaatatgagttttgacgaatctaggtagaaatgtgattgaagtgtgtgatgatgcccatgtgaatgcatgtcatatggcctcttactgaggaagaaattgttgacctaagagaaaggcattatgattccattgccgaaaaacaaaaagatcttgataagaaaattcaaaaagagttagccttacaagaagagaagttaagactagaagaagaagctttatacgctgcacagcgtgaagcagccagggcagcaaagcagcgaaagctcttggagcaagaaaggcagagaattgtgcagcaatatcatccttccaacaatggagaatatcaaagttcaggaccagaagatgacttcgaatcttgtttgagaaatatgaagtcacagtatgaagtttttcgaagtagtagactctcatcagatgctacagttttgacaccaaatacagaaagcagttgtgatttaatgaccaaaactaaatcaactagtggaaatgacgacagcacatccttagatctagagtgggaagatgaagaaggaatgaatagaatgcttccaatgagagaacgttccaaaacagaggaagacattctacgggcagcacttaagtatagcaacaagaagactggaagtaatcctacatcagcctctgatgattccaatgggctggagtgggaaaatgattttgttagtgccgaaatggatgataatggaaattccgagtattctggatttgtaaatcctgtattagaactgtctgattctggcataaggcattctgacacagatcaacagactcgatagggtaaaattgtgtgaccttgtttatcagttatgaccaaatgttaaaaaccaactagaatgtataagtgattgtgcttagcctttttgtaagggagatgtgtaagaaaccatgttgtaaatgcttattttattacaaaggagtagggatgataggatctgaattgatacagaattaagtgcaatttcatcatctgccttctgcttttcaagaccaatttaatggtcctgtcatgttactgattaaatttactttgtcttgtctttatagcatttctgtttactatggtagatttccactttcaatttttaaaattaattttactttgaatgatttatgaagcctatttcattgtctaactatgaaaatattaagacttttttgttaattctcagccgatgtgaaggaagcatgaggagggatcgtcagattcagatttagaatagtgttcccgtttccagcattatttatttctatgacttctttggattttattatctaatagtaagtacagttgatgtgggtagatgactctaagaaatgctgaagtatcggcattacatgtgtttatttacatgtcctagtatgataatgttgattcaatctgaacaaaagataatataaaaataacccttcagagtttggacatttcaagttggtaataataaaaaataatatttaagaagatatatatatatatatatttagttttttccacttcattttacatgccactatattgactttaattgatatacagtattaagtttttaggtgccattatttttaaaaaattctatatttccaatgaacgatgttagattttacacagaacatattctctgcatgatttcagaaaagaaaatctaaaaaggtaatacgggtatttcaaataaaatcctttctggtatgaaaggctccattgattttattaagccttcctttaccttgtagtacaaggtgctttaatgggatagaactaagcatatcaatatctataactgcattttgtgctagacaattactgttcttttctctaaaatgtatatgtcaatttacaaggccagggatagaaaacactccataattgctttccttgattttgctgaggatttggtatgattttagtaagcaaactgttttttggtttttccttaatgtttttaattttttttcctcttgcaacaatgacggtgcatgttcttataaatataggaaggtccagatataaatagtaacctaaagttcttgctgtgctt

SEQ ID NO: 32948 - DNA, 2138 bp, Homo sapiens
  misc_feature (950)..(950): n is a, c, g, or t
  misc_feature (1379)..(1379): n is a, c, g, or t
  misc_feature (1566)..(1566): n is a, c, g, or t
gaaattagggctcagggaagtctggtggggaaagcacagagctgtttaaatagaattgtagtgtccagagtaagggaagtgaaagcctcacttctctcccatgtgcttggagtaggatgtagactcttcaggtctggccaccctactatacggggagacattgacacagcagttccaaagagagcagccagggaggtaaaaaggccaatccccacttttttttttttttttttagagaagaccaagacaaagaaaaaggataattgatttggaaaagacttgaagagggatcggtgtctttacctaattaaaagatttgctcaggaaagagaaattagaccaactctgtcgttttggaagtagaatctagggccagcgggtgggagatgagaacacatggagctgggaataaaacgggcagcttcctcaatggtgagcaaagccaagggaagcagggctggggaagtgctgctgaggaaacctcaaggattggaccggatggcctccgagtcccttcccactctcagagtctgtgatcctaatcaggggactcaacagaaacttaagggaaaccccctgacttctcgactcgatgtatctattggagctggatttttacaccccgtgttagcagtaacagattggcaaagcaatagaaaacaaatgcaccaattcatgtttttcagaaacttaacaaaagttagcccctgaagtcatttctgtgttatgtgtgtggaggaacactgccggaggaccctgaccagctctgccaactcttttttttctttttttggatctcactctgtcatccaggctggagtgcagtggcacaatcacggctcacggcctcaacctcccaaagtgctgggattacaggtgtgagccacacagcacccagcccgtgctggtcttgacctcccaggctcaagccttccaagaggctgggactncaggcatgtgcccccatgcctggctaactttaacttttgtagagacgaggtcctgctgtgttgccagtgctggtcttgaactcctgggcccaagcgatcctcctgcctcagcctcgtgagccaccacatcgggcaagccctgccaactctttcctgacctgaggcagggctgaatgtaggaggttagggaattagaaacctaagggttgtcttgtttaattattattccggctatgtggagatctgagccattttccgttgtaagggtccttctggttgatgtgtatatgttgtggtttttgctttttttttttttttttggcaggtgtgcgagggacattttgagattgttccaattcattgtcatgattgagggattatgattaggattctgtaaagtaactagtccaggccaggtgtggtggctcncgcctgtaatcccagcactttgggaggctgagctgggtggatcgcctgaagtcaggagttcaagaccagcctggccaacatggtgaaacctatctctactaaaaatacaaaaattagccgggtgtggtggcacgtgcctgtaatcccagctactcgggaggctgaagcaggagaatcacttcagccngggaggcggaggttgcagtgagccaagatcctgccactgcactcgcgtctgggcgacagagtgagactccatctcagaaataaaaatttaaaaaaaaattagtccagaaaaacatctcacagctgaagtggtctcatgggaagggagaacagcactgcccaataggaatgctataatgggagccatagatctaaaatcaaattttagattttccaggagccacattaaaagaagtaaaaagaagcagataatatgaatttaaagaatgtattttatgccaggtgtggtggctctcgcctgtaatcccagcactttggggagccgaggtgggcggatcacttgaggtcaggagtttgagaccagcctggccaacatggtgaaaccccaactctactaaaaatacaaaaaactagccaggcgtggtagcttgtgcctgtaaccccagctactcgggagactgaagcaggagaatcgcttcagcgatttaggagaaccaggaggcagaggttgtggtgagttgagatcatgccactgtactccagcctgggtgacagagcaagactctgtctcaa

SEQ ID NO: 32949 - DNA, 493 bp, Homo sapiens
aatctaaagcatggccaggcatggtggctcacgcctgtaatcccagcgctttggaaggctgaggcaggaggatctcttgaagccaggagtttgagaccagcctgggcaacatagtgagacactgtctctattttttttcaagaagttaaaacaaacaaacaaacaaaaaaaccttattgcaccttaaagatttctaggctgagcgcagtggctcacacctgtaatcccagcactttgggaggctgaagtgggcggatcacttgaggtcaggagtttgagaccagcctggccaacatggtgaaaccccaactctactaaaaatacaaaaaactagccaggcgtggtagcttgtgcctgtaaccccagctactcgggagactgaagcaggagaatcgcttcagcgatttaggagaaccaggaggcagaggttgtggtgagttgagatcatgccactgtactccagcctgggtgacagagcaagactctgtctcaa

SEQ ID NO: 32950 - DNA, 257 bp, Homo sapiens
tttatttatttatttatttatttttatttttgagacagtttcgctcctgttgcccaggctggagtgcaatggcagtgagccaagactgtgtcactgtacttcagcctgggcgatagaacaagactccacctcaaaaatatatgtatatattaaaaattaaccaggtgtggtgttgtgcgccatagccccagctacacaggaggctgaggcaggaagattgcttgagcccaggaagtggagtttgcagtgagccaaga

SEQ ID NO: 32951 - DNA, 734 bp, Homo sapiens
ctgagataaaccccacttggttgtggtgcattgtcctttggaatattgctagagttgatttctaggtttttttttttttttttaagatttctatattggtgttgatggagatattggacttttgtatccttttcttgtaatgtctttatttgattttggtgtcaaggtgatattgggtgtcataaaattagatgggaagtgctgtctccttccctgtttttggaaatagctgtgtaagataggtatgatttcttctttacatgtttgataggatttaccagtgaagtcatctgaacctagagggttttgtttggtttggttttagttttttgtgggagaattaagattttttaagagatattttcagatttttctgttgtcagttttggtaatttgtgtcttttaggaaaatttcatttcatccaagttgttggatttattggcataaaatttttcagaatattcctttaatatccttctaatgtctgtagaatctaatctgtattgcagtctcttcatattggtaatttgtgttttttctattttttcctggatcagtcagtctagctggagatttatcaattctttataagatcacttattttagatcattaatgatcttttagtacaggggtattcactcttttagcttccctgggccacaacggaaggagaagaattgtcttgggccacacataggatacattaacgataagctgatgagccaaaaaaaa

SEQ ID NO: 32952 - DNA, 309 bp, Homo sapiens
ccaaagtgcagggattagagatgtgagccatcacacgtggccttagaccttttacgtttattttcatctgtaaattatcctatcatcctatttcattgaataaatgaaataatttatttcataatacaaggtttctcaacttcagcacttattggcattttgaacaggacaattcttgactgtgggggactgtcgtgtacattgtaggatgtttaggagcatccctggtatctactcatcagatgccagtagcacctcctcttcagtcgtgacaagggaaatcctctccagaacttaccaaatgtctcc

SEQ ID NO: 32953 - DNA, 398 bp, Homo sapiens
aggctgaaagatgggaggtaaggagagataaaggcctttttaaaggataaggagacgaaggtagggggaggtgaaagtgtactaaatgttttatcttcctggcattggaaaaaaatggggaagaaatagaacattttgatagaggccacatttgatatgctattttaagtaaatagtaaagaaatatgtgtattagaagaaaggaaaaatagcaaacagcaatacaaaataaatagtaaatataaagcaagctgtaaaacaaaataaaacgtgatactttatattatatttgaatggactgatctctctcgttaaattacagaggcaggagattaaaaatacacttaaataaattgatacatatttaacttaaggggttggccaaaaatattaggcaa

SEQ ID NO: 32954 - DNA, 660 bp, Homo sapiens
aagccacatccaagcttaggaggaaagagtgtcatttattagtgatgtctgtcatggtcatcaggaatgaatctataagtgccaggcatttaccacttctgcactagagatgcagagatgtggaggaactcctgtagccctcactgcctccagctaattttagctgactgctaattaacaagctctgtgtactaagccattgctatatatccgggaggacgttgtcagtgttgccacagatatgaggccaacctggatcacactggctatgcgtctcttcagtcaaatcctaagctaagcaatgatttctatcaccataagtcctcagagtgttcgtgaagtgcacacatgactgtggggcaacctgatggaatgccttctgggctcaaaataatatactctaccttctctttgcccaaatgcatattttatattgctacatgcaagcacaacctcttaatggggaaaaaaattctaaatcacttttctctctcagtttacgctgaaatccagtagaaatgcgttaggatataaggtaccatccatatactctcctttatggagttgataagaaattgctataaaccagagcagtgagagctggcttatataatgctatcccctgtctcacttgaaaacagggtgaaacacagaaacaaa

SEQ ID NO: 32955 - DNA, 528 bp, Homo sapiens
tggtcagctgttggggggagaaaatccacacatctggtgtcagaagtgtcgtgagtgaaaacagaccatcactccaccaagtggccagcatttaaattcatgccacacagagggaaccatgacagtctggtactgatgaccatgcagggttagccagggcagcagcaagcgcatcgaaaggacaatcccatagtcaagtaaggagaagtttgtatcatatgtgagaatgaagcttaaatggactgaacaaaatcttaaacattggcatgacagaattctcataactaagaggggatgaaaagttatgagatctaaattagaagttatgaagacatctgtcacccagtaagggtgggagggacaacgtatcagttgggggcaggtcctggaataaactaagccagctcttttttattttttgagatggagcctgggtgatagcaagactctgcctcaaacaaacaaagataactaacccattttgattccttaattagttaaataaaatgaattaattacccaaaccta

SEQ ID NO: 32956 - DNA, 340 bp, Homo sapiens
gagtcatccaacgcacagtcatcctcaacacctccctctcacccccacgtggaattggtcatcaactcctgtggatttcatcttcagaaaggctcctcctgtcttcccccactggcagcatcatagggcaggacctggcacttctctgattcccacagatgctccccaggaggcctccccaccccctccttacccctccagtccatcctccacacccaccatcccaagagagacctttctaagacagtctaaggccaggcacggtggctcatgcctgtaatcccaacactttggaaggtggaggatcacttgaggccaagaattcaagatcagcctggac

SEQ ID NO: 32957 - DNA, 468 bp, Homo sapiens
cttcttttctggtgctttacttgttgctcatttctctgacccttcattcctgttacctcagcctggatgattttacccagatccaaccatctatatctgacagctcccaaatttctctctctgtaacgatgacttcctccaactccaaactactaaactgcccaactgatacttctatgtggataggcaacagaattcttagtattctcccttaaactctgccctactcaagtgttgcccatcacagaaaatgtcatttccatgaacctggttttagaagagaattttttttttaaagtaagtccctagtattcatatttgactcctcccactctcactccatatctaatccatccacatattacttctgtctttaaaatatatctcaaacccacacacttctctccaactccaaactccaaccccagtctaagctcccaccacggctgccatggaacacggccagcc

SEQ ID NO: 32958 - DNA, 1523 bp, Homo sapiens
gtcccacctgtatcccaggaaggaatttctccagccttgaatttttcattctgaatttcgctctcactgttctttggcctttgtgggcattttcagttaaactggcttattcttactctttctcagaaaagttgattctaaacagctattcctgcacctggggtacagggtacaaaaatggcaggtggaatgggcaggtttgagccttcactagaaaattgactttagatctgtcccttaacctctctgagcctcagtttcctcaccaataaagtgggactcagaatacctacctcacgagatagctgtaaaaggaaataagcaagctgtgagccgtatgcagattataaagcacaaatgagtgtagagtatttatctgagctccatgtagcatggtgttcattttgtgggctaattccaggtgacaactttaccggcagcgtcactacctgtggatttcagaggagcctgaagatatggatgttacatccgctgcccttggctagacattagacagctgagatgttagttcattggtggctaactcattttcagcattgctatctgctttttatgatattaatggctccactctcctcccagttgcccaagcaggaaactgtaagggtgattttgtctccttttcctctcatcccagctccagtaggtaccaggaccttcaaggtgaggtctgaaattcaaacctggagtgcatctctcccctcctctgcttccactgctggaccctggttccagtcctcatctaaactttggcacagacattctgattaatctcttgatcacctggctttctcatttcccctataccagtctgttttatatcctcaagccaaggtaaacttcctacgccacaactctgcgtctgtttatcttttattattattactattatatattattattattattattattattttgagacagggtctttctctgccactgaggctagcatgcagtggcatgatctcaattcactgcaacctccacctcccagactccatccttcctcctgcttcaggtttgtgattagctgggactataggcacataccatcacgcccagctaatttttgtaattttagtaaagacagggttttgccatgttttccagccagacctccacctccagaaatcaagtgattcaccacctcagagtcccaaagagctggaattacaggaatgagccactgcacccggcctgtttctctacttattccaacataaataagggtttttctttgacatggtgctggagacccaaaatcataattctatacatgattcctcatcgcctacagaattaaattcaaactttccctcttatacccaactctccacaatcactctattctccataaaaaatttggtgagtctcccatgactctagcaatgcttatatttcacggatgtgtgacaattcactgctcacattacttttctggaataagatggggtagaaacagatgtttgctctttcccaataaactgctacacatgctg

SEQ ID NO: 32959 - DNA, 1468 bp, Homo sapiens
gtcccacctgtatcccaggaaggaatttctccagccttgaatttttcattctgaatttcgctctcactgttctttggcctttgtgggcattttcagttaaactggcttattcttactctttctcagaaaagttgattctaaacagctattcctgcacctggggtacagggtacaaaaatggcaggtggaatgggcaggtttgagccttcactagaaaattgactttagatctgtcccttaacctctctgagcctcagtttcctcaccaataaagtgggactcagaatacctacctcacgagatagcttgtagagtatttatctgagctccatgtagcatggtgttcattttgtgggctaattccaggtgacaactttaccggcagcgtcactacctgtggatttcagaggagcctgaagatatggatgttacatccgctgcccttggctagacattagacagctgagatgttagttcattggtggctaactcattttcagcattgctatctgctttttatgatattaatggctccactctcctcccagttgcccaagcaggaaactgtaagggtgattttgtctccttttcctctcatcccagctccagtaggtaccaggaccttcaaggtgaggtctgaaattcaaacctggagtgcatctctcccctcctctgcttccactgctggaccctggttccagtcctcatctaaactttggcacagacattctgattaatctcttgatcacctggctttctcatttcccctataccagtctgttttatatcctcaagccaaggtaaacttcctacgccacaactctgcgtctgtttatcttttattattattactattatatattattattattattattattattttgagacagggtctttctctgccactgaggctagcatgcagtggcatgatctcaattcactgcaacctccacctcccagactccatccttcctcctgcttcaggtttgtgattagctgggactataggcacataccatcacgcccagctaatttttgtaattttagtaaagacagggttttgccatgttttccagccagacctccacctccagaaatcaagtgattcaccacctcagagtcccaaagagctggaattacaggaatgagccactgcacccggcctgtttctctacttattccaacataaataagggtttttctttgacatggtgctggagacccaaaatcataattctatacatgattcctcatcgcctacagaattaaattcaaactttccctcttatacccaactctccacaatcactctattctccataaaaaatttggtgagtctcccatgactctagcaatgcttatatttcacggatgtgtgacaattcactgctcacattacttttctggaataagatggggtagaaacagatgtttgctctttcccaataaactgctacacatgctg

SEQ ID NO: 32960 - DNA, 352 bp, Homo sapiens
gttagctgaacacattttcacagctcacaccacacatctgggtctccacaccttccaccctgggcatctggattagcatccagcctcggcccctccgcccctccactccaagccatcacctggatttccccatgcctggctgacagtcctgagtcctggtccaacatgcttccagcaaaacactgctgaaaaggaaatgatggtcttctgaatagagaaagtaaaccattacagattttgataaaagtaaaattctctcagagacgcaggacaagttccttacgttttctagctttcttgaataaatacggtggtcagggccgtatatagatgggtaatagcagatctcatc

SEQ ID NO: 32961 - DNA, 449 bp, Homo sapiens
tcaatactttttaaatcttttcgcctggttacttatttagcatttgccttctgagtatattgtatcatatgtgtcttgtggtctctggacaggattaattttccaagtgtctgaccacaattgtacactcttttctgctataaatttgttttctcttttctctcctcccctcctctcttcttttcttttctttttgatggagtcttgctctgtcgcccaggctggagtgcagtggcgggatctcagttcactgcaacctctgcctcctgggttcaagcaattgtcctgcctcagcctcccaagtagctggcacatggtggcacctgtagtcttagatactcagtgggctaaggcaggaggtttgcctgagcccacgagtttgaggctgcagtaagctgtgttcacatgactgcactccagcctaggtgacagagtctcagaaaaaaaaa

SEQ ID NO: 32962 - DNA, 442 bp, Homo sapiens
atgattatagattataataaaagattagtgtactgctgtgaacatctgtgtcattttcagagctaccaccgtggattcctgagcaacttaatgcatgctgtaaataaagaggctgacccacatcttgtggctaaagaacaaatcaaacatcctttgtgacatttgtctgaaaagagggtaccatgtgattttcattttgtcaacttcactcccaaagggtatttaagagaaaatgcacgtttagcattttctgaacattatattagtggagggactcacataacattttgtaagtagaccattctaagtaacatctttttaattcagttttttggtatcttgtttttaaatagcagagtataccattaaagttaaatctgatgaacaccaccaacacattttagagctaataaaggcatatcacactttatatgtctttggt

SEQ ID NO: 32963 - DNA, 493 bp, Homo sapiens
taaaactgctacttctggaatatttcttaaacttgcttgatttgtgtaaggtctggctgctgggctccctgaaaccttgcacatatcttactgtatgactgtatttcgttttgagtctctggattctggggtttggacagatgaccatagtgaggcctgcagaaatatgcatgtcctcagtgtttggactgccagctgcaaggcagagccaaacccaatatggccccatcatccctggctcagctgtgctacctggccatgctggaaggggtttgatcttccaggaatttgcttcacagctctttcctgtcccaagatctatgcctgatgtgtaaattcaggacccaaaagggcacaaaaaagcaataactactaaatataaggaaaacaactctgtatacagcatgtataaagaaaagcaagatatatttggggagataaaagttgtaaaggcattaagatgtgtgtttgttgagaaaaaataaatttgtgc

SEQ ID NO: 32964 - DNA, 399 bp, Homo sapiens
tcatagactgtagcaaggagactggactttctcctgaaggcactgaggcacatggcagggctctgggtactgcagagatagggtcacatttgtgttttgaaaagatcctcgggcggagcacggtggctcacgcctgtaatcacagcactttgggaggctaaggtgggcagatcacctgaggtggggagttccagaccacactgaccaacatggagaaaccccatctctactaaaaatacaaaattagccgggcatggtggcacatgcctgtaatcccagctactcaggaggctgaggcaagagaataatcacttgaacccgggaggcggaggttgcagtgaaccgagatcacgccattgcattccagcctggacaacaagtacaaaattctgtctcaaa

SEQ ID NO: 32965 - DNA, 351 bp, Homo sapiens
ctctaatgtttgcagcctgctgagcctaacaaggcagtggtctcaagaacattctttgtgcctttttaaagtactccattttatttttatgatagttatgtatttatttcacagatatatttaagtacccactttgtgtcaggtacagtacaagcaatgaagataaaacagaaaccaaaacacactcccttacagggaaaactgacaccacgttgccacaaaatgttgagtatagtcaactctgctgtgtggatcggagggcctgcatttatcctacaaataattgaatgtaatcctacattcatgtattcattggcagtacggagtaataaatgcagcaatgtcataaag

SEQ ID NO: 32966 - DNA, 521 bp, Homo sapiens
gaacctcctggggtctgtcagagcttgggatcctaatcctacacactctgctttatggagtaggtcctgatagatagacagcatagcctgtgttttcctgcccacctctgatgctaaatgcaccctgaggcctgagaaccaggtgccaattaaagctcattaggataccattgtctcaggcagaaatcggtacttctgattcagtccccatttcactgggctcctgtcccacagaatgatgggagcagtgggctctttggggcgtttccttaacctgcccagagctccttcctcatatatgtccttctagatcaccataaaagtcaacatttacattgaagctggtattaatgccaaagcacggggagttttctctaaaacagaaaatgtccaatttctaaagatcaggttccagcacagataagtgttgacttcagcccttctgggagctgctgccatgcataccaacagggtcccggcgctgtgctgagacaacccacgcttctaacagggtgtttgtc

SEQ ID NO: 32967 - DNA, 355 bp, Homo sapiens
tttttttttttgtagagatagggtctctttatgttgcccatgctggtcttgaactcctgggctcaagcagtcagcccaccttggcctcccaaaatgctgagactacaggcatgtgccaccatgcccggcagcctcctaagtcttaatagcttgtactaatatttctcttaaccaagatctttcagcctggaagtgatgaggttgcacatgtgccttcgagggattcctctgagaactgcatggaaactcagttgtagtggggaggcaggccagaggcagagagatgaggagggctcagttggcagaaagagtgtgaaggtggaattgacaggtagctgtgtggagatgagggcga

SEQ ID NO: 32968 - DNA, 506 bp, Homo sapiens
aaaacaatcatctccatcattttccattttacaaaaattaatgctactttttatacaaaaataaatacttaaaaaattagatatcactggattcatcactaaaatctggaaatgccttctcctctgtatatagcaggtgataagaaattcttgttactttctgtgttttacattctctattcttaccaggtgtgggaatttagttacctgacctggaagatgatctctaaatttgcatattccaaagccttatctattcaagacaaattacttgactcactgtgttatttggttcaaagtattgctgtcactatgattgcttatggccatgtccagaaggcaaaggaaaatggagcagcatcctgcagatgactgaggccaacctaatgccctatgctccccaaaagacaggacagagaaagattatttggaggcagtgaataaattgcctcagttctctgctttattttataagggcaaaagtggcctttctggacatgacagct

SEQ ID NO: 32969 - DNA, 330 bp, Homo sapiens
agccggagggagggtctggctggcggcagcgcgcaaggccgcaccgggtcacgcttgattcccgcggaatggggcgcaggttgccagaccgggtccccagtgctagggctcaaggaagaatttgttcatgcagaagatttagaaaaatactatgtaaaagagtttggagtaagcctcccttaatataaatgagatttattatctgccggaaaaagcagattatgtttcttattactgaacgcctgaagtaccaacgactcaaccagagcccacagaattcaatatcctgggtggtaaaaggaacaaataaagcaacacggaaaattaaaa

SEQ ID NO: 32970 - DNA, 1434 bp, Homo sapiens
gtctcattactgatgtgatgtcactttcaagattaggttataaatagactatggcttcaatcagagggttttctctctgtctagctctcttttgggtagttcattctgaggaaagccagctgccacgttatgatgtaggcctgtgaggtccacgtagcaaagaacatatggaagatttctaccaccccctaactaagcctttagatcagaccgcaaccccagccaacaaggtagctacaaactcttgagaagccttgagacagaggtactcaatagagccattcctatgagaaacgtaagtatctgctgttttacaccgctaaggttttagctaatgtattatgccataatagataagttatatacaacctttatcaaataataaaagtaaccatcatcagtaatgagacaaatcaaaaaccatggcccacccaatagaacataatgaggagagtacagaattgcttctgggatatttctgacaaagatgtatatgcttcattcatacatgaggaaacatcacacatactcaagatgggagagccattctaaaaaataactaggcagaaatcttcaaaaatattaaagtcacggaaaccaagaaaaaatatgaacctgtttcagattaaaggaaactaaacagacctaacattttaatacaatgtttgattttgaacttgaactttttgttatataagacactattgagacaagtgctaatgcttgaatagggctgaaggattagattataataatacattaatgcaaatttcctgattttaaacattgtagtttgattgcacaaggagaatgtctttatgtgtggaaaataaatagtcaacattctgtcttcaagcttctgagaaaactctgcttttagggcatagatagaagtggatgataattcacctgttcctctgctactaattgagctgctctctgtttccatggctggctcatgggatgagagaatatatctagttttttatgtttcaatttgtctctctatggcatttttgtgaaaataaggaagtgtggagacttatatatgtttctaaattgtaatagttcattaatgtaaagtacagacacagtcttcacttttccttcttagaccgtttaaatatggccacgaaacaagtagtctctggttggctggacactgtggctcatgtccttaacaccaacactttgggaggccgaggcaggcaaatcacttgaggtcaggagttcgagaccagcctggccaatgtggcaaaaccccatctcttctaaaaatacaaaaattagctgagtgcggtggtgcacaccggtaatcccagttactcgagaagctgaggcaggagaatcacttgaacctggaaggcagaggttgcagtgagccaagaccgcaccactacactccagcctgggcaatagagcaagactccatct

SEQ ID NO: 32971 - DNA, 425 bp, Homo sapiens
gaggatggtggggggcactcttctctttacctctttctttttgtctttttcccatgtgggctaagaaggatcctgctaattcctggggggcctgggaacttgattaagggaggggcaaggcaggtggggtgattaatggttgctggacagctgtggtttatttttatttttttattttttagagaccaggtctcactctgttgcccaggctggagaacactggcacgatcatagctcacttgcagcctcgaactcctggactcaggagatcctcccacctcagcctcctgagtagctgggattataggtgcatgccaccatgcccagctaatttttatttatttattttttatcttatgtatttatttttatttgagatggagtttcgcactgtcatggggctggagtgcagtggcacaatctcg

SEQ ID NO: 32972 - DNA, 467 bp, Homo sapiens
cttaacatacacagaatatgtattttgcatcataaacctatttaaaaaacaggttttcaatgtttatgtacttatgtgctgcatatctgttactttgtagaaaccagaagagcattcttatcaaggtacattatttttcagctacagtactgagttttttctgcctatgggatagtaaccacagtcttaaatcactaaagagactgtatttttgtataatgtccattgaatatgaagaaagcaacagtccttataattagaaatttcatgaaagcaaaagttttgcatacccaaatgaaggtactgtggaccccatgtcaaactgttaaatatattgtgtacgatctgtatatatactatatataaggcatataccgtgtggaaggcacagtcaaataatagttctgtgtactgttcttgtaacattagatctttttaataaataattctctttttattgactttta

SEQ ID NO: 32973 - DNA, 347 bp, Homo sapiens
  misc_feature (320)..(320): n is a, c, g, or t
atcagtagttgccaagaggtagaggtgggagaggagttggttgtagtgtggcaatggggaattttttgagtgttggaactcttctatattttggttgtggtagtggttacacaactgtgtcaaaacttacccagctgaacatgaaaaagatgaatattactgtatataaaaattacaggccaggcgtggtctataactcctgacctcagatggtctgcctgccatagcctcccaaggtgctgggattacaggtgtgagccacggcaccaggccttcatcccattacattctaaagattgtgtccaaaatggagttattgnttctttgtggaggtgatggggaccctt

SEQ ID NO: 32974 - DNA, 465 bp, Homo sapiens
ctgctgagagttggtaaagaggatggtcgagtgagatggtgttgacctccctggatcttatgtcactacatcctggacctcaagagggtcatccaagctttttgaaagctgaactccttgactggagaaacctagacaagaggcggggccaggtgcttgatatctaggaggcattcttcctcttcccttgccaccatggagctgggcacagtaagccatattgtttcctgaagcaggagtcccaggccttggctagagagggaacagatgtctaacaaaaagagaagcaattcgaggaattgatgaagcacaattcaaaatcctctctggctagtagctctctggcttctgttcatttgaagaataaatcttggctgacagtgggaagcaccaggtttgaaatcagatggctttatttttctttttttggcatttaaatcagtgaaataaaattattactggaga

SEQ ID NO: 32975 - DNA, 352 bp, Homo sapiens
ttttactattattttaataggttagagattaaaatgtcatccatctttgatttatctaggcctatatgtatatacacccctaccctgaccaacagacaattgtataattctctctatactttaagtgccacaagagttatttaatgtgtcacttagattaatccacatatttaccctttttgttgtttcttcattccctgaatcttcatgtttcttttacaaacttcaagttttttcttctgcttaaacaaaaactttagtatttcctttaatgtagggtattctgggtaaggaaagtcccataaatttgtctacaactgtccttgtaactttatccttgaaggcattttca

SEQ ID NO: 32976 - DNA, 492 bp, Homo sapiens
tgaaatttgggtggggacatggccaaaccatatcaccatgtgaagatgaaagcagaggtcagggtgatgcatccatgagccaaggaaccccaagcattgccagcaaccaccagaagctgggtgagaggcacagacaggttctgtctcacagcctcagaaggaaccaacactgacatcaccttgatcttggacttctagcctccagaagaaggctacatttctgtgacaatatatttctgctgtctaagccatccagtctgtggtactttgttatgacagccctaacaaactaatacagaggaggtgcagttattagtaatgacaaggagcagggtgtggccatgagaggtctttggaggagaggagatcgtggaagtgagaggccagggtatggggaggatgtatctacgtgaatattgaaatctcttaggacctggtgcagtggctcacgcccggaatcccagcactttcggaggctgggaggaggattac

SEQ ID NO: 32977 - DNA, 995 bp, Homo sapiens
ataactacttttttgtactataatccagaaatcaaaagacctaaaagttaatatccatactcacatttaattagatactagcttttatggcagcatgtttcataggaagggctgtcataggttggtgctttgtagctcactgaagtgtcctacacagtatttgatgacaaggaggaagctatatcaatttctagtacacccaaacccaatcaggtagttcagggtcaaatgtaattatggaatcatttaaattctaaatgtaaataaatacaggactacttcagacaaaatgttgttttaaagtagatgttttataaaattggtattcttgtttggaagaacacagctcaactgttccttactccccttctgcatgttcaaaagaatgtgtagacttaggaacaagagacagcaaagtttctcggtcttgttgcctgttggcaacccttaagggttggggttggggcaggggtggagatgttgataaaaataaagagttgggattttaattatccataattctgctatcccctatgactgcaggtaattgatagttggctatatctgaaaggtatgaaaactatgtgacagtttagatgacagatgagatcaattatttgactcaactcacccagttgtactgattcacaaggtgccaccaatatgctttcatttttttggaagtggtttcaacatgtagttgtttcttgggactttggctgctcaggtcttagtggtgtatcagggagactgcagttctgggcagcttcacttaattggcctcagattcgttgattgtcctgtctcctctgcaatggaaatgcatgagtgatcctgtaatggatatagctgagatttggagtgaacatgggatttggagacccaatacctgggtttagaaagtctccttactaactgtgtgaccttgggcaagtcacctaactttaaagcctgttacattatctgtgtaatgggattaacaatactttcacatg

SEQ ID NO: 32978 - DNA, 705 bp, Homo sapiens
cagctccagaagaatgagcctgcacagcttggactgtcacctctggcaggttcctgctctttgatgaagcctcgtcataattacaggtgtttgaaagttcctccattgatcttctctctcctgctgccttgtcaagaaggtgcctgcttcccctttgccttgcaccatgattctaagtttcctgaggcctccccagccatgtaaaactagccttatcttcaacagctgccaaaattgaagaacaaaaagaatctttgaaacttcccttcaactggtcatcctcttccctttttctctcctttaaacactgttccaattcattatgatggccccaaagcaaagacagacatggaagtgaacattggagtggaaggaatgacggggagcaaatgtctgctttctttctatcattcttgtatcaactctaaattgaaacccaaatcactgaaatctaaaaaatcacatgaaagcaagtcaatgactaaaagaaaatgaaatgagagaccctatcagagaaatatgaaagggaaaataccactgattaaataagttatgggaaaaataaatcattacaccattaaatgtatacgtcgacatactgtatgttgttatgtgcttattgtctttcaccagtagaatgtaagtcccataagggtaaggactttatatattcttttcacagcagtgtctctagtgcatggaaca

SEQ ID NO: 32979 - DNA, 2533 bp, Homo sapiens
aagggtagttctcattaggatgtataagtagtggcttgaggcaccttcttatcattttttgcatgttattctgattattaaacttcccccaatgtcatattccatgatgagggatttctgaactccatagtccagcgttgttgcttttctctcttctttgctactgaaaattgccagcagtaccgccatcagcacaccaaatctacccccacttatgtttgttctgccccatttcccaggagcagcttctagcacatatgtagagtatctggcaccaccttagcccagggctgcgtgcctgatcagtggggattctgttcccccaccccccagactgcaagagcttcttaagaaggagcccatattcccatttgtagctggaaagcgggtgaatgacatgacatggggcacctaggaaagatgattattagaggagtgcagcggaaaaaaatttgcactcttctccttttggttattactttccaaatatattaacaaaaagttgatgcttttaactttatattttcagaaaagtgtttttaattaaaaatatgtgatagggaccaaataagtaaagtacatttttctccactaaatttgaagtgagggaaagaggagccaaagtaagagatttttttttaaggaaacttaatctgattgtgaaaatcatacatatggagaaacatcagatcaggcaatagagtcagagggtcatgagcaatagacgatgatgcgaggcatttggggagcttcctggaggaaaattaagtttttttcctagcaaactaccatgtcctacaagaacttggttatataatggtgcgtctctgaatcactgattaaaaccagttgcttctgattttagtcacaggttttacaagtattcagctctccctcatgtttcatttctttttttaagataatctatcaaccttttttaaattttaaaatttttagatgtagagtttataagtaaaatatatttttagccattgttctgttagctgagctgatgtgtttggtcttagagggcctgacttcagatactctttgtgatcttgtaagggctctacacaaacttcattatgtatggtaaatttgtattcttatggattgtatatagaatgctttcgttagaagtacattctacttctgtatgtccctttgtaatccgcagttgcttactcaggggtttcatagtcatttcataaaaaataattcactagctgtctaatggtattttaagactgtttatctgtatcacaacgtcattaggagttctttcaacaattccataaatatactgtttactagaccttccctgtaaatgttcccaattcccatcctgtctcagacagtcaatagtcctgtgtacagtgactatttgcatgatttctcattgcactgctgcattcaggcactccagggcatgattaaacagtcattaacagtgcctctctggtacagttgatgcatgcattgatctttcttctctgctgtttttatatagcctttaattaaaaggaaaaaaataccactactctgcaatgcaaaagtcttcaaaattctttgtttcctgtattaatcacttctgttccagagtgaacaaatgttttcagctaagctatgtgagaatgtaagaataatatcctgcttgttctaaatagttcatatatttaaagtgtggtcagtatttcctccctgtaccttacaaacagaaaccaccctgggatggttgataccccttacaaagtcgatcttacccacacagactcctgtgtatgcgtgtctgtttataggtgtatatggagtcagtgttgataggaaggatgctctagaagtacttctgttgtttcctagaaggctatgagccagttccatggcatgtttaatgtataattcccatgtatcatgagaatttcactagaatgtcattaaacagcccaactacctcatgtgaaattggctgtggacaatctgtgtcagatgagaaatgtgttcagataaatttaatctggttaatagacttaacaaattaatgtctacataaagaagaaacatgatagaccagatgccaaaggctaaaatgtacatagatttccttggattaatttttaagtcactgtttaattccatgcctagtattcttatgaatgtttgtggtttcatagatttatgcactttgaatatctgtcacgtgcagtgttaatgttacctgttcttgtctctcagcattttgaatgagcatcataatcagagtagaaggcaagttaaactataaaagtgtcaagtggcttgttaacttcttaatttaatggacctttacttagaatataatatgttggagcctcttgggaccaaccgatgagcgacagtttcatgtttagatttgtattgtttctctgtccaagtccttattctctatcttgtggggaggggtgacaggggagggttttactttttttgcaaaaatgtttgaaaatatctgtcagattttatattcgttagttataataaacttatttttaaagta

SEQ ID NO: 32980 - DNA, 2612 bp, Homo sapiens
aagggtagttctcattaggatgtataagtagtggcttgaggcaccttcttatcattttttgcatgttattctgattattaaacttcccccaatgtcatattccatgatgagggatttctgaactccatagtccagcgttgttgcttttctctcttctttgctactgaaaattgccagcagtaccgccatcagcacaccaaatctacccccacttatgtttgttctgccccatttcccaggagcagcttctagcacatatgtagagtatctggcaccaccttagcccagggctgcgtgcctgatcagtggggattctgttcccccaccccccagactgcaagagcttcttaagaaggagcccatattcccatttgtagctggaaagcgggtgaatgacatgacatggggcacctaggaaagatgattattagaggagtgcagcggaaaaaaatttgcactcttctccttttggttattactttccaaatatattaacaaaaagttgatgcttttaactttatattttcagaaaagtgtttttaattaaaaatatgtgatagggaccaaataagtaaagtacatttttctccactaaatttgaagtgagggaaagaggagccaaagtaagagatttttttttaaggaaacttaatctgattgtgaaaatcatacatatggagaaacatcagatcaggcaatagagtcagagggtcatgagcaatagacgatgatgcgaggcatttggggagcttcctggaggaaaattaagtttttttcctagcaaactaccatgtcctacaagaacttggttatataatggtgcgtctctgaatcactgattaaaaccagttgcttctgattttagtcacaggttttacaagtattcagctctccctcatgtttcatttctttttttaagataatctatcaaccttttttaaattttaaaatttttagatgtagagtttataagtaaaatatatttttagccattgttctgttagctgagctgatgtgtttggtcttagagggcctgacttcagatactctttgtgatcttgtaagggctctacacaaacttcattatgtatggtaaatttgtattcttatggattgtatatagaatgctttcgttagaagtacattctacttctgtatgtccctttgtaatccgcagttgcttactcaggggtttcatagtcatttcataaaaaataattcactagctgtctaatggtattttaagactgtttatctgtatcacaacgtcattaggagttctttcaacaattccataaatatactgtttactagaccttccctgtaaatgttcccaattcccatcctgtctcagacagtcaatagtcctgtgtacagtgactatttgcatgatttctcattgcactgctgcattcaggcactccagggcatgattaaacagtcattaacagtgcctctctggtacagttgatgcatgcattgatctttcttctctgctgtttttatatagcctttaattaaaaggaaaaaaataccactactctgcaatgcaaaagtcttcaaaattctttgtttcctgtattaatcacttctgttccagagtgaacaaatgttttcagctaagctatgtgagaatgtaagaataatatcctgcttgttctaaatagttcatatatttaaagtgtggtcagtatttcctccctgtaccttacaaacagaaaccaccctgggatggttgataccccttacaaagtcgatcttacccacacagactcctgtgtatgcgtgtctgtttataggtgtatatggagtcagtgttgataggaaggatgctctagaagtacttctgttgtttcctagaaggctatgagccagttccatggcatgtttaatgtataattcccatgtatcatgagaatttcactagaatgtcattaaacagcccaactacctcatgtgaaattggctgtggacaatctgtgtcagatgagaaatgtgttcagataaatttaatctggttaatagacttaacaaattaatgtctacataaagaagaaacatgatagaccagatgccaaaggctaaaatgtacatagatttccttggattaatttttaagtcactgtttaattccatgcctagtattcttatgaatgtttgtggtttcatagatttatgcactttgaatatctgtcacgtgcagtgttaatgttacctgttcttgtctctcagcattttgaatgagcatcataatcagagtagaaggcaagttaaactataaaagtgtcaagtggcttgttaacttcttaatttaatggacctttacttagaatataatatgttggagcctcttgggaccaaccgatgagcgacagtttcatgtttagatttgtattgtttctctgtccaagtccttattctctatcttgtggggaggggtgacaggggagggttttactttttttgcaaaaatgtttgaaaatatctgtcagattttatattcgttagttataataaacttatttttaaagtattaagttcttaaaggtttttgtgtggttttctgcctaattgaatatgtcaataaaaagtctcgtttatggaacacacat

SEQ ID NO: 32981 - DNA, 315 bp, Homo sapiens
taccctcactaaggaacaaactggacccaaccgggtgcgccctctagaactagtgaccccgggctgcagaattcgcacgagttacttcttaatttaatggacctttacttagaatataatatgttggagcctcttgggaccaaccgatgagcgacagtttcatgtttagatttgtattgtttctctgtccaagtccttattctctatcttgtggggaggggtgacaggggagggttttactttttttgcaaaaatgtttgaaaatatctgtcagattttatattcgttagttataataaacttatttttaaagta

SEQ ID NO: 32982 - DNA, 1981 bp, Homo sapiens
ggcacgaggcgagggttgcttgggcagcgactgtcatggcggcggccgcccccaatgccggaggctcggcccctgagacagcgggttccgccgaagctccgctgcagtacagcctgctcctgcagtacctggtgggtgacaagcgtcagccccggctcctggagcctgggagcctgggcgggatcccaagtccagccaagagtgaggagcagaagatgatcgagaaggcgatggaaagctgcgctttcaaggctgcgctggcctgcgtgggaggatttgtcttaggaggtgcatttggggtgtttaccgctggcatcgataccaacgtgggctttgaccctaaggatccttaccgtacaccgactgcaaaagaagtgctgaaagacatggggcagagaggaatgtcctatgccaaaaatttcgccattgtgggagccatgttttcttgtactgagtgtttgatagaatcttaccggggaacatcagactggaagaacagtgtcatcagtggctgcatcacgggaggagctattggtttcagagctggcttaaaggctggggccattggttgtggaggttttgctgctttctctgctgcgattgattattacctccggtgagagtaattgcctgcagggaaggatgatgccagccccggatccgggctgctctctggaggacagtttctgtaccacaccagggccttgcttcagggcctgaagacattcattttccctcatgtcgttggtattctgagggagctgcctggcttctctgcctccagcctttggggtagccacactttgctgctcctggactccagccagccttcacagaggacgtcccgtgccagattctctcacagcagatcgggagacaggatgttgacatataggaattcagctccacaaagcttcaggcctgaccacagctggccctctaggttgtttggtgttgtgggcacagaggtgacagtgtctctgcaggcactcaggaagctgttctaccttggaactccatgcaactatccgtctcgaataccagggcagggcaaggcggactgatgccgtccaaccaattatctcacttgttttgtgttctgtcatccttgttttttttttaaaaatacactcccctcccccaccgccacacaccttacagttcaaaaggttggtttatttgtattttattttcaaattccctattccaaaaatagtgccgggtggcccaaagataacatctgaagggaaagaatgagaaagctcccagggaagcgggggatggggcgctgaggcagggttgttagaggactgtgtcatcctcaccaagctcattacatctgccagggcctgcctcaagaagcccagcccagccttttcctgggatgcagtgaaatcccatccatgaactcgatgggcccctcctgtgccggccgagaggcacacactgccttcacgacgtgactgctggacctggccgagcttgaggccacatgtgaagggtcctgctgtggtcatcttggtgactcggtcacagcagctactggccaagatcagacgtcgctgaggggctgttcaccaccatcctcgttctccagggtcaaggaagtgttttaacatgtcgtgttttcgacttgaccttgtggtatttttcttggcctagttgtgtgccatggatattaaaaaaaaaaaaaaaaatccgtctacagttgggcttcagcactggtgctgctttaccctggtgctctgtggggggatgacactgctggagtcaggcctttgctcttgggtggggcacaggcaggtcgcttggtgggggccacacagtgctgggcaccttcagccagtggtgatgagtctcctttttcctataatacggtaattcctctatcctttccttttttgccttcttcctcatctgccctgtcttctggcccacacactcttaaccagcgttcacactcagtgtacatggcctggag

SEQ ID NO: 32983 - DNA, 1980 bp, Homo sapiens
tttaaggctaggtacgaggcctggtgttgctgtcatggcggcggccgcccccaatgccggaggctcggcccctgagacagcgggttccgccgaagctccgctgcagtacagcctgctcctgcagtacctggtgggtgacaagcgtcagccccggctcctggagcctgggagcctgggcgggatcccaagtccagccaagagtgaggagcagaagatgatcgagaaggcgatggaaagctgcgctttcaaggctgcgctggcctgcgtgggaggatttgtcttaggaggtgcatttggggtgtttaccgctggcatcgataccaacgtgggctttgaccctaaggatccttaccgtacaccgactgcaaaagaagtgctgaaagacatggggcagagaggaatgtcctatgccaaaaatttcgccattgtgggagccatgttttcttgtactgagtgtttgatagaatcttaccggggaacatcagactggaagaacagtgtcatcagtggctgcatcacgggaggagctattggtttcagagctggcttaaaggctggggccattggttgtggaggttttgctgctttctctgctgcgattgattattacctccggtgagagtaattgcctgcagggaaggatgatgccagccccggatccgggctgctctctggaggacagtttctgtaccacaccagggccttgcttcagggcctgaagacattcattttccctcatgtcgttggtattctgagggagctgcctggcttctctgcctccagcctttggggtagccacactttgctgctcctggactccagccagccttcacagaggacgtcccgtgccagattctctcacagcagatcgggagacaggatgttgacatataggaattcagctccacaaagcttcaggcctgaccacagctggccctctaggttgtttggtgttgtgggcacagaggtgacagtgtctctgcaggcactcaggaagctgttctaccttggaactccatgcaactatccgtctcgaataccagggcagggcaaggcggactgatgccgtccaaccaattatctcacttgttttgtgttctgtcatccttgttttttttttaaaaatacactcccctcccccaccgccacacaccttacagttcaaaaggttggtttatttgtattttattttcaaattccctattccaaaaatagtgccgggtggcccaaagataacatctgaagggaaagaatgagaaagctcccagggaagcgggggatggggcgctgaggcagggttgttagaggactgtgtcatcctcaccaagctcattacatctgccagggcctgcctcaagaagcccagcccagccttttcctgggatgcagtgaaatcccatccatgaactcgatgggcccctcctgtgccggccgagaggcacacactgccttcacgacgtgactgctggacctggccgagcttgaggccacatgtgaagggtcctgctgtggtcatcttggtgactcggtcacagcagctactggccaagatcagacgtcgctgaggggctgttcaccaccatcctcgttctccagggtcaaggaagtgttttaacatgtcgtgttttcgacttgaccttgtggtatttttcttggcctagttgtgtgccatggatattaaaaaaaaaaaaaaaaatccgtctacagttgggcttcagcactggtgctgctttaccctggtgctctgtggggggatgacactgctggagtcaggcctttgctcttgggtggggcacaggcaggtcgcttggtgggggccacacagtgctgggcaccttcagccagtggtgatgagtctcctttttcctataatacggtaattcctctatcctttccttttttgccttcttcctcatctgccctgtcttctggcccacacactcttaaccagcgttcacactcagtgtacatggcctggag

SEQ ID NO: 32984 - DNA, 1957 bp, Homo sapiens
aggtgtacgctcggatgttacgggaccccaatgccggaggctcggcccctgagacagcgggttccgccgaagctccgctgcagtacagcctgctcctgcagtacctggtgggtgacaagcgtcagccccggctcctggagcctgggagcctgggcgggatcccaagtccagccaagagtgaggagcagaagatgatcgagaaggcgatggaaagctgcgctttcaaggctgcgctggcctgcgtgggaggatttgtcttaggaggtgcatttggggtgtttaccgctggcatcgataccaacgtgggctttgaccctaaggatccttaccgtacaccgactgcaaaagaagtgctgaaagacatggggcagagaggaatgtcctatgccaaaaatttcgccattgtgggagccatgttttcttgtactgagtgtttgatagaatcttaccggggaacatcagactggaagaacagtgtcatcagtggctgcatcacgggaggagctattggtttcagagctggcttaaaggctggggccattggttgtggaggttttgctgctttctctgctgcgattgattattacctccggtgagagtaattgcctgcagggaaggatgatgccagccccggatccgggctgctctctggaggacagtttctgtaccacaccagggccttgcttcagggcctgaagacattcattttccctcatgtcgttggtattctgagggagctgcctggcttctctgcctccagcctttggggtagccacactttgctgctcctggactccagccagccttcacagaggacgtcccgtgccagattctctcacagcagatcgggagacaggatgttgacatataggaattcagctccacaaagcttcaggcctgaccacagctggccctctaggttgtttggtgttgtgggcacagaggtgacagtgtctctgcaggcactcaggaagctgttctaccttggaactccatgcaactatccgtctcgaataccagggcagggcaaggcggactgatgccgtccaaccaattatctcacttgttttgtgttctgtcatccttgttttttttttaaaaatacactcccctcccccaccgccacacaccttacagttcaaaaggttggtttatttgtattttattttcaaattccctattccaaaaatagtgccgggtggcccaaagataacatctgaagggaaagaatgagaaagctcccagggaagcgggggatggggcgctgaggcagggttgttagaggactgtgtcatcctcaccaagctcattacatctgccagggcctgcctcaagaagcccagcccagccttttcctgggatgcagtgaaatcccatccatgaactcgatgggcccctcctgtgccggccgagaggcacacactgccttcacgacgtgactgctggacctggccgagcttgaggccacatgtgaagggtcctgctgtggtcatcttggtgactcggtcacagcagctactggccaagatcagacgtcgctgaggggctgttcaccaccatcctcgttctccagggtcaaggaagtgttttaacatgtcgtgttttcgacttgaccttgtggtatttttcttggcctagttgtgtgccatggatattaaaaaaaaaaaaaaaaatccgtctacagttgggcttcagcactggtgctgctttaccctggtgctctgtggggggatgacactgctggagtcaggcctttgctcttgggtggggcacaggcaggtcgcttggtgggggccacacagtgctgggcaccttcagccagtggtgatgagtctcctttttcctataatacggtaattcctctatcctttccttttttgccttcttcctcatctgccctgtcttctggcccacacactcttaaccagcgttcacactcagtgtacatggcctggag

SEQ ID NO: 32985 - DNA, 1602 bp, Homo sapiens
  misc_feature (20)..(20): n is a, c, g, or t
gcctgttcgaggacccaggngaatgtcctatgccaaaaatttcgccattgtgggagccatgttttcttgtactgagtgtttgatagaatcttaccggggaacatcagactggaagaacagtgtcatcagtggctgcatcacgggaggagctattggtttcagagctggcttaaaggctggggccattggttgtggaggttttgctgctttctctgctgcgattgattattacctccggtgagagtaattgcctgcagggaaggatgatgccagccccggatccgggctgctctctggaggacagtttctgtaccacaccagggccttgcttcagggcctgaagacattcattttccctcatgtcgttggtattctgagggagctgcctggcttctctgcctccagcctttggggtagccacactttgctgctcctggactccagccagccttcacagaggacgtcccgtgccagattctctcacagcagatcgggagacaggatgttgacatataggaattcagctccacaaagcttcaggcctgaccacagctggccctctaggttgtttggtgttgtgggcacagaggtgacagtgtctctgcaggcactcaggaagctgttctaccttggaactccatgcaactatccgtctcgaataccagggcagggcaaggcggactgatgccgtccaaccaattatctcacttgttttgtgttctgtcatccttgttttttttttaaaaatacactcccctcccccaccgccacacaccttacagttcaaaaggttggtttatttgtattttattttcaaattccctattccaaaaatagtgccgggtggcccaaagataacatctgaagggaaagaatgagaaagctcccagggaagcgggggatggggcgctgaggcagggttgttagaggactgtgtcatcctcaccaagctcattacatctgccagggcctgcctcaagaagcccagcccagccttttcctgggatgcagtgaaatcccatccatgaactcgatgggcccctcctgtgccggccgagaggcacacactgccttcacgacgtgactgctggacctggccgagcttgaggccacatgtgaagggtcctgctgtggtcatcttggtgactcggtcacagcagctactggccaagatcagacgtcgctgaggggctgttcaccaccatcctcgttctccagggtcaaggaagtgttttaacatgtcgtgttttcgacttgaccttgtggtatttttcttggcctagttgtgtgccatggatattaaaaaaaaaaaaaaaaatccgtctacagttgggcttcagcactggtgctgctttaccctggtgctctgtggggggatgacactgctggagtcaggcctttgctcttgggtggggcacaggcaggtcgcttggtgggggccacacagtgctgggcaccttcagccagtggtgatgagtctcctttttcctataatacggtaattcctctatcctttccttttttgccttcttcctcatctgccctgtcttctggcccacacactcttaaccagcgttcacactcagtgtacatggcctggag

SEQ ID NO: 32986 - DNA, 636 bp, Homo sapiens
ggcacgaggcgagggttgcttgggcagcgactgtcatggcggcggccgcccccaatgccggaggctcggcccctgagacagcgggttccgccgaagctccgctgcagtacagcctgctcctgcagtacctggtgggtgacaagcgtcagccccggctcctggagcctgggagcctgggcgggatcccaagtccagccaagagtgaggagcagaagatgatcgagaaggcgatggaaagctgcgctttcaaggctgcgctggcctgcgtgggaggatttgtcttaggaggtgcatttggggtgtttaccgctggcatcgataccaacgtgggctttgaccctaaggatccttaccgtacaccgactgcaaaagaagtgctgaaagacatggggcagagaggaatgtcctatgccaaaaatttcgccattgtgggagccatgttttcttgtactgagtgtttgatagaatcttaccggggaacatcagactggaagaacagtgtcatcagtggctgcatcacgggaggagctattggtttcagagctggcttaaaggctggggccattggttgtggaggttttgctgctttcttctttgggccccttttgtgccccctgaaaaaatatttttttgggg

SEQ ID NO: 32987 - DNA, 448 bp, Homo sapiens
agtttgagccagtctgaagaacattggaagaccagccccccatcccatcccactcctccccactgcctctacaaaacatttaaaaattagctggtcatgttgctgtgcacctgtggtcccatctacttgggaggctgattactcccctgccatcgcttgagccccgggagtggaggctgcaatgagctatggttacaccacaggctgaaaaaaacataaatgcattcaaatgcagatatcaaaatattaaagatgcaatttatgacattaacatgtgcttcttcaccctcaggtttattaaggtatgattgacaaaattgtatatatttatggtgtacagcatgatgttttgatatctgtatgtattgtgaaatgaccaagtcaagctaatttaaatataattatctcacgtacttattattattattttgagacagagtctcgctct

SEQ ID NO: 32988 - DNA, 475 bp, Homo sapiens
gatccctcaagatacccattggaaaggttcattggctgtcctgctctccccctcaggagctctaagtcaagatgcacatctacgcataggccacattcccaaggtcagtgatgtgtgggctagggcttgttttagagactgtgacacctggaattactcaagatggcctgatgccagggtgctatggtttggctgtgttcccacccaaatctcatctggaattttatttcccataatccacgcatgtggtgggagggacccagtgggaggcaatttaatcatggtgggtggcttccctcatcctgttcatgtgacagtgagttagttctcacaaaatctgatgtttttataaggggcttcccccttagctgggcttttattcttctccttcctgccaccatgtggaaaaggacatatttactttcccctccaccatgattgtaagtttcctgaggcctcctcaaccttgtggaac

SEQ ID NO: 32989 - DNA, 361 bp, Homo sapiens
ttaagactcatggctttactgtaatatgttttgaattgatcattccagttctggcttggccttttcaacagattcaggtctatatttctgcaaaagtttctgggattatagttttaaatattctgcttcgttgttttgcttttcttctgggactccaattatgtttacgttgggcctgcttagctatcttttatttcagtcactttgacttcaacccttttatatttatatacacatacacacacacacacacacacacagacacacacacacacacacacacacacacacacacacgcatttttaccccaaatacttatttgacagtatttgtttttgttttttgaagacagggtcttgc

SEQ ID NO: 32990 - DNA, 393 bp, Homo sapiens
catacaggtaaaaccaaactgtaattgaagtgtatccccagaaagctatgggacctcttataactaatgatagtcaccccagtcaccccaggattttatcggcttatcaatttgtacaacatagataataaattaatgataaagtataattcatgtaatgattctatttgacttcactagaaaccatatttatttgccaattcattttcgaggtgacagttggttaagtcacattcatattgtctgtcagctcataactataaattttataaattaattggcagacatactctgtatatggttccaaaatatggcttttgcttaataatttgtagaagactatttagaatgtataaggagctggtaaatatatttggataaaagggctttctt

SEQ ID NO: 32991 - DNA, 528 bp, Homo sapiens
agtgatagagggcattgcggcagagaaaaaccctgtgaacaactgtcttgctggtttgatgaatatttaatgtgctcctactggtttaggatgctaggttcatctaaatgtgcataactacttttagggtcttaaatgcccccttgctttctggagacaattaaaattttaaatcctgtaaacagttttgttacatgcaaagaatacttgtgtagatcacctgaaactgtttcccaccaattgttgtttgggaaagactgttgtatttgaaatactagaacaggtgagtgaggtagaacatagtacagattctctctagcatgaggttatgtggggctcaacggaatggtagagcatggggtctgaggctgtagaaagagtaaggtattttagaatgaaaatctttgtgggtatggctgggcacagtggctcacgcctgtaatatcagcactttgggaggcttaggcgagtggatcacctgaggtcaggagaccagcctggttaacacggttaaaccccatgattact

SEQ ID NO: 32992 - DNA, 337 bp, Homo sapiens
cttggctatgtccaagtggaagcaaattttaatgctcggtctcagaagaaaatttcacatatacaggcttcagaggtaacggggtaaccgatagcttccttttacttctcggcatttatttttgcttttctgaagcatagtcctatgtttattaaagggaccacaggagtacacgctgtttgaaagccatttctggacaccactgaggccggctttcccaggagcctttgtcgcctctgcagcagaagtcactggactctcctcaaggtgtaatgtgagggaacaggtgcctcgggggcttgggaaaacaccacgctgtgctctgatgtgtgtcccc

SEQ ID NO: 32993 - DNA, 583 bp, Homo sapiens
cacgaagagggcaaaataattatagtcttgtagcctgtatcttgagaatgatgcctagggtgttatccctaaatggtcctgtggctagccaagaattaggaggtttcttgttgcctgatactgactataagattaactgaatcttttttttcttgtggtaaaatatatatgacataaaatttactgtttttaagtgtatagctcagtggcactaaatacactcatattgctctacaaccatcaccttaaaactctctactcattaaacaataggtccccagtctctccttccaccagcccctgggaccactgttctactttctgtgtctgtgaatttgactacgctaagtactcatgtaagtggaattatacaatatttgccctttgtaactgacttgtttcacttagcataatgttttcaacttcatccaagtggtggcatgtgccaggatttccttcctttttaaggctaatattccattgcatgtatataccacattttgtttatctactcacctgttgatggacatttgggctattatgaataaatgttgctacaagcattggtgtacaaacatccatt

SEQ ID NO: 32994 - DNA, 473 bp, Homo sapiens
cggtgaaccccaaaagggaatgaagcacaaagtgtacacattttcaaaagtaatcatggcagtaagtgtcctaagataccctgagctgtccttaaggataaattttacagtggatgccaagaaaaaaacaggtttagagacaaacttggaatgtgtttcactgcaccttagatttcccttcggcaagaagaggtgacctacatcctagcactggtgggggggagtatcatggtcttgtacaaagtaggggggcttgggagttggaaggggattcagatccagctctgtggctgaccagctgtgatattttagtgatgttaatctttcttgtaaaggcattgcattgggttggatagtgccattctcccaaagggccctttcagcccaaatctaccttaagactacctattatgttcattaatgagtgattaccaggcatccaaggacttctgtgactttcccttgccaggccc

SEQ ID NO: 32995 - DNA, 1040 bp, Homo sapiens
  misc_feature (61)..(61): n is a, c, g, or t
  misc_feature (105)..(105): n is a, c, g, or t
  misc_feature (308)..(308): n is a, c, g, or t
  misc_feature (452)..(452): n is a, c, g, or t
  misc_feature (770)..(770): n is a, c, g, or t
  misc_feature (908)..(908): n is a, c, g, or t
atgccctgcccctggccctacgcccctacctccggagcgagttttccccatcggtggacgngcggccctgcagcagtccctcagagctacctgcgaagctgcttntgggggccactcttcctcgggccccgcggctgccgcgccggctggcctggtgctccattgactgggagcaggtgtgcttgctgcagaggctgggagctggagggtttggctcggtgtacaaggcgacttaccgcggtgttcctgtggccataaagcaagtgaacaagtgcaccaagaaccgactagcatctcggcggagtttntgggctgagctcaacgtagcaaggctgcgccacgataacatcgtgcgcgtggtggctgccagcacgcgcacgcccgcagggtccaatagcctagggaccatcatcatggagttcggtggcaacgtcactttacaccaagtcatntatggcgccgccggccaccctgagggggacgcaggggagcctcactgccgcactggaggacagttaagtttgggaaagtgtctcaagtactcactagatgttgtgaacggcctgctcttcctccactcgcaaagcattgtgcacttggacctgaagcccgcgaacatcttgatcagtgagcaggatgtctgtaaaattagtgacttcggttgctctgagaagttggaagatctgctgtgcttccagacaccctcttaccctctaggaggcacatacacccaccgcgccccggagctcctgaaaggagagggcgtgacncctaaagccgacatttattcctttgccatcactctctggcaaatgactaccaagcaggcgccgtattcgggggagcggcagcacatactgtacgcggtggtggcctacgacctgcgcccgtccctctccgctgccgtnttcgaggactcgctccccgggcagcgccttggggacgtcatccagcgctgctggagacccagcgcggcgcagaggccgagcgcgcggctgcttttggtggatctcacctctttgaaagctgaactcggctga

SEQ ID NO: 32996 - DNA, 2151 bp, Homo sapiens
gccaaaagaagcctctgggaaggtgtgccaatggtgaaaacgtacagagggtcagggtgaagcagtgatctctattggttgaaaaactgatcaggtcatatgatgattgaagtatgtttattgtaagggcagaaatgtgttggcatttggataaaaaactgctaacattatagaacttattacctaacaaaatttcacaccacaaaaaatattttaatggcaaattcaaggtgttttattgcttacaaatcagcatctttgactctttgaacatcaatttgtgtttacattgaaatgacaaaaagacaaactaagaagaaatacagcatgcaagttggaattcagagttaaaaccatgatgttgccgctcagccagctatgtgactgttgaccctttcaagaacacacatggatttaaaagttggatgacatccattgttggggccttgggggatatggtaaagcatgaaaactaaacagccaggagcctgtgaaatctgctactgtattttccaggacttcattccactccttggctaaaaaaatcttggaagtttcacagattatgatgtggacctgtcacctgtaaattgtctcaatctactcagacaagacactaaactgtctttggatactatagatgtcagtgcttatagcagctggaatttggctagtgacaatgtttaaagatgtaatactagttagtatctattgaagcttaaactttgctggtcaggttgtagctattgtaaaagtatttattgaagaagctcacagtccttcagttgtacagactgaaaaactttcatgaaagatccaacatactaatgtaaattatatttattacaatgtatgatattaatgtgtcaaactggtgtattttacaaaatatataatgcatacataaataagagttgtatattacagtgcttttcaaatatcagtgtcttggaatatttaagtcttcacattttttggtctaaaatatgaaaatgtttcatgatacaagtgattaattttccctagtagtgcttttgcatgtttgcctttttatttaagtttttttctatatagacacaatttggtgtcagactatcataagatcgatagtgaatataaaatatcttagccaaatggggtctgtattgtctacattttatatattaaataaaagtttttgttgtcttttcaggaggtttagagtattgtcactaaatatgatcaaagcttccctttccaaatgcaaaagtcttgtcctacatttaaagttgatctgtcatgttttagcagtcaagtgggatgggcattatataaacaacgttacaatgtaaggaaaatctttaaggagatggggagagaaaaaggcagctggtataatcggttactgctgcttagttctacttaattttttgtgttgcttcttcttaaggtgagatagcataatcttaactgttttgagatggaattttaaagtaacacactaccagcgagttcaacactgctattgattttaatctgtttttttttgtttagttgataacttaaattccaagtttcatagtgataattgtatattatttggctgctgaattctgttagagttttttattctgttgtacattgtattatacacataatcacaaattaatatgaaggtgaatatatgttacatatcaaaatttgtgaatttgaattatagtatgttttagtgctattgcaaaaaatgtttatttttatattatctgtgattttaatatagatgattgaactagatttctttttgagtgatagtgccattgaatgagcagtatggaaacagtgttacttgatattttgagctttctcaggtttatctaaatcagtggtagcttaacaaaacccagactaattgtgtgtaattgtatttttaataaaaggaaagtacatttcctataatagcatagtactgtttgcatgtaagagtatgcaaaaccttgtgtgtgtgtgtgtgtgtgtgtgtgtgtgtgtgtcttagtgtgtgtaaggcatggcagccaactttgtatctgctatttttagtacgagcagagcttcataattgtggtcactagaactgtacttaccatggacagttaaaactgaaaaagactcaataaaactatgaaacatggt

SEQ ID NO: 32997 - DNA, 396 bp, Homo sapiens
ctgcccaggaattaaagaggcaataaattatcttagttactattagaaaaggggagcttgttaatattgtgacatcattattacctgaggtgtcctgtactggtagagccattaaacaaaaatcttgctcctccattgccttaagtaagtttctatttagtattgtaaatggatggaataatgaccacagaaacactctgacagtgctgaggaataattgttcctgcatttaatatcatttgaaaattttgacgaccaattttaagtgatttttagtaattaaatttttatttatttttttgaggagagaaatggtctctgtcacctagtctagagtgcagtggtgctaccatggctcacggcagcctcatcctcctgggctaaagggatcctccc

SEQ ID NO: 32998 - DNA, 256 bp, Homo sapiens
ttgactcttgtgtgttggggagtggggcaggggggtgggctggggccaagggccagggaggacaatttggtcctgactctcttatttggggtctttatggatctgctctaacaccagccagttagagccaggagactgcaagctgggacctgtgcattgatcaggtatgcctgaggccaatggtgaagggaggatggaccctttgaatccagttatttggctctctgggctcctgccctgaggttccctccagccc

SEQ ID NO: 32999 - DNA, 469 bp, Homo sapiens
taagatttacccgtatgtttccttctaagagttttacagtcgtaactcttacgtttaagtcatcaattcatttttgaattaatttttgcatatggtgtgatggagggtccaacttcattttttttttcatgtgactatctgattatcccagacctatttgttgaaaagaatggtcttgttgacctttttgaaaatcatttgggctggatgtggtggctgatgcctataatcgcagcactttagtgtgatggagggtccaacttcattttttttttcatgtgactatctgatcatcccagacctatttgttgaaaagaatggtcttgttgacttttttgaaaatcatctgggctggatgtggtggctcatgccagttatcccagcactttgggaggccacagtgggaggattgcttgagcccagaagttgaagaccagcctgggcaacatggtgagattctatctctaca

SEQ ID NO: 33000 - DNA, 1095 bp, Homo sapiens
ttcatgtggggaagacaatctggcattcttgttgatcttggtatgagaaactgtactaatacttgcataattttgagtcaaattactagagcactgtgaatatcttacataaataaacgtagtacaaatgtatctaaattctgcaggacttaagagcaacgggaggcaacttttttgaaaatctgttaagtcgtgataaatctcaataaggagatgaaacaatgtattaatctggtgaaatttcacatttttaataggtctgcttttcaaaagtaagaatcaagttaactatgagggacatcataatgaagtttcgtggcacaacacgagtcacagaggcactgtcttaagacagtctctctgatctgtaacttgtaaacaatattttgaaataagctactcatacattccattatttgtttcctaactaaaaatatttacatgtctttaatacaccaaacaccttgcctttgcccactcaaaagattgagatgtcaataaagatgaggcctaggaatttgggggttaagtggaaaagagataattatcttatttggaattaacttgctaactcaggtgaaaattcccttacccctgccaccaaataagacagtattctattatgtctccctttgactcctaacacccaactaagaaggactaactctgaatgtccttcctttttaatcaatacctaaggactcactgctccttccccaagaaaagaacagtgaaggcctgacaggcaataaccccgaataccctcaaaagtgtgggccttcgagcagcactgctcttgggatccagttaccacctttccccttcccccaacccacttcccgggttttctcaggctcggcctgctccctccccaccccacagccacatttccagctgcggccaccgcctcgggttctcttgtgagcttccatccctccgaggagttgccccctgtccatcacctccccaaaccatgttccaccccagaccacccgcccgcgagaccgtccatcctagcgctctgggaggggaggggaaggcggcggaaggaggaggggaacactgctgcttcctcacaggcagaagggcggccgc

SEQ ID NO: 33001 - DNA, 793 bp, Homo sapiens
ctttcaaccttcagatgaaagaagcaggtctagagaagtgttgcttccttcactctgatccaaatggggagtcaaccaggcaccagggctcaatcaacagcaataaacatcactgtctgaggtcaactggcttgctcagctctctgttatcaggcactgccaccagcagcacttctatcagagtgcgagctcctcaaggttaaaggcatttgagaagggcttaccaagagtccagacactagacaaagttacttgtgcagtctgctttcagacactgggaatgaagtcttcctccctaccaccaaacttggggggaaaaaacaaaaaaaaacctctaatccaatccttggtctgcaggtaagctaaagtgcagattcctgaggaggatcacagaaacttcagtactctggtctacctttcagtgtgaatgagttccagccctattcttgaaaattgttattggaacagagcaggtaggccctgaggcatattgaagggagttaatgattatggagtgatgcagggtgcctgacagcattggacaggagggtatgttttctcatgttggtctcacaataactatgtagagccactcttacccccattgtacagatgaggaaactgttgccttaaaatacaatttttttgtaataaagtcatgctaatttgtttacatattgtctatagttgctttcactggcaaaacctaaaatgtttactatctggccctttctagaatgtttgctgaccttgttctgaattcttcaagctctaaatttacctctgtagagaa

SEQ ID NO: 33002 - DNA, 334 bp, Homo sapiens
catgctggaaaagcagcaggaaacacgagaaagtgcatgctcacacccttatgcttttgtatctactatttctgcacttggtgctgtctttctttcaggaaaatatttgattttcctttaaagctcagctcaaatgttcttttctccaaaactttccctgacgaccaaccttcccctacaaaagcagaactgacatctcttcttattgctgtcagtatctctgtttattgagagctgcttgtgtgctggcactgagtagacagcaaattaaattactgcatttaattcttatgacaactccttatggttgcttttattattgttcccattttat

SEQ ID NO: 33003 - DNA, 1027 bp, Homo sapiens
aacggtagcatccgtttttccgcgcccgcggccttgaaggggtggtggtcgacgggcaagtagagaccgcgagggtctggaggggcgaccggcctggcacagaggggaaggaagagagcgggatgctaagtgccgtctggggagccggagggcccggggcgggcggggctgctcgaggacagccgagcagaaaagaattgctgctgaggcaccacctttggagcggtcctcgctgcctgtccttcccgctgggctcactccccgcgtctctcctggggcttcctggagccacttcccacaggagctgcttgtccccaaatcttgcctcaggacttgctgccaggggaacgcagactcagagcgtcctctttggagaagtaaggctgcctctggacggaggagtgaggggggcgaggaaacgcagtcttctgagagcacaccccaggactgggattttgccaggaagatgtggaatggtgtggaaagacaagaagctgcagccttcaggctgccatgaaaaagctgggggtgtgttctgtggcccatcaagagggggtgtgtaatgaattgttaatgaatttctcagatgagccaaagtggtgaacttgtctcagtacccagggagactcagactcatccccagctcttggcctccattttcccagctgctgtgattggagtgggtccctggaattcatatgctggaaatttggtccaggtgtgggtgtgttgggaggtggggtttaaggtgtggttaggccattaagagattaatgctgctctttagggactgggctaattcttgagggagtgagtggcttcccgctctctccggacagcattaactgccacaggttgggttattataacatgaggccacccctcatgttttgtcccactcccccttccacttcgcttctgtgtcatgatgcaggacaaaagcaccaccagaaactgttgccgttctcttgggcttcccagccttcaaaactgagtcaagtaaacatctttcctgtataaatcataa

SEQ ID NO: 33004 - DNA, 587 bp, Homo sapiens
aacggtagcatccgtttttccgcgcccgcggccttgaaggggtggtggtcgacgggcaagtagagaccgcgagggtctggaggggcgaccggcctggcacagaggggaaggaagagagcgggatgctaagtgccgtctggggagccggagggcccggggcgggcggggctgctcgaggacagccgagcagaaaagaattgctgctgaggcaccacctttggagcggtcctcgctgcctgtccttcccgctgggctcactccccgcgtctctcctggggcttcctggagccacttcccacaggagctgcttgtccccaaatcttgcctcaggacttgctgccaggggaacgcagactcagagcgtcctctttggagaagaagctgaaagcacaaccagtaccttctcaggagcgtggggaggccagccacccgggcagagcaaggagagaatgaggagtgacatgggtgttgccgtgagtggcgaaggggatggaagatttcagcacgatgctatttctaacaagtttcagcattccagtatctcttttcacaaataaaacatttactaaccatttgagcgtattccc

SEQ ID NO: 33005 - DNA, 378 bp, Homo sapiens
cacctgtagttccagctgtgtgggagggtgaggcaagaggatcgcttgaacctaggattttgaggctgcagtgagttatgattgtgccacttaatgtcagcttcggtgacagcgagaccctgtctcaaaaaaaaagttttcgtacatacccaactatctaccaatcaggaagctgaaagcacaaccagtaccttctcaggagcgtggggaggccagccacccgggcagagcaaggagagaatgaggagtgacatgggtgttgccgtgagtggcgaaggggatggaagatttcagcacgatgctatttctaacaagtttcagcattccagtatctcttttcacaaataaaacatttactaaccatttgagcgtattccc

SEQ ID NO: 33006 - DNA, 2526 bp, Homo sapiens
cgccgcccgctgctggccagccccgggcccgggactcgggcgatgtccgctcgcagccgcgccccctgtttcagtggagcaagtggaagaagaggatgggctcgtccatgtcggcggccaccgcgcggaggccggtgtttgacgacaaggaggacgtgaacttcgaccacttccagatccttcgggccattgggaagggcagctttggcaaggtgtgcattgtgcagaagcgggacacggagaagatgtacgccatgaagtacatgaacaagcagcagtgcatcgagcgcgacgaggtccgcaacgtcttccgggagctggagatcctgcaggagatcgagcacgtcttcctggtgaacctctggtactccttccaggacgaggaggacatgttcatggtcgtggacctgctactgggcggggacctgcgctaccacctgcagcagaacgtgcagttctccgaggacacggtgaggctgtacatctgcgagatggcactggctctggactacctgcgcggccagcacatcatccacagagatgtcaagcctgacaacattctcctggatgagagaggacatgcacacctgaccgacttcaacattgccaccatcatcaaggacggggagcgggcgacggcattagcaggcaccaagccgtacatggctccggagatcttccactcttttgtcaacggcgggaccggctactccttcgaggtggactggtggtcggtgggggtgatggcctatgagctgctgcgaggatggaggccctatgacatccactccagcaacgccgtggagtccctggtgcagctgttcagcaccgtgagcgtccagtatgtccccacgtggtccaaggagatggtggccttgctgcggaagctcctcactgtgaaccccgagcaccggctctccagcctccaggacgtgcaggcagccccggcgctggccggcgtgctgtgggaccacctgagcgagaagagggtggagccgggcttcgtgcccaacaaaggccgtctgcactgcgaccccacctttgagctggaggagatgatcctggagtccaggcccctgcacaagaagaagaagcgcctggccaagaacaagtcccgggacaacagcagggacagctcccagtccgagaatgactatcttcaagactgcctcgatgccatccagcaagacttcgtgatttttaacagagaaaagctgaagaggagccaggacctcccgagggagcctctccccgcccctgagtccagggatgctgcggagcctgtggaggacgaggcggaacgctccgccctgcccatgtgcggccccatttgcccctcggccgggagcggctaggccgggacgcccgtggtcctcaccccttgagctgctttggagactcggctgccagagggagggccatgggccgaggcctggcattcacgttcccacccagcctggctggcggtgcccacagtgccccggacacatttcacacctcaggctcgtggtggtgcaggggacaagaggctgtgggtgcaggggacacctgtggagggcatttcccgtgggcccccgagacccgcctagatggaggaagcgctgctgggcgccctcttaccgctcacggggagctggggccatggatgggacaggagtctttgtccctgctcagcccggaggctgtgcacggccctcgtcacaaggtgacccttgcagcacaggccgcgggtgccccaggctcggctcagttcttggaggtcaagggcatgggttggggtagtgggtggggaggtgaatgttttctagagattcaaactgctccagcaatttctgtatagttttcacctctgagaattacaatgtgagaaccgctaaaaaaaaaaaaaaaaaaaaaaaaaaaaaaaaaaaaaaaaaaaaaaaaaaaaaaaaaaaaaaaagggggggggggccaaaaaataccccccggggggccccctcccccccccgtttttttgacagggggcgccccccaataggggaggagccgctaatataaaacgagcgagacgagcgcggcgccgctatcaaccacaccggcgggggaggaggaaaccaccgagcctcccggggacgaaccacctgggaacagcaccccccaccctgcggggggggccaaccaatgtgggcccacccactcccggcaggaagtaatttaacgcgcccagcggcacaaccaacaccctgacggggtctagtgcgggcgcacacccgcggtactatgtgccgcggcaacaaaaattctggcccacgcgatttacgcttccaggcaatttaacagcagggcgagaagaacaaaccgccccacgacccaccaacgaccaccccccgcaaccgccccgacgcggcacccccaccacgcccaccatcaaccgccgccacgccacggaccacacgccacacacaccactgccaccaccacacgccgccctccacacccccggcgcccgaaccaccgccacgccgccaccgccacgccaccggcccc

SEQ ID NO: 33007 - DNA, 2666 bp, Homo sapiens
tttgtactttgcagttagagaggcgctcacctgtgccgcccgagtgcgagtgaggctcctgccccacaggtggcggggcccggccgctcagaggctcagtctccttggtgaccgcgcggtgtccatcctctgctcacccatgtgcgctggaggcagggccaggccgttgtgcaaagacctgccctgccaggaacgagtgcgctgctgagtcctgtagataaagccgccaaccccggggactggtgtctcctgagtgaccgtgcagccgtgggcgccatagaaagcagagaaggcagtgaacttcgaccacttccagatccttcgggccattgggaagggcagctttggcaaggtgtgcattgtgcagaagcgggacacggagaagatgtacgccatgaagtacatgaacaagcagcagtgcatcgagcgcgacgaggtccgcaacgtcttccgggagctggagatcctgcaggagatcgagcacgtcttcctggtgaacctctggtactccttccaggacgaggaggacatgttcatggtcgtggacctgctactgggcggggacctgcgctaccacctgcagcagaacgtgcagttctccgaggacacggtgaggctgtacatctgcgagatggcactggctctggactacctgcgcggccagcacatcatccacagagatgtcaagcctgacaacattctcctggatgagagaggacatgcacacctgaccgacttcaacattgccaccatcatcaaggacggggagcgggcgacggcattagcaggcaccaagccgtacatggctccggagatcttccactcttttgtcaacggcgggaccggctactccttcgaggtggactggtggtcggtgggggtgatggcctatgagctgctgcgaggatggaggccctatgacatccactccagcaacgccgtggagtccctggtgcagctgttcagcaccgtgagcgtccagtatgtccccacgtggtccaaggagatggtggccttgctgcggaagctcctcactgtgaaccccgagcaccggctctccagcctccaggacgtgcaggcagccccggcgctggccggcgtgctgtgggaccacctgagcgagaagagggtggagccgggcttcgtgcccaacaaaggccgtctgcactgcgaccccacctttgagctggaggagatgatcctggagtccaggcccctgcacaagaagaagaagcgcctggccaagaacaagtcccgggacaacagcagggacagctcccagtccgagaatgactatcttcaagactgcctcgatgccatccagcaagacttcgtgatttttaacagagaaaagctgaagaggagccaggacctcccgagggagcctctccccgcccctgagtccagggatgctgcggagcctgtggaggacgaggcggaacgctccgccctgcccatgtgcggccccatttgcccctcggccgggagcggctaggccgggacgcccgtggtcctcaccccttgagctgctttggagactcggctgccagagggagggccatgggccgaggcctggcattcacgttcccacccagcctggctggcggtgcccacagtgccccggacacatttcacacctcaggctcgtggtggtgcaggggacaagaggctgtgggtgcaggggacacctgtggagggcatttcccgtgggcccccgagacccgcctagatggaggaagcgctgctgggcgccctcttaccgctcacggggagctggggccatggatgggacaggagtctttgtccctgctcagcccggaggctgtgcacggccctcgtcacaaggtgacccttgcagcacaggccgcgggtgccccaggctcggctcagttcttggaggtcaagggcatgggttggggtagtgggtggggaggtgaatgttttctagagattcaaactgctccagcaatttctgtatagttttcacctctgagaattacaatgtgagaaccgctaaaaaaaaaaaaaaaaaaaaaaaaaaaaaaaaaaaaaaaaaaaaaaaaaaaaaaaaaaaaaaaagggggggggggccaaaaaataccccccggggggccccctcccccccccgtttttttgacagggggcgccccccaataggggaggagccgctaatataaaacgagcgagacgagcgcggcgccgctatcaaccacaccggcgggggaggaggaaaccaccgagcctcccggggacgaaccacctgggaacagcaccccccaccctgcggggggggccaaccaatgtgggcccacccactcccggcaggaagtaatttaacgcgcccagcggcacaaccaacaccctgacggggtctagtgcgggcgcacacccgcggtactatgtgccgcggcaacaaaaattctggcccacgcgatttacgcttccaggcaatttaacagcagggcgagaagaacaaaccgccccacgacccaccaacgaccaccccccgcaaccgccccgacgcggcacccccaccacgcccaccatcaaccgccgccacgccacggaccacacgccacacacaccactgccaccaccacacgccgccctccacacccccggcgcccgaaccaccgccacgccgccaccgccacgccaccggcccc

SEQ ID NO: 33008 - DNA, 2431 bp, Homo sapiens
atccaatttttggatacccatatgcccgggtattcaaaacagcgtgtcgacgttcggtgactagctctcgtcgccgcccgacggactgtacatgctgttgcctgtgagcacgcgccgtttgagaagagggtactcactgcatttctcagcactgaatcgggttgcatagttgactgtactacggactgagacatgtgacattaattacatctatgtttcatgcactatctagttcagtaggaatcttgtatgacattttctgtgactctgtactccttccaggacgaggaggacatgttcatggtcgtggacctgctactgggcggggacctgcgctaccacctgcagcagaacgtgcagttctccgaggacacggtgaggctgtacatctgcgagatggcactggctctggactacctgcgcggccagcacatcatccacagagatgtcaagcctgacaacattctcctggatgagagaggacatgcacacctgaccgacttcaacattgccaccatcatcaaggacggggagcgggcgacggcattagcaggcaccaagccgtacatggctccggagatcttccactcttttgtcaacggcgggaccggctactccttcgaggtggactggtggtcggtgggggtgatggcctatgagctgctgcgaggatggaggccctatgacatccactccagcaacgccgtggagtccctggtgcagctgttcagcaccgtgagcgtccagtatgtccccacgtggtccaaggagatggtggccttgctgcggaagctcctcactgtgaaccccgagcaccggctctccagcctccaggacgtgcaggcagccccggcgctggccggcgtgctgtgggaccacctgagcgagaagagggtggagccgggcttcgtgcccaacaaaggccgtctgcactgcgaccccacctttgagctggaggagatgatcctggagtccaggcccctgcacaagaagaagaagcgcctggccaagaacaagtcccgggacaacagcagggacagctcccagtccgagaatgactatcttcaagactgcctcgatgccatccagcaagacttcgtgatttttaacagagaaaagctgaagaggagccaggacctcccgagggagcctctccccgcccctgagtccagggatgctgcggagcctgtggaggacgaggcggaacgctccgccctgcccatgtgcggccccatttgcccctcggccgggagcggctaggccgggacgcccgtggtcctcaccccttgagctgctttggagactcggctgccagagggagggccatgggccgaggcctggcattcacgttcccacccagcctggctggcggtgcccacagtgccccggacacatttcacacctcaggctcgtggtggtgcaggggacaagaggctgtgggtgcaggggacacctgtggagggcatttcccgtgggcccccgagacccgcctagatggaggaagcgctgctgggcgccctcttaccgctcacggggagctggggccatggatgggacaggagtctttgtccctgctcagcccggaggctgtgcacggccctcgtcacaaggtgacccttgcagcacaggccgcgggtgccccaggctcggctcagttcttggaggtcaagggcatgggttggggtagtgggtggggaggtgaatgttttctagagattcaaactgctccagcaatttctgtatagttttcacctctgagaattacaatgtgagaaccgctaaaaaaaaaaaaaaaaaaaaaaaaaaaaaaaaaaaaaaaaaaaaaaaaaaaaaaaaaaaaaaaagggggggggggccaaaaaataccccccggggggccccctcccccccccgtttttttgacagggggcgccccccaataggggaggagccgctaatataaaacgagcgagacgagcgcggcgccgctatcaaccacaccggcgggggaggaggaaaccaccgagcctcccggggacgaaccacctgggaacagcaccccccaccctgcggggggggccaaccaatgtgggcccacccactcccggcaggaagtaatttaacgcgcccagcggcacaaccaacaccctgacggggtctagtgcgggcgcacacccgcggtactatgtgccgcggcaacaaaaattctggcccacgcgatttacgcttccaggcaatttaacagcagggcgagaagaacaaaccgccccacgacccaccaacgaccaccccccgcaaccgccccgacgcggcacccccaccacgcccaccatcaaccgccgccacgccacggaccacacgccacacacaccactgccaccaccacacgccgccctccacacccccggcgcccgaaccaccgccacgccgccaccgccacgccaccggcccc

SEQ ID NO: 33009 - DNA, 633 bp, Homo sapiens
aacggtagcatccgtttttccgcgcccgcggccttgaaggggtggtggtcgacgggcaagtagagaccgcgagggtctggaggggcgaccggcctggcacagaggggaaggaagagagcgggatgctaagtgccgtctggggagccggagggcccggggcgggcggggctgctcgaggacagccgagcagaaaagaattgctgctgaggcaccacctttggagcggtcctcgctgcctgtccttcccgctgggctcactccccgcgtctctcctggggcttcctggagccacttcccacaggagctgcttgtccccaaatcttgcctcaggacttgctgccaggggaacgcagactcagagcgtcctctttggagaagtaaggctgcctctggacggaggagtgaggggggcgaggaaacgcagaagctgaaagcacaaccagtaccttctcaggagcgtggggaggccagccacccgggcagagcaaggagagaatgaggagtgacatgggtgttgccgtgagtggcgaaggggatggaagatttcagcacgatgctatttctaacaagtttcagcattccagtatctcttttcacaaataaaacatttactaaccatttgagcgtattccc

SEQ ID NO: 33010 - DNA, 743 bp, Homo sapiens
aacggtagcatccgtttttccgcgcccgcggccttgaaggggtggtggtcgacgggcaagtagagaccgcgagggtctggaggggcgaccggcctggcacagaggggaaggaagagagcgggatgctaagtgccgtctggggagccggagggcccggggcgggcggggctgctcgaggacagccgagcagaaaagaattgctgctgaggcaccacctttggagcggtcctcgctgcctgtccttcccgctgggctcactccccgcgtctctcctggggcttcctggagccacttcccacaggagctgcttgtccccaaatcttgcctcaggacttgctgccaggggaacgcagactcagagcgtcctctttggagaagtaaggctgcctctggacggaggagtgaggggggcgaggaaacgcagtgagtgtcctgaggaagggttttgagaatttggaagaagatgaaatgacaccgggcgggaggggaggtgctcgcgtggtcctgtggaaccctggagtcccgtgcaccttcattccaggatccaactgataatgaaaagtagcaccctctgtcccacccagaaacactctggaaacccggacagtttagctggagtctgccatgatttcactttttttttgttttttttttcgggggggggagtctggcttggtctcccgggttggattgcatagcgcgatctcggcccattgggacctcggcctccggggttcaagcaa

SEQ ID NO: 33011 - DNA, 654 bp, Homo sapiens
aacggtagcatccgtttttccgcgcccgcggccttgaaggggtggtggtcgacgggcaagtagagaccgcgagggtctggaggggcgaccggcctggcacagaggggaaggaagagagcgggatgctaagtgccgtctggggagccggagggcccggggcgggcggggctgctcgaggacagccgagcagaaaagaattgctgctgaggcaccacctttggagcggtcctcgctgcctgtccttcccgctgggctcactccccgcgtctctcctggggcttcctggagccacttcccacaggagctgcttgtccccaaatcttgcctcaggacttgctgccaggggaacgcagactcagagcgtcctctttggagaagtaaggctgcctctggacggaggagtgaggggggcgaggaaacgcagaagctgaaagcacaaccagtaccttctcaggagcgtggggaggccagccacccgggcagagcaaggagagaatgaggagtgacatgggtgttgccgtgagtggcgaaggggatggaagatttcagcacgatgctatttctaacaagtttcagcattccagtatctcttcaactaaaaaacaggatgcggccgtggccttggcttttaaaatatttaaagtaaaattggat

SEQ ID NO: 33012 - DNA, 2854 bp, Homo sapiens
aacggtagcatccgtttttccgcgcccgcggccttgaaggggtggtggtcgacgggcaagtagagaccgcgagggtctggaggggcgaccggcctggcacagaggggaaggaagagagcgggatgctaagtgccgtctggggagccggagggcccggggcgggcggggctgctcgaggacagccgagcagaaaagaattgctgctgaggcaccacctttggagcggtcctcgctgcctgtccttcccgctgggctcactccccgcgtctctcctggggcttcctggagccacttcccacaggagctgcttgtccccaaatcttgcctcaggacttgctgccaggggaacgcagactcagagcgtcctctttggagaagtaaggctgcctctggacggaggagtgaggggggcgaggaaacgcatgaacttcgaccacttccagatccttcgggccattgggaagggcagctttggcaaggtgtccccacgtgtccccaggcgtcctcaggcgtcctgccgaacagccctgtgccctccaggtgtgcattgtgcagaagcgggacacggagaagatgtacgccatgaagtacatgaacaagcagcagtgcatcgagcgcgacgaggtccgcaacgtcttccgggagctggagatcctgcaggagatcgagcacgtcttcctggtgaacctctggtactccttccaggacgaggaggacatgttcatggtcgtggacctgctactgggcggggacctgcgctaccacctgcagcagaacgtgcagttctccgaggacacggtgaggctgtacatctgcgagatggcactggctctggactacctgcgcggccagcacatcatccacagagatgtcaagcctgacaacattctcctggatgagagaggacatgcacacctgaccgacttcaacattgccaccatcatcaaggacggggagcgggcgacggcattagcaggcaccaagccgtacatggctccggagatcttccactcttttgtcaacggcgggaccggctactccttcgaggtggactggtggtcggtgggggtgatggcctatgagctgctgcgaggatggaggccctatgacatccactccagcaacgccgtggagtccctggtgcagctgttcagcaccgtgagcgtccagtatgtccccacgtggtccaaggagatggtggccttgctgcggaagctcctcactgtgaaccccgagcaccggctctccagcctccaggacgtgcaggcagccccggcgctggccggcgtgctgtgggaccacctgagcgagaagagggtggagccgggcttcgtgcccaacaaaggccgtctgcactgcgaccccacctttgagctggaggagatgatcctggagtccaggcccctgcacaagaagaagaagcgcctggccaagaacaagtcccgggacaacagcagggacagctcccagtccgagaatgactatcttcaagactgcctcgatgccatccagcaagacttcgtgatttttaacagagaaaagctgaagaggagccaggacctcccgagggagcctctccccgcccctgagtccagggatgctgcggagcctgtggaggacgaggcggaacgctccgccctgcccatgtgcggccccatttgcccctcggccgggagcggctaggccgggacgcccgtggtcctcaccccttgagctgctttggagactcggctgccagagggagggccatgggccgaggcctggcattcacgttcccacccagcctggctggcggtgcccacagtgccccggacacatttcacacctcaggctcgtggtggtgcaggggacaagaggctgtgggtgcaggggacacctgtggagggcatttcccgtgggcccccgagacccgcctagatggaggaagcgctgctgggcgccctcttaccgctcacggggagctggggccatggatgggacaggagtctttgtccctgctcagcccggaggctgtgcacggccctcgtcacaaggtgacccttgcagcacaggccgcgggtgccccaggctcggctcagttcttggaggtcaagggcatgggttggggtagtgggtggggaggtgaatgttttctagagattcaaactgctccagcaatttctgtatagttttcacctctgagaattacaatgtgagaaccgctaaaaaaaaaaaaaaaaaaaaaaaaaaaaaaaaaaaaaaaaaaaaaaaaaaaaaaaaaaaaaaaagggggggggggccaaaaaataccccccggggggccccctcccccccccgtttttttgacagggggcgccccccaataggggaggagccgctaatataaaacgagcgagacgagcgcggcgccgctatcaaccacaccggcgggggaggaggaaaccaccgagcctcccggggacgaaccacctgggaacagcaccccccaccctgcggggggggccaaccaatgtgggcccacccactcccggcaggaagtaatttaacgcgcccagcggcacaaccaacaccctgacggggtctagtgcgggcgcacacccgcggtactatgtgccgcggcaacaaaaattctggcccacgcgatttacgcttccaggcaatttaacagcagggcgagaagaacaaaccgccccacgacccaccaacgaccaccccccgcaaccgccccgacgcggcacccccaccacgcccaccatcaaccgccgccacgccacggaccacacgccacacacaccactgccaccaccacacgccgccctccacacccccggcgcccgaaccaccgccacgccgccaccgccacgccaccggcccc

SEQ ID NO: 33013 - DNA, 730 bp, Homo sapiens
gaaaataaaatagaaatttcatttacttgtaatcatgcttaaaatgggaggcaggtaggtgaagatataatttttagtaaaaactccaatttacattttaagtaattcagtgtattactaaaatactatatatataaacttaaaatacatgggttatcaatttaaaagacaaagtaagtaaaaatacttttagtaggcattcgtggattgtgaacatccaagttatattggtttgtatagaatggcattaagtaaaaattacagctgtataacagtagttttctaaattgagagagtccacattgtaattagagatcactgtgaccaaaatgcttctccttgatttataatgatgtactgtattttgtactgcttatatgaaatttcagcaagattgacgatattataaagatgcttataaagtgtaagtggagacgctaaattgtgagtacaaagtttctttttcacaacagtgataagaaaatatctttaaaaaatataagacaatataaacatgtcatcattagtttagctactattaaaatgtaacatctagaaagtactgatctccaccttcagacttctgtataagtatattttttcactgatctgttcattagagttcttccagccaagactctgggctcttaaaacatgtatctgaaaactaaaaacaagttaatttttttaaaagcttctctatttctagtgattcaataggtagaaaaat

SEQ ID NO: 33014 - DNA, 444 bp, Homo sapiens
actgaaagtaaaactctgtaaattcaatgcattcccaattaaaaatagccaaattgtctttaatgaaacttgtgaacagattctaattatataaaagacgaggcccaagaatagccagtagacttctgaggaagaatcaggctgaaatactttccaaaaagaaaccaaaactatgaagctatattaattaagactatgcagtactatcaatatacacaccaatataagctgaaccatatgaaattgccgacatgtgagtgtttttgctatataagaatggtgttttcatatggttcaacctaataaaattaagaactcagaaattgctccattacacaggaaaatctgatatacgcttgagctgacattgcagattaatagatgatttggacaattgattacccatatataaataaatgtattggatctttacttcaccacact

SEQ ID NO: 33015 - DNA, 358 bp, Homo sapiens
  misc_feature (265)..(265): n is a, c, g, or t
gaattacagtcacatgctataaaatgtttttccagagctctttctggcagttctctttccttaggttttcagcaagatttttgtttattctaccacaagattaaataatagtacagtatatatcaaaaccaacttgatctgtttttcatgggcttagaaatttataacttcattataatttggtatttgacagtgaacttaagtaatgagagaaatctttgtaatagaatatgttggtaaatatatgcctgtgaagaatttttangtgagtagagaatatttaataaaatgtttattttcccccttacacattagctgtttgaatatttttttaaatgatcagtcaacttccagaagt

SEQ ID NO: 33016 - DNA, 612 bp, Homo sapiens
ttaagcaagttcctttccctctctcctgctggtctttatttcttcactgttatagctagtatctcagggactattttaagcacaagtcgccacaaaaggtttaaacatctggaataatttctattagtcatctccacttggacaaaatgaagtaagagatcgtcccagcaggcaaatgaatggtggcaatttggcaattgagaagactcactgtacctcatctctcttttcttcccccagcacatcctccaagatcctagaatggctaaaatctgtaaagtgctgagagtcttcagagagttaaataagaatccagagaaacaaggttaacgttctgaggacctcgttatttgccaagaacaagcacaggggtgtcacctcctccgtgcagccttcagtaaccccaccacccaccaggaacagtaggagctcctgtactctcattagattcttgtacctacttgtcacattgtaacatgactgcctgtttgagtgcctgtctccctagatgatcttttggggcagggaccatgcctcattcatctttgtatctccagcacccagacggtaaccagcaccaaagaggtatttaataaacacagaatggacaga

SEQ ID NO: 33017 - DNA, 698 bp, Homo sapiens
aaagaggtggggtctgaccatctttcccaggctggagtacaatgactattcacaggtgcaatcatagctcgctgcagcctcaaactcctgggcttatgatcctcctgcctcagcatccccagcagctgagactacaggcacatgccaccatgcctggcaattcatttcctcacaacttccaaagtgttcttaaatgcaaatttcattcttctttaaaacccttaaatgattccctatgttttcagaataaaatccaaactcctgaggcagaaacttgtatgtcagggaatcttttgccccattctcttgcattctgatatttgcagcctcatcgacaaccaaacaactcaacattccttcaactcaccatagtttcccataacctctcactgtgctaaactctgtctgcaggttaacgttctgaggacctcgttatttgccaagaacaagcacaggggtgtcacctcctccgtgcagccttcagtaaccccaccacccaccaggaacagtaggagctcctgtactctcattagattcttgtacctacttgtcacattgtaacatgactgcctgtttgagtgcctgtctccctagatgatcttttggggcagggaccatgcctcattcatctttgtatctccagcacccagacggtaaccagcaccaaagaggtatttaataaacacagaatggacaga

SEQ ID NO: 33018 - DNA, 552 bp, Homo sapiens
atgggaacgggagcacccagcttcctcacccctgtaaggcacactctacacatcctcttgcaggtccccaggggtaacattcacaggtgctggggattagagtgacatctttgggaggtgttattcagcctaccccaagcagttgcaggcacaggcagcgtatataagggctctggggctgggtgtctacttggtggacggagctgattaggacaggaaggcaactgtggagagaacatcaaggaggtcaccagggccgagagtgtgtgggactctgtaggccaggatagcagctgtgggctttatttgaaatgaaatgggagccacgtgagggttttgagcagtggagagacatgacctgatgtccacttaaaatggcgattctcctgaggtcaggagttcgagaccagccttgccaacactgtgaaaacccatctatacgaaaaatacaaaaattagccaggcgtggtggcggagctgtaattccagcacttgggaggctgagacatgagaattgtttgaacccaggaggcagaggttgcagtgagccga

SEQ ID NO: 33019 - DNA, 513 bp, Homo sapiens
gtgacccccaacgctgctcacatggtgaggctggagtctatctcagctccaaaccctctcagctcctcaactgcctactgaccttgcccagtgggctacccaacaggagtctcaaactaatcacttccagagatgaccaccttcccccagcccaactcattttctgtcttcatctcatcacaatgaccatgggcggtctcaaccccacagccagaaacctggagtccctggattcagtcacctcgcctcccacactgaaatggcttctgtgtacttagctactgcatctagacattcctttttttttttctttgagacagagtcttgctctgtcacccaggctggcgtgatctcagctcactgcaacctctgcctcccacgttctagacgattctcttgtctcagcctccagagtagctgggattacaggcatgcaccaccacacccggctaattttgtatttttagtagaggcggggtttcagtgagctgaggaccatcgttgggggtcctc

SEQ ID NO: 33020 - DNA, 386 bp, Homo sapiens
tttttttttctttgagacagagtcttgctctgtcacccaggctggcgtgatctcagctcactgcaacctctgcctcccacgttctagacgattctcttgtctcagcctccagagtagctgggattacaggcatgcaccaccacacccggctaattttgtatttttagtagaggcggggtttcaccatgttggccaggctggtctcaaactcctgacctcaggtgattcccacgccttggcctcccaaagtgctgggattagaggcatgagccaccgcacccggtgacattccctttaaagctaaaataagactcaatataattaagaaacaataaaaccaccttctgagactctaaaaccacaaaaagtgtgaactttgcttttct

SEQ ID NO: 33021 - DNA, 478 bp, Homo sapiens
tgtatctcacatatacttgcatggcaaagattaccagttttatggtgttagcaagcaaatttatcatattctccacaaatctagtttgaataactcccaagcattaaacttatgcttagctgagttttggaagttgagtaaaatggatgacagagctgaaagttatgtaagaagcaaataaaagttcccccttacgcttgaatagccacctagacaatggctccaactgagtggccacaagaacagctgttgccttccagcaactaccccttaaattgtcattgctatttcctgagacagcattttgcaagtgtggtttcctgatcagcaacatttatcatcaccggggaacttgctggaactcagaaattctgagggtgaggcccagaaatgtgttttaacacactctctgggcagttctgacacatgctaacattgagaatttctggcctaaggccttattaattttccttttctt

SEQ ID NO: 33022 - DNA, 369 bp, Homo sapiens
cttgtttctttgccgagttaatgtgccgctcctgcctctttgctctcttcctgtttgatgccctcctccttgacacagcagttgagacagaccatggaagccacacagctttttgaatcccgctgttttctcctgcctgtgtgaccttgtgcaagttactttacctctccaggcctcagttgccttgcctgtaagatggggataatgatggtgccgccatcacagggcactgggaaagggttcgtgtgtctacactgcttaggactttagacactgtgggccacggtgactgcagtagggggtgatctgagggggaagtggtcaagggaaaggcccaggcctggaactggggccttttgttgggttccc

SEQ ID NO: 33023 - DNA, 507 bp, Homo sapiens
tcaggataccctactgggaagagccatgaactgaaagtcagtaccctggttcctatcccctggctttccccacaaactgagctatatgacctctgtatattcttcagaacttaagttgtcttatttggcaagtacaggcatcgcactagtctagatgatttcccatggcacccttcaagccctaaaattggcttgccaaatagtactgaaaagttctgatcacctcccaagacaggttagaaaatcgtctatagtggggaaaatgttctggtttcaaaataattgaggttaaaactttagccattttaattcccacttaggcagattctcttctgactgaatttaataacttcatagaattggacattatcaacaaaaatattacttccaccgggtgtgatggctcaggcctgtaatcccagctcttagtgaggcagaggcgggaggatagcttgagccaaggagctcgagacctgcctgggcaatatagcaagaccccattctcaa

SEQ ID NO: 33024 - DNA, 436 bp, Homo sapiens
tgagatggagtcttgctctgtcctccaggctggagtgcagtggcatgatcttggctcactgcaacctccacctcccgggttccagcgattctcccgcctcagcctcctgagtagctggaattacagatgcgcgccactacacctggctaatttttgtatttttagtagaaacggggtttcaccatattggccaagctggtctcaaactcctgacctagtgatccgcccgcctgggcctccctaagttctgggattacaggtgtgagccactgcaccaggcctgaccttgggcattctttttgtccttggttctcagtttcctcccctttaaaaggaggtgattgaacctccataagttcaatgaattagtccgaattctccaggaagcagactaagacaggattaaacattcaggggttttattagaggaagtgcc

SEQ ID NO: 33025 - DNA, 421 bp, Homo sapiens
aatcaaagacatagaaataaatgacattgcttagagaaagcatatagtgagagaaaagcctaggtttggggttgaacatccaaaggatgggttgagaatgaagaaccttcaaggagaccgaggaggggaaaccaataaattaagaaaaaaaatctggggagttagtctttggatgcctgcaaaaaggaatggtttggaaggtgagagaagtcaacaatgtaaatttgtttaaagaatatgcaggatatggccgggtgcagtggctcacacctgtaatcccagcactttgggaggccaaggcggacggatcacctgaggtcgggagttcaagaccagcctgaccaacatggagaaaccccgtctctactaaaaatacaaaattagccgggcatggtggcacatgcctgtaattccagctact

SEQ ID NO: 33026 - DNA, 283 bp, Homo sapiens
gctaccaaaggaaaagtactgcatgattctatgtatatgcagtatctaaagtagtcagactcatagaaagttagaatggtgcttaccagggactgggggaaagggaaatgtggattagtgtttaatgtgtacagagtatcagatttgcaagatgacaaagatctggagatctgtttctcaacaatgtaaatatacttaacactactaagctgtacacttaaaatggttaagatggtaagttttgtgataagtgttttaaccataataaaaatatttttaaaac

SEQ ID NO: 33027 - DNA, 377 bp, Homo sapiens
ttttgggtgagtcactttatttgctcaaagacgcaaatgaatgaacttctggtagtttagttaaccctggagctccccctcttgacaaatagaaaaaacaaaaaaataaatcagatagtattagcttgaaaacggatttcttttacccagataaaaaatatgccactaaggtacatacaatgaagttttcttgaaggaactaatgatattttggatttctcctaattttgtgcatgtctgcacttgtgtgtgtccttgtgtatgttttaatgggttaaaaaaaaaagcgagctaccaaaataccaatagatgtcagtgtttgtcgctttagaaaaagtgaggtgttagaaaaaaagaagaaatggacagctttattt

SEQ ID NO: 33028 - DNA, 509 bp, Homo sapiens
agcactccagcctgggtaacagagcaagactccatcccccatgccccctccaaaaaaaagacacctacactcatatgttcattgcagcactattcaaaatagcaaagtcatgaactcaacctagatgcctatgaatggttgactggataaagaaatgtagtacatatacactatggaatagccataaaaatcatgtcctttgcagcaacatggatgcagccagaggccattatactaagttaatcaacacagaaacagaaaataaaatactgtccagttataagtgggagctaaacaatgggtacacactgacatagagatggaaacagtagacactggggactccgaaagaggcagggacggtggagagaaagggttgcaaaactacctgttggttactatgtttactgtttgggtgatgggtacaacagaagcccaatcccaaacattatggaatatatccatgtaacaaatgtgcttatgtatccccgagtctaaaatcaatcaaa

SEQ ID NO: 33029 - DNA, 317 bp, Homo sapiens
atgtgagttgctcaaagtcacactatagctgtcaggactaaacatgactctctctatacacaatatgtctccatatctatgtctacctatatccagggctttgtatctaccctgatacccactatctagtagatatctatattcattgcaccagtattttccagatttcagtacttcgtaattctcaatctgtaccatatgtactcaccatcttcctattatttgtttccttcaagtcaactcagattttccctcgtttatttaaaaacaacatttgtaacaccagtgtaaataaaaaaccagtttacttaccaaaa

SEQ ID NO: 33030 - DNA, 342 bp, Homo sapiens
gattcctaagatgtcccttcaaacttttcaagcatccatttcctcatctgtagcttattaatattacatctatcatctgggaatgatactagtacctctctcgtagggtggttgtgaggattcactttgctaaatgtccataaagcacttcttagtaccgtttctggtatatagtaagcacctaagaaatgggaactgctatagaatgactgcctttaaggtggaatcttcctctttcagagaacaatacatcagggtccagctgctttcgatttaaattttcactgtattttatgggaatatgccttgaatcatcacaatttccaataaaagactttattg

SEQ ID NO: 33031 - DNA, 1551 bp, Homo sapiens
gtttggagagcaaagaagtgagcccaggggatatctaagtgcttatgtgaccccgcacctctcgctccttttgatgagccatgttcgcattttggaaggagaaagggggtgcagaagaggcgtctgatgcaggccctgctgacaggcagtcaagggcatccctcaagtcgatgtagtcaagggccagagctgcaggatcccgggctcggataatgcatctcagatcaacgaaggataccaaaggcaggtgctttttactcatctgctcccactgactccttcgtccccctccttcctgcttcggacctacttctgatacagtgagggagaaagacaagagtggcaagacagtgtattttctctggaacatagtccatcctcccctcctcacggtctctgcctgagctcagagccccatctgctttcccccagaccctcttgactcggggttgtctgagagcctgcaacattggcatcacctggggcttgttggacatgctgactcttggattccacccaggcctgctgtagcatatcttctactgtaacggaatcgccaggtgatgaatatacacatccaagtgttggtgtgctgccctagaaggtcaggattaacagttggtattttcccgttgtcccaagcacctattctcctttaatccattctgaacatcaactgggttctagtttgaaaacaaaattcagctgtgtctgttctttgcctaaaatccttgcttggcttcacattgcttttttcctatatatcaacaataaacaagtggaatttgaaatttaaagcacaaaaccatttataatagcatgcaagaaattaaatacttaggtaaatctaacaaaatatgcatgagatttatatgaggaaaacgacaaaactgattaaagaagtcaaagaagtcaatggagaaatattccaagttcatggataggaagacttaatatagtcaagatgccggttcttccccaaattcataaatggattcaatgcactcctcataaaaatcccagtgagttgttttttggatacggaaaaactgattctaaagtttatatggaaagggagactgccctggagtagccaacacagtactgaagggcaagagcaaaggaggagaaatgacgctgcctgccttaaagacttaccataaagctacaggcatcaagataggttggcaaaagaacagacagatggatcagttgacagagcagacagcccagaagcagatccacataaaaatatggcctatgaatcttgacaaagaagtaaaggtaatacggtggaggcaagattatcttttcaacaaatggtactgaaacagctggctctccacatgcacacacaaaaaattgaatctaaacatagaccttacacttttcacaaaaattaattcaaaatagatcacaggcttaaatatgagacataaaacttaaaactcctagaagataacataggagaaaatctagatgacctcaggtttgatggtgatgttttagatataatacaaaaggcatggggcatgaaaaaaataattgaga

SEQ ID NO: 33032 - DNA, 270 bp, Homo sapiens
aaaatccagcaggcacatctcactggttaggggaaactggcggcttttccgtggtcccgggctcggataatgcatctcagatcaacgaaggataccaaaggcaggtgctttttactcatctgctcccactgactccttcgtccccctccttcctgcttcggacctacttctgatacagtgagggagaaagacaagagtggcaagacagtgtattttctctggaacatagtccatcctcccctcctcacggtctctgcctgagctcagagc

SEQ ID NO: 33033 - DNA, 565 bp, Homo sapiens
aaaaaaaaatccccagctttgaagctcagggcaaagcagccctgcttgtttcagtcacctagatatcgatatggaacctccagaacagttttcccatgccatttttcaacagcttgggcaactgcctgtcactctctcctgtactacctctgtcacacgttctagtgatttccatatccacgtagatgatccttccagtacccgggcctcccagttcctggacatcctttcctccctgatcttgtgctctgcctacccaagccactgctctgttggccattccctaaactttgtcattaacaaagccccttctgtgacttcaatttcaagcaactcatgctccaccagctttctaatttcctccagttccccaattccaataacttgttgacactacactcaggacttgtagtccctttttcctcctgccccctcactggcttccccacatcctgtctttcctcctttcctagctcatatgctgtggtccagaatcaagatgagttctttacatatttgactccctcacctttgcaggcacctggcaacaccaaaccccatgatg

SEQ ID NO: 33034 - DNA, 489 bp, Homo sapiens
catctggagcatgggctcagtccatgtcctcaaccactacacaagggacaggaaggcagaaacttaagcttggattctaaggcctgaaaggccaagaaaaatgtttcagtctccctctctcaccattcccatctgcaagtgggggctctgctgttgatcagctttggctaatgatgttcaatttctaatcagcctttggactttgacaggggaggcacagaccatcaaggagaggggacaaactttgaaataggcaaattctcgttcaatcctaactctgccacttagaagctgcattgcctttaggaggtggtttagcaactcactgtcctcacctgtcaaatgggctggtatcactgtctcgtgcattccctgcgagaattaaattaggtttgtatgccaatcgccagtcccagtgcttggcacataagggcatttcataagcgtcagttgcccttccaaggctctgaggtcctcccatggttccat

SEQ ID NO: 33035 - DNA, 107 bp, Homo sapiens
tctccttccataacatctgcccttaatgggcatggatttccccttggagtaagaagtctgaggagcgtgtgatggagaaagattggtgttgctttttattgtaccat

SEQ ID NO: 33036 - DNA, 369 bp, Homo sapiens
taaaataagtctagccaacttgcaaagccacccaccagcttcaacttgattgaaatcagctgaatcggaatgacagcatcacaggcgttcacagagatcagggggaaggatggggagcagagccaggaggggccacctcagcgaggcctgcaacaggaggtgtttattctttaggcccctaagaatgactggagtcattcctgaccttgtggctcttgatagagtagtgaatggaaaggcactattaatctgcaaatagaaggggacttgggagctcaaaacctgtctgtaaataagctttgagggggcgaaggttggaaagtcagtgcattacaagtttaaagcatcaggtgcacttggatttggccc

SEQ ID NO: 33037 - DNA, 307 bp, Homo sapiens
tcttttttttgtagagacagggtcttgctatgttgtctaggctggttactcctgggctccagtgatccttccaccttggcctcccaaaacacagggattacaaacatgtgagccactgtacccagccaaaactttaagttaaaattatttcaacctaaaagttaaaaagggaaaacccaggctatgtgacataatacaaaggagacagctttggagatgaaatccttgctgccctatttactactattagctagtgacctgaggtggccatagcgcctccctgagtggcccttcctcctgggtccaa

SEQ ID NO: 33038 - DNA, 1086 bp, Homo sapiens
cgccccgtctttgccctcgcgacgccgccacctccggaacaagccatggtggcggcgacggtggcagcggcgtggctgctcctgtgggctgcggcctgcgcgcagcaggagcaggacttctacgacttcaaggcggtcaacatccggggcaaactggtgtcgctggagaagtaccgcggatcggtgtccctggtggtgaatgtggccagcgagtgcggcttcacagaccagcactaccgagccctgcagcagctgcagcgagacctgggcccccaccacttcaacgtgctcgccttcccctgcaaccagtttggccaacaggagcctgacagcaacaaggagattgagagctttgcccgccgcacctacagtgtctcattccccatgtttagcaagattgcagtcaccggtactggtgcccatcctgccttcaagtacctggcccagacttctgggaaggagcccacctggaacttctggaagtacctagtagccccagatggaaaggtggtaggggcttgggacccaactgtgtcagtggaggaggtcagaccccagatcacagcgctcgtgaggaagctcatcctactgaagcgagaagacttataaccaccgcgtctcctcctccaccacctcatcccgcccacctgtgtggggctgaccaatgcaaactcaaatggtgcttcaaagggagagacccactgactctccttcctttactcttatgccattggtcccatcattcttgtgggggaaaaattctagtattttgattatttgaatcttacagcaacaaataggaactcctggccaatgagagctcttgaccagtgaatcaccagccgatacgaacgtcttgccaacaaaaatgtgtggcaaatagaagtatatcaagcaataatctcccacccaaggcttctgtaaactgggaccaatgattacctcatagggctgttgtgaggattaggatgaaatacctgtgaaagtgcctaggcagtgccagccaaataggaggcattcaatgaacattttttgcatataaaacaaaaaataacttgttatcaataaaaacttgcatccaacatg

SEQ ID NO: 33039 - DNA, 1228 bp, Homo sapiens
cgccccgtctttgccctcgcgacgccgccacctccggaacaagccatggtggcggcgacggtggcagcggcgtggctgctcctgtgggctgcggcctgcgcgcagcaggagcaggacttctacgacttcaaggcggtcaacatccggggcaaactggtgtcgctggagaagtaccgcggatcggtgtccctggtggtgaatgtggccagcgagtgcggcttcacagaccagcactaccgagccctgcagcagctgcagcgagacctgggcccccaccacttcaacgtgctcgccttcccctgcaaccagtttggccaacaggagcctgacagcaacaaggagattgagagctttgcccgccgcacctacagtgtctcattccccatgtttagcaagattgcagtcaccggtactggtgcccatcctgccttcaagtacctggcccagacttctgggaaggagcccacctggaacttctggaagtacctagtagccccagatggaaaggtggtaggggcttgggacccaactgtgtcagtggaggaggtcagaccccagatcacagcgctcgtgaggaagctcatcctactgaagcgagaagacttataaccaccgcgtctcctcctccaccacctcatcccgcccacctgtgtggggctgaccaatgcaaactcaaatggtgcttcaaagggagagacccactgactctccttcctttactcttatgccattggtcccatcattcttgtgggggaaaaattctagtattttgattatttgaatcttacagcaacaaataggaactcctggccaatgagagctcttgaccagtgaatcaccagccgatacgaacgtcttgccaacaaaaatgtgtggcaaatagaagtatatcaagcaataatctcccacccaaggcttctgtaaactgggaccaatgattacctcatagggctgttgtgaggattaggatgaaatacctgtgaaagtgcctaggcagtgccagccaaataggaggcattcaatgaacattttttgcatataaaacaaaaaataacttgttatcaataaaaacttgcatccaacatgaatttccagccgatgataatccaggccaaaggtttagttgttgttatttcctctgtattattttcttcattacaaaagaaatgcaagttcattgtaacaatccaaacaatacctcacgatataaaataaaaatgaaagtatc

SEQ ID NO: 33040 - DNA, 1312 bp, Homo sapiens
cgccccgtctttgccctcgcgacgccgccacctccggaacaagccatggtggcggcgacggtggcagcggcgtggctgctcctgtgggctgcggcctgcgcgcagcaggagcaggacttctacgacttcaaggcggtcaacatccggggcaaactggtgtcgctggagaagtaccgcggatcggtgtccctggtggtgaatgtggccagcgagtgcggcttcacagaccagcactaccgagccctgcagcagctgcagcgagacctgggcccccaccacttcaacgtgctcgccttcccctgcaaccagtttggccaacaggagcctgacagcaacaaggagattgagagctttgcccgccgcacctacagtgtctcattccccatgtttagcaagattgcagtcaccggtactggtgcccatcctgccttcaagtacctggcccagacttctgggaaggagcccacctggaacttctggaagtacctagtagccccagatggaaaggtggtaggggcttgggacccaactgtgtcagtggaggaggtcagaccccagatcacagcgctcgtgaggaagctcatcctactgaagcgagaagacttataaccaccgcgtctcctcctccaccacctcatcccgcccacctgtgtggggctgaccaatgcaaactcaaatggtgcttcaaagggagagacccactgactctccttcctttactcttatgccattggtcccatcattcttgtgggggaaaaattctagtattttgattatttgaatcttacagcaacaaataggaactcctggccaatgagagctcttgaccagtgaatcaccagccgatacgaacgtcttgccaacaaaaatgtgtggcaaatagaagtatatcaagcaataatctcccacccaaggcttctgtaaactgggaccaatgattacctcatagggctgttgtgaggattaggatgaaatacctgtgaaagtgcctaggcagtgccagccaaataggaggcattcaatgaacattttttgcatataaaacaaaaaataacttgttatcaataaaaacttgcatccaacatgaatttccagccgatgataatccaggccaaaggtttagttgttgttatttcctctgtattattttcttcattacaaaagaaatgcaagttcattgtaacaatccaaacaatacctcacgatataaaataaaaatgaaagtatctcctcattttccatagtctccctccctagaggtaaacagtgttagcagtttggtacaaaggctgccaggcctttggttaagcca

SEQ ID NO: 33041 - DNA, 424 bp, Homo sapiens
agtatgtgtgccccagtctgtggatgtgctgtgtgtgtgggcatgtgtggtgtttgctaacatgtttgtatcgtggtgcatgtgcatacctatttatgtatgttgtatacttatgttcacagatgttcatgtatgtgtgcacacatctgtaagctcctgaatgtttgatttcatatgtgcctgtctgtgtgcatgtgtttgtgtatgtgtgagagcactggacacacatttacatatgtgtacacagtgttcttgtatgtgtgaggcagtattaactgttgagggagtcacatatgtggatgtgtcagggcatgtacaggttcatgcctcttcactggcttgtctgggctttgttttgttttgtttctgtcatacaggtgtccctggtggtgaatgtggccagcgagtgcggcttcacagacca

SEQ ID NO: 33042 - DNA, 459 bp, Homo sapiens
ccttatattttgtaagtagcttctttttataagattgagaatcgtcttatgatcatgcttctttgattaaagcgtgcagtgagccaagtatccctctgtaactgttattagccatcccttaaagtacattttgtacctaatttttgcacaccaaggctaacagctctcccataatgcagagtaatttctgatacccccaaaacttggaaaaaaaaaaaaacgtcaggtaacataatgtaaagctgaacagagccttagattttgagagcgatctatccactttcaactcctggggttccatgaggaaaacaggttttttttttttccaaagtggaagctgttagaaattatcttaagttctctcatgtgggcatcaggagggcaaagtagagaaataattcagttgactgagaagaaaaacaaaaactttttcacaaaaacaaccaatatccaagaaga

SEQ ID NO: 33043 - DNA, 546 bp, Homo sapiens
agtcccagctgctcgggaggctgaggtgagagaatcacctgagcctgggagaggctgtagtcagctgtgattgcgccatgcactccagcctgggtgacacagtgagaccctgtctcaaaaaataaataaaaaataaaaaaaggagccctcaatttatcctctgcctctgacaaatatattccattttgttacattgcaaaaatttcagcacattgctttgcttacccatctttgctctggaacgacttttaattcttcttttggcaatcttggttgttttgagatgtgtgaaattagaatcatatgcaggtgtttgagttcttttgattttgctttttaaaagagttttttttttgttttgttttgttttgtttttagaatggggcaatgtaaagccagaatatcaacgtccttttgtcaagattttcaaacctatttggctgatagtacacttacaagaataggtaaaaaagatcccaaagattttacttcacttacttgaactactagccctactattaagagccacagcaagcttacatgttc

SEQ ID NO: 33044 - DNA, 318 bp, Homo sapiens
gaattctaattcataaacaggattatccactcaaaattcaagttgattttcttctagaaaacactgattagtggtttaatatttaaaaaatatgtaacacttcataaatttgtgtttcatccttgcacaagggccatgctaatcttctctatatcgttccaattttagtacatgtgctgccgaagtgagcactgattagtgttttctagacagagatcaggaataggcgtgtgcatgtgtaatatgtagagattgggataaaaccagtgatcatatttgagaatcatagtaacattaattgatcacttataatgtgtt

SEQ ID NO: 33045 - DNA, 471 bp, Homo sapiens
gaatttctttttcgtactgctagaaaacacttactgtttctctcacttaatgtcttctgccgaggagtcactgtgtctgtttacttgtatatatcttactgctcttgtactagatcacatgctttttcagcgcttacactgtgtcttcttgaacttattccagttgaatttttcaatcttaagggtttgctttttaaaatccacactgtatcatttaggttctaagtgatgaacatgactgggataggattttttggagtaaagtttctaaatggtcataacaaggaccagttgtaaaggcccagccagagcaggctttgtaaaaactcacctacttagctggaatttaggagagtaatacaattgtcctaaacttactctggtaggaatttaaaactataattttgatgtctttgtagtaatactaaataaaagtattagtactggaatgaattgtgtttttcttcacag

SEQ ID NO: 33046 - DNA, 1081 bp, Homo sapiens
aagaggcccagagcagagggcaagtgagcacggcagtaagaagttgaaaaccattaattgtccgtccagaggaggcggatgcccacaacattctgggcaaaggagatggtgtgtgcaaaagcacggaggtgtgagaatatagcatagtagacattcatcattcctttctcatgcactggagtgtctgtgcagccagggtcctcccattcattcattgattcattcacctgtttattcaccaaatagttaccaagtgctgggcaccctctggaatggggaaaaacaaacagcattgttcctgcctcagagagtgcacagcctgttaggaaattgcaggacagagcagtgagttccttggtgaggggcacacaggcactgtgggaacctggaacagaggacctgatggggacacacagacacctcaggagcccatggtaaccccaaggaggggtctgggcaggaccagggcttatcagcaacttttttttcatttgtcagcctttgatatccgatcttcagcggctctcataggtgacaggaccgttagcagtccaggtctgtgtccttcattgcacagatggtgaatctgcagccctaggcctggaactcaagtctccaggactcctgtttccagagtataattgtattgacaaagctcatccatagtcaaacccaaccctggacccacacggggctcagctctctctgcacagcaccttctgtagcccaaaagtggaattgcagacccaggacactgcttctctggcagagccagccctggctgggctccctcacatcggagcctgtgccctcagtctagcaggagccactgggggccttgggcatttcattggccgtcagtgtcccaccacagaatgtcaacaggattcctagcctgcctatcacactgggtggctgtggagatggagagtgttggcccccatgacccgcgttctccgggaggcctttctgctgaggggaggaaagacgggcccatggctggctttccctcctcctcagtgcctctgaagccatgcgtcacttacaaattctcttcatttctaaataaaatgatttgtta

SEQ ID NO: 33047 - DNA, 1035 bp, Homo sapiens
taaaaaaaaaaaagccagtaacttataaaaatagccataaacgacgtagttttttgttgttgttgttgttttgagacagcgtctccctctgtcccccaggcgggagtacagtggcaggcactcagctcactgtaacctccgcctcctgggttcaagtgattctcttgccccagcctccagagtagccaccacgcccggtccaacttagttttttaatactttttaaaattttaagacagggtctctgccaccgaggctgaaatgcagtggcgcaatcatagctcactgcaaccttgacttcctggggtcctgggcaggtgaccccctgtctcagcctgccgagtagctgtgagtaaaggcctgtgcctctccactgtgctaattttctactgtttgttgctttgtttttaatagagatgtagtctggttttgttgcccaggctggtctccagcttctagcctcaagcagtcttcccatctgctcctaccaaagtgctcggattataggcatgaatcaccttgcatgggagataaggacccccacatcaagccctcaggttatttttgaaacacaaatacataaggcccacaagcaggcccattggctgcagacagtggggtcacctgaagaacttttctttgatctgagtaccaacttctcacctaggtcactgggatcctggactacggcactgctccaggcaggcctggttatcctgcttgaggcagcaatcctcttgagcctagtgaaatgcaactggctgtacctcaatgatgttgccctgagattctgccagtcgaggtattacttcaatctcctgagaccagcctctacctccagatccagggaggtcagtgcacatataaatggactagctttattaaaggggatatctgggccaggcgtggtggctcacgcctgtaatcccaatactttgggaggccgaggagggcagatcacctgaggtcgggaattagagaccagcctggttaacatggtgaaacgaagtctctactaaaaatacaaaaaaaaaa

SEQ ID NO: 33048 - DNA, 598 bp, Homo sapiens
acattaactcagaagggaattcagaagcctgcaaggacaggatgctgatatccgtgttgagggtggtcagcggcgtcctggacgcctggttctgccctttctggtggccaccagaaagagagagaagagagagagtaaagagaaagagaaaagaaagagaagttgaaaaagagaaagaaaaccaagaaagaaagagaaaaaaaccgaaaataaatggacaagaaagaaaagtcactgggatcctggactacggcactgctccaggcaggcctggttatcctgcttgaggcagcaatcctcttgagcctagtgaaatgcaactggctgtacctcaatgatgttgccctgagattctgccagtcgaggtattacttcaatctcctgagaccagcctctacctccagatccagggaggtcagtgcacatataaatggactagctttattaaaggggatatctgggccaggcgtggtggctcacgcctgtaatcccaatactttgggaggccgaggagggcagatcacctgaggtcgggaattagagaccagcctggttaacatggtgaaacgaagtctctactaaaaatacaaaaaaaaaa

SEQ ID NO: 33049 - DNA, 785 bp, Homo sapiens
tctgtcagctaacatcctactacaatgtgaaaaatcaatgctttctacctaagacgaggtagagggcaaggatgttggctctcatcatttttatttaacttaaattgtataggagtgcctagtcagtgcaacaaagcaagggaaaaataaggcatacatgctagaaagaaataagtaaaattgtccttatctacaagtgacattgtatagaaaaccctaagaaacccacaataaaagctattagaggtacaaggttgcaggataaaatatacaaaaatcaattcaaggttgcaggataaaatatacaaaaatcaattctgtctcacatactagcaactaacatttagaaagttaagttataagacactttgtttacaatagcataaaatacttagcaaaagacatgtatgacctgtaggctgaaaacaataaaacatgacaggaagatctgcataaatgaacagctataccgtgttcatggattcaaagtctcaatattgttaagctggcaatcctttttgaattattcaataaattcaatgcaattcccacgaaaatcgtaactttttttttgaaaaaaatttgcaagagtattttaaattttatatgggaagtcaaaggacctagtatagccacatcgttttgaaagaggagaacaatattggaacacttcagctacctgatttcaagaacaatatgtggctctgaaggaatgaaccaattttattctttgatctataaattggcatttaaataatttccaaatgaggagagatgggtagctc

SEQ ID NO: 33050 - DNA, 488 bp, Homo sapiens
gtctagaggtccctggtatgctgtctcacatactagcaactaacatttagaaagttaagttataagacactttgtttacaatagcataaaatacttagcaaaagacatgtatgacctgtaggctgaaaacaataaaacatgacaggaagatctgcataaatgaacagctataccgtgttcatggattcaaagtctcaatattgttaagctggcaatcctttttgaattattcaataaattcaatgcaattcccacgaaaatcgtaactttttttttgaaaaaaatttgcaagagtattttaaattttatatgggaagtcaaaggacctagtatagccacatcgttttgaaagaggagaacaatattggaacacttcagctacctgatttcaagaacaatatgtggctctgaaggaatgaaccaattttattctttgatctataaattggcatttaaataatttccaaatgaggagagatgggtagctc

SEQ ID NO: 33051 - DNA, 3714 bp, Homo sapiens
cccggcggggcgggggtcagctctggtcccgttggtcctgggcgcggcgccatggcctccgaggcggtgaaggttgtcgtgcgctgccgtcccatgaaccagcgggagcgagagctgcgctgccagcccgtggtgactgtggactgcgcgcgcgcccagtgctgcatccagaacccgggcgccgccgacgagccgcccaagcagttcaccttcgacggcgcctaccacgtggaccacgtcaccgagcagatctacaacgagatcgcctatccgctggtggagggcgtcactgagggctacaatggcaccatctttgcctacggccagacaggcagcgggaagtccttcaccatgcagggcctgccggatccgccctcccagagaggcatcatccccagggccttcgagcacgtgttcgagagcgtccagtgtgcagagaacactaagttcctggtccgggcctcctacctggagatctacaatgaagatgtccgggacctccttggggctgacaccaagcagaagctggagctgaaggagcacccagagaagggcgtgtacgtgaaggggctgtccatgcacacggtgcacagcgtggcccagtgtgagcacatcatggagactggctggaagaaccgttcggtcggctacacgctgatgaacaaggattcctcacgctcgcactccatcttcaccatcagcatcgagatgtctgccgtggatgagcggggcaaggaccacctccgggcgggcaagctgaacctggtggacctggcgggcagcgagcggcagtccaagaccggggccacgggcgagcggctcaaggaggccaccaagatcaacctgtcgctctcggcactgggcaatgtcatctcggcgctggtggacgggcgctgtaagcacgtcccctaccgtgactcgaagctgacgcggctgctgcaggactcactgggcggcaacaccaagacgctcatggtggcctgcctgtcgcctgcggacaacaactacgatgagacactcagcacgctgcgctacgccaaccgggccaagaacatcaggaacaagccgcgcatcaatgaggaccccaaggatgcgctgcttcgcgagtaccaggaggagatcaagaagctcaaggccatcctgacacagcagatgagccccagcagcctgtcagccctgctgtccaggcaggtgcccccagaccctgtgcaggtggaggagaagctgttgccccaacctgtgatccagcatgacatggaggccgagaagcagctgatccgggaggagtatgaagagcgcctggcccggctgaaagccgactataaggccgagcaggagtctcgggccaggctggaggaagacatcactgccatgcgcaactcatatgacgtcaggctgtccacgctggaggagaacctgcggaaggagacagaggctgtcctgcaggtgggagtcctctacaaggctgaggtcatgtccagggctgagtttgccagcagcgctgagtacccgcctgcttttcagtatgagacagtggtgaaacccaaggtcttctccacgactgacactctgcccagtgacgatgtctccaagactcaggtttcctccaggtttgcggagctgcccaaggtggaaccctccaaatctgagatttctctgggctccagtgagtcatcctcgctcgaagaaacctctgtgtccgaggctttccctgggcctgaggagccctccaacgtggaggtctccatgcccactgaggagtccaggagcagatacttcctggatgagtgcctcgggcaggaggccgctgggcacctgctgggggaacagaactacctcccgcaagaggagccgcaggaggtgcccctgcaggggttactaggcctgcaggacccgtttgccgaggtggaagccaagctggccagactctcctccaccgtggccaggacagatgcaccccaggcagacgtccccaaggtccctgtgcaggtccctgcgccgacagacctgctggagcccagtgatgccaggcccgaagccgaggcggctgatgacttcccgcccaggcctgaggtagatctggcctcggaagtggccttagaggtggtgcggacagcagagcctggcgtgtggttggaggctcaggccccggtggccctggtggctcagcctgagcccctgccggccacagctggtgtgaagagggagagcgtgggcatggaggtggcagtgctgactgatgacccgctgcccgttgtggaccagcagcaggtgctggcccgtctgcagctgttggagcagcaggttgtgggtggagagcaggccaagaacaaggacctgaaggagaagcacaagcggcgcaagcgctacgcagacgagcgcaggaagcagctggtggctgccctgcagaactcggatgaggacagcggggactgggtgctgcttaacgtctacgactccatccaggaggaagtgcgggccaagagcaagctgctggagaagatgcagaggaagcttcgggcagcagaggtggagatcaaagatctgcagtccgagtttcagctggagaagatcgattacttggccaccatccgccggcaggagcgtgactccatgctcttgcagcagctcctggagcaggtgcagcccctgattcgcagggactgtaactacagcaacctggagaagattctgcgtgagtcctgctgggacgaagataacggcttctggaagatcccacatcccgtcatcacaaaaaccagcctcccagtagcagtttcaactgggccacagaacaaaccagcccgcaaaacctctgcagcagacaatggcgagccgaacatggaggaggaccgctacaggctcatgctcagtcggagcaacagtgaaaacattgccagcaactacttccgatctaagcgggccagccagatcctcagcacagacgccaggaagagcctcacacatcacaactcgccaccaggcctcagctgcccactcagcaacaactctgccatcccacccacccaggcccctgaaatgccccagccccggcccttccgcctcgagtccctcgacatccctttcaccaaggccaagcgtaagaaaagcaaaagcaactttggcagtgagcctctgtgagcacagctgcttgccattgcctgccttataggcatgtagagactgccaggccctcccagggcagccccaaccaggtctcctcccacctgccacacagcgctccggggcctgagggctccctcagccctgggaagacacattcccttccctgttccccagagagcccacctccgccctgggcaggagcccctcggaggctgtatagtcctccttagagaggcctgctccagctgttcataccacatcagtgtttccgtctgctcacctgccacagagcccacacccatgcccaccagtgttggtctttgcctcaaagcctgagacctgcttcacggccttcaccagccctgatggagagggcagcagctgccacgtggaggaagctcaatatcagctgggaaggaactgtgcctctgtctgactggccccacttcctaagcactgccctgccccatggggtggcacaggggtcccacagcaggtcttcctgcactgcccacccctggctggtctgtggcccaaggaaggccactccacattaagctgcccaataaactgcttttaagataaact

SEQ ID NO: 33052 - DNA, 1815 bp, Homo sapiens
gtaagaactcaacagggcgtgtttttgtgtcactggtgtccctgagctggaggtgatctgtcggggctgcagcaggcggaatggccccgtctgggattgagccacctgggagctgtcggcgggggttggggcggccttcccacctccacctgggtttctcttcacactcaggaggtagatctggcctcggaagtggccttagaggtggtgcggacagcagagcctggcgtgtggttggaggctcaggccccggtggccctggtggctcagcctgagcccctgccggccacagctggtgtgaagagggagagcgtgggcatggaggtggcagtgctgactgatgacccgctgcccgttgtggaccagcagcaggtgctggcccgtctgcagctgttggagcagcaggttgtgggtggagagcaggccaagaacaaggacctgaaggagaagcacaagcggcgcaagcgctacgcagacgagcgcaggaagcagctggtggctgccctgcagaactcggatgaggacagcggggactgggtgctgcttaacgtctacgactccatccaggaggaagtgcgggccaagagcaagctgctggagaagatgcagaggaagcttcgggcagcagaggtggagatcaaagatctgcagtccgagtttcagctggagaagatcgattacttggccaccatccgccggcaggagcgtgactccatgctcttgcagcagctcctggagcaggtgcagcccctgattcgcagggactgtaactacagcaacctggagaagattctgcgtgagtcctgctgggacgaagataacggcttctggaagatcccacatcccgtcatcacaaaaaccagcctcccagtagcagtttcaactgggccacagaacaaaccagcccgcaaaacctctgcagcagacaatggcgagccgaacatggaggaggaccgctacaggctcatgctcagtcggagcaacagtgaaaacattgccagcaactacttccgatctaagcgggccagccagatcctcagcacagacgccaggaagagcctcacacatcacaactcgccaccaggcctcagctgcccactcagcaacaactctgccatcccacccacccaggcccctgaaatgccccagccccggcccttccgcctcgagtccctcgacatccctttcaccaaggccaagcgtaagaaaagcaaaagcaactttggcagtgagcctctgtgagcacagctgcttgccattgcctgccttataggcatgtagagactgccaggccctcccagggcagccccaaccaggtctcctcccacctgccacacagcgctccggggcctgagggctccctcagccctgggaagacacattcccttccctgttccccagagagcccacctccgccctgggcaggagcccctcggaggctgtatagtcctccttagagaggcctgctccagctgttcataccacatcagtgtttccgtctgctcacctgccacagagcccacacccatgcccaccagtgttggtctttgcctcaaagcctgagacctgcttcacggccttcaccagccctgatggagagggcagcagctgccacgtggaggaagctcaatatcagctgggaaggaactgtgcctctgtctgactggccccacttcctaagcactgccctgccccatggggtggcacaggggtcccacagcaggtcttcctgcactgcccacccctggctggtctgtggcccaaggaaggccactccacattaagctgcccaataaactgcttttaagataaact

SEQ ID NO: 33053 - DNA, 2704 bp, Homo sapiens
cccggcggggcgggggtcagctctggtcccgttggtcctgggcgcggcgccatggcctccgaggcggtgaaggttgtcgtgcgctgccgtcccatgaaccagcgggagcgagagctgcgctgccagcccgtggtgactgtggactgcgcgcgcgcccagtgctgcatccagaacccgggcgccgccgacgagccgcccaagcagttcaccttcgacggcgcctaccacgtggaccacgtcaccgagcagatctacaacgagatcgcctatccgctggtggagggcgtcactgagggctacaatggcaccatctttgcctacggccagacaggcagcgggaagtccttcaccatgcagggcctgccggatccgccctcccagagaggcatcatccccagggccttcgagcacgtgttcgagagcgtccagtgtgcagagaacactaagttcctggtccgggcctcctacctggagatctacaatgaagatgtccgggacctccttggggctgacaccaagcagaagctggagctgaaggagcacccagagaagggcgtgtacgtgaaggggctgtccatgcacacggtgcacagcgtggcccagtgtgagcacatcatggagactggctggaagaaccgttcggtcggctacacgctgatgaacaaggattcctcacgctcgcactccatcttcaccatcagcatcgagatgtctgccgtggatgagcggggcaaggaccacctccgggcgggcaagctgaacctggtggacctggcgggcagcgagcggcagtccaagaccggggccacgggcgagcggctcaaggaggccaccaagatcaacctgtcgctctcggcactgggcaatgtcatctcggcgctggtggacgggcgctgtaagcacgtcccctaccgtgactcgaagctgacgcggctgctgcaggactcactgggcggcaacaccaagacgctcatggtggcctgcctgtcgcctgcggacaacaactacgatgagacactcagcacgctgcgctacgccaaccgggccaagaacatcaggaacaagccgcgcatcaatgaggaccccaaggatgcgctgcttcgcgagtaccaggaggagatcaagaagctcaaggccatcctgacacagcagatgagccccagcagcctgtcagccctgctgtccaggcaggtgcccccagaccctgtgcaggtggaggagaagctgttgccccaacctgtgatccagcatgacatggaggccgagaagcagctgatccgggaggagtatgaagagcgcctggcccggctgaaagccgactataaggccgagcaggagtctcgggccaggctggaggaagacatcactgccatgcgcaactcatatgacgtcaggctgtccacgctggaggagaacctgcggaaggagacaggtccctgcgccgacagacctgctggagcccagtgatgccaggcccgaagccgaggcggctgatgacttcccgcccaggcctgaggtagatctggcctcggaagtggccttagaggtggtgcggacagcagagcctggcgtgtggttggaggctcaggccccggtggccctggtggctcagcctgagcccctgccggccacagctggtgtgaagagggagagcgtgggcatggaggtggcagtgctgactgatgacccgctgcccgttgtggaccagcagcaggtgctggcccgtctgcagctgttggagcagcaggttgtgggtggagagcaggccaagaacaaggacctgaaggagaagcacaagcggcgcaagcgctacgcagacgagcgcaggaagcagctggtggctgccctgcagaactcggatgaggacagcggggactgggtgctgcttaacgtctacgactccatccaggaggaagtgcgggccaagagcaagctgctggagaagatgcagaggaagcttcgggcagcagaggtggagatcaaagatctgcagtccgagtttcagctggagaagatcgattacttggccaccatccgccggcaggagcgtgactccatgctcttgcagcagctcctggagcaggtgcagcccctgattcgcagggactgtaactacagcaacctggagaagattctgcgtgagtcctgctgggacgaagataacggcttctggaagatcccacatcccgtcatcacaaaaaccagcctcccagtagcagtttcaactgggccacagaacaaaccagcccgcaaaacctctgcagcagacaatggcgagccgaacatggaggaggaccgctacaggctcatgctcagtcggagcaacagtgaaaacattgccagcaactacttccgatctaagcgggccagccagatcctcagcacagacgccaggaagagcctcaagcccacacccatgcccaccagtgttggtctttgcctcaaagcctgagacctgcttcacggccttcaccagccctgatggagagggcagcagctgccacgtggaggaagctcaatatcagctgggaaggaactgtgcctctgtctgactggccccacttcctaagcactgccctgccccatggggtggcacaggggtcccacagcaggtcttcctgcactgcccacccctggctggtctgtggcccaaggaaggccactccacattaagctgcccaataaactgcttttaagataaact

SEQ ID NO: 33054 - DNA, 1341 bp, Homo sapiens
actcctgacctcaagtgatccgcccgcttcggccttccaaagtgctgggattacaggtgtgagccaccacgccctgcctcaaacatccttctttactaatcagactgtacctgctctttgaggaaacagactgtgcaccagcttcgggcagcagaggtggagatcaaagatctgcagtccgagtttcagctggagaagatcgattacttggccaccatccgccggcaggagcgtgactccatgctcttgcagcagctcctggagcaggtgcagcccctgattcgcagggactgtaactacagcaacctggagaagattctgcgtgagtcctgctgggacgaagataacggcttctggaagatcccacatcccgtcatcacaaaaaccagcctcccagtagcagtttcaactgggccacagaacaaaccagcccgcaaaacctctgcagcagacaatggcgagccgaacatggaggaggaccgctacaggctcatgctcagtcggagcaacagtgaaaacattgccagcaactacttccgatctaagcgggccagccagatcctcagcacagacgccaggaagagcctcacacatcacaactcgccaccaggcctcagctgcccactcagcaacaactctgccatcccacccacccaggcccctgaaatgccccagccccggcccttccgcctcgagtccctcgacatccctttcaccaaggccaagcgtaagaaaagcaaaagcaactttggcagtgagcctctgtgagcacagctgcttgccattgcctgccttataggcatgtagagactgccaggccctcccagggcagccccaaccaggtctcctcccacctgccacacagcgctccggggcctgagggctccctcagccctgggaagacacattcccttccctgttccccagagagcccacctccgccctgggcaggagcccctcggaggctgtatagtcctccttagagaggcctgctccagctgttcataccacatcagtgtttccgtctgctcacctgccacagagcccacacccatgcccaccagtgttggtctttgcctcaaagcctgagacctgcttcacggccttcaccagccctgatggagagggcagcagctgccacgtggaggaagctcaatatcagctgggaaggaactgtgcctctgtctgactggccccacttcctaagcactgccctgccccatggggtggcacaggggtcccacagcaggtcttcctgcactgcccacccctggctggtctgtggcccaaggaaggccactccacattaagctgcccaataaactgcttttaagataaact

SEQ ID NO: 33055 - DNA, 755 bp, Homo sapiens
ggagtcagatgtagtatagggcactatgaatgctcaccccactgggatgtcaagtggaagaaggacaattccctgaaaagggagatttagattgaagaaaacaagtccataatagtggggaaaaataatagctcttggtgataagaaggtttggattccagttctaatgatcacaaatgtacctgtgagctgaggatagcaacgcattgcctattctatgaacatgtcgtgatagatttggggcttgtgtatcaccccggcccccctgttggagctggcaggacaccctgttttgagctttgtaggacagaataaggcacttcccatctcaaggaaggggaggccgggtgcaggcttggctggagactgacttcctggccccgagctgcctgggatcccacccccgagtccaggatctacggtgtagggtacaccagagtgggcagtgcctgctccagccctgtgacaacttgggggaagctcggggcggcccccactgccccaggataccagaggctgtggagccctgtgccaggggcacaaacaaggggacgtgaccacgggcatctgcatctcggcaggaggaggaccgctacaggctcatgctcagtcggagcaacagtgaaaacattgccagcaactacttccgatctaagcgggccagccagatcctcagcacagacgccaggaagagcctcagtgagtgtccctcccctgtccccaccctctccacacaactgggagaggcgtgaagg

SEQ ID NO: 33056 - DNA, 3157 bp, Homo sapiens
cccggcggggcgggggtcagctctggtcccgttggtcctgggcgcggcgccatggcctccgaggcggtgaaggttgtcgtgcgctgccgtcccatgaaccagcgggagcgagagctgcgctgccagcccgtggtgactgtggactgcgcgcgcgcccagtgctgcatccagaacccgggcgccgccgacgagccgcccaagcagttcaccttcgacggcgcctaccacgtggaccacgtcaccgagcagatctacaacgagatcgcctatccgctggtggagggcgtcactgagggctacaatggcaccatctttgcctacggccagacaggcagcgggaagtccttcaccatgcagggcctgccggatccgccctcccagagaggcatcatccccagggccttcgagcacgtgttcgagagcgtccagtgtgcagagaacactaagttcctggtccgggcctcctacctggagatctacaatgaagatgtccgggacctccttggggctgacaccaagcagaagctggagctgaaggagcacccagagaagggcgtgtacgtgaaggggctgtccatgcacacggtgcacagcgtggcccagtgtgagcacatcatggagactggctggaagaaccgttcggtcggctacacgctgatgaacaaggattcctcacgctcgcactccatcttcaccatcagcatcgagatgtctgccgtggatgagcggggcaaggaccacctccgggcgggcaagctgaacctggtggacctggcgggcagcgagcggcagtccaagaccggggccacgggcgagcggctcaaggaggccaccaagatcaacctgtcgctctcggcactgggcaatgtcatctcggcgctggtggacgggcgctgtaagcacgtcccctaccgtgactcgaagctgacgcggctgctgcaggactcactgggcggcaacaccaagacgctcatggtggcctgcctgtcgcctgcggacaacaactacgatgagacactcagcacgctgcgctacgccaaccgggccaagaacatcaggaacaagccgcgcatcaatgaggaccccaaggatgcgctgcttcgcgagtaccaggaggagatcaagaagctcaaggccatcctgacacagcagatgagccccagcagcctgtcagccctgctgtccaggcaggtgcccccagaccctgtgcaggtggaggagaagctgttgccccaacctgtgatccagcatgacatggaggccgagaagcagctgatccgggaggagtatgaagagcgcctggcccggctgaaagccgactataaggccgagcaggagtctcgggccaggctggaggaagacatcactgccatgcgcaactcatatgacgtcaggctgtccacgctggaggagaacctgcggaaggagacaggtccctgcgccgacagacctgctggagcccagtgatgccaggcccgaagccgaggcggctgatgacttcccgcccaggcctgaggtagatctggcctcggaagtggccttagaggtggtgcggacagcagagcctggcgtgtggttggaggctcaggccccggtggccctggtggctcagcctgagcccctgccggccacagctggtgtgaagagggagagcgtgggcatggaggtggcagtgctgactgatgacccgctgcccgttgtggaccagcagcaggtgctggcccgtctgcagctgttggagcagcaggttgtgggtggagagcaggccaagaacaaggacctgaaggagaagcacaagcggcgcaagcgctacgcagacgagcgcaggaagcagctggtggctgccctgcagaactcggatgaggacagcggggactgggtgctgcttaacgtctacgactccatccaggaggaagtgcgggccaagagcaagctgctggagaagatgcagaggaagcttcgggcagcagaggtggagatcaaagatctgcagtccgagtttcagctggagaagatcgattacttggccaccatccgccggcaggagcgtgactccatgctcttgcagcagctcctggagcaggtgcagcccctgattcgcagggactgtaactacagcaacctggagaagattctgcgtgagtcctgctgggacgaagataacggcttctggaagatcccacatcccgtcatcacaaaaaccagcctcccagtagcagtttcaactgggccacagaacaaaccagcccgcaaaacctctgcagcagacaatggcgagccgaacatggaggaggaccgctacaggctcatgctcagtcggagcaacagtgaaaacattgccagcaactacttccgatctaagcgggccagccagatcctcagcacagacgccaggaagagcctcacacatcacaactcgccaccaggcctcagctgcccactcagcaacaactctgccatcccacccacccaggcccctgaaatgccccagccccggcccttccgcctcgagtccctcgacatccctttcaccaaggccaagcgtaagaaaagcaaaagcaactttggcagtgagcctctgtgagcacagctgcttgccattgcctgccttataggcatgtagagactgccaggccctcccagggcagccccaaccaggtctcctcccacctgccacacagcgctccggggcctgagggctccctcagccctgggaagacacattcccttccctgttccccagagagcccacctccgccctgggcaggagcccctcggaggctgtatagtcctccttagagaggcctgctccagctgttcataccacatcagtgtttccgtctgctcacctgccacagagcccacacccatgcccaccagtgttggtctttgcctcaaagcctgagacctgcttcacggccttcaccagccctgatggagagggcagcagctgccacgtggaggaagctcaatatcagctgggaaggaactgtgcctctgtctgactggccccacttcctaagcactgccctgccccatggggtggcacaggggtcccacagcaggtcttcctgcactgcccacccctggctggtctgtggcccaaggaaggccactccacattaagctgcccaataaactgcttttaagataaact

SEQ ID NO: 33057 - DNA, 2974 bp, Homo sapiens
cccggcggggcgggggtcagctctggtcccgttggtcctgggcgcggcgccatggcctccgaggcggtgaaggttgtcgtgcgctgccgtcccatgaaccagcgggagcgagagctgcgctgccagcccgtggtgactgtggactgcgcgcgcgcccagtgctgcatccagaacccgggcgccgccgacgagccgcccaagcagttcaccttcgacggcgcctaccacgtggaccacgtcaccgagcagatctacaacgagatcgcctatccgctggtggagggcgtcactgagggctacaatggcaccatctttgcctacggccagacaggcagcgggaagtccttcaccatgcagggcctgccggatccgccctcccagagaggcatcatccccagggccttcgagcacgtgttcgagagcgtccagtgtgcagagaacactaagttcctggtccgggcctcctacctggagatctacaatgaagatgtccgggacctccttggggctgacaccaagcagaagctggagctgaaggagcacccagagaagggcgtgtacgtgaaggggctgtccatgcacacggtgcacagcgtggcccagtgtgagcacatcatggagactggctggaagaaccgttcggtcggctacacgctgatgaacaaggattcctcacgctcgcactccatcttcaccatcagcatcgagatgtctgccgtggatgagcggggcaaggaccacctccgggcgggcaagctgaacctggtggacctggcgggcagcgagcggcagtccaagaccggggccacgggcgagcggctcaaggaggccaccaagatcaacctgtcgctctcggcactgggcaatgtcatctcggcgctggtggacgggcgctgtaagcacgtcccctaccgtgactcgaagctgacgcggctgctgcaggactcactgggcggcaacaccaagacgctcatggtggcctgcctgtcgcctgcggacaacaactacgatgagacactcagcacgctgcgctacgccaaccgggccaagaacatcaggaacaagccgcgcatcaatgaggaccccaaggatgcgctgcttcgcgagtaccaggaggagatcaagaagctcaaggccatcctgacacagcagatgagccccagcagcctgtcagccctgctgtccaggcaggtgcccccagaccctgtgcaggtggaggagaagctgttgccccaacctgtgatccagcatgacatggaggccgagaagcagctgatccgggaggagtatgaagagcgcctggcccggctgaaagccgactataaggccgagcaggagtctcgggccaggctggaggaagacatcactgccatgcgcaactcatatgacgtcaggctgtccacgctggaggagaacctgcggaaggagacaggtccctgcgccgacagacctgctggagcccagtgatgccaggcccgaagccgaggcggctgatgacttcccgcccaggcctgaggtagatctggcctcggaagtggccttagaggtggtgcggacagcagagcctggcgtgtggttggaggctcaggccccggtggccctggtggctcagcctgagcccctgccggccacagctggtgtgaagagggagagcgtgggcatggaggtggcagtgctgactgatgacccgctgcccgttgtggaccagcagcaggtgctggcccgtctgcagctgttggagcagcaggttgtgggtggagagcaggccaagaacaaggacctgaaggagaagcacaagcggcgcaagcgctacgcagacgagcgcaggaagcagctggtggctgccctgcagaactcggatgaggacagcggggactgggtgctgcttaacgtctacgactccatccaggaggaagtgcgggccaagagcaagctgctggagaagatgcagaggaagcttcgggcagcagaggtggagatcaaagatctgcagtccgagtttcagctggagaagatcgattacttggccaccatccgccggcaggagcgtgactccatgctcttgcagcagctcctggagcaggtgcagcccctgattcgcagggactgtaactacagcaacctggagaagattctgcgtgagtcctgctgggacgaagataacggcttctggaagatcccacatcccgtcatcacaaaaaccagcctcccagtagcagtttcaactgggccacagaacaaaccagcccgcaaaacctctgcagcagacaatggcgagccgaacatggaggaggaccgctacaggctcatgctcagtcggagcaacagtgaaaacattgccagcaactacttccgatctaagcgggccagccagatcctcagcacagacgccaggaagagcctcacacatcacaactcgccaccaggcctcagctgcccactcagcaacaactctgccatcccacccacccaggcccctgaaatgccccagccccggcccttccgcctcgagtccctcgacatccctttcaccaaggccaagcgtaagaaaagcaaaagcaactttggcagtgagcctctgtgagcacagctgcttgccattgcctgccttataggcatgtagagactgccaggccctcccagggcagccccaaccaggtctcctcccacctgccacacagcgctccggggcctgagggctccctcagccctgggaagacacattcccttccctgttccccagagagcccacctccgccctgggcaggagcccctcggaggaagctcaatatcagctgggaaggaactgtgcctctgtctgactggccccacttcctaagcactgccctgccccatggggtggcacaggggtcccacagcaggtcttcctgcactgcccacccctggctggtctgtggcccaaggaaggccactccacattaagctgcccaataaactgcttttaagataaact

SEQ ID NO: 33058 - DNA, 607 bp, Homo sapiens
tttttttttgtagagacaagacttcaccatgttggccaggatggtatcaatctcctgaactcatgatctgcccgcctcagccatttttagatgagagaactgagggaaagagagggaaaggtgcatgtccagaggcacataggtagttaagtgatagagctggaatttccacccaggtagtctgactttcaaagccctgccctgtccactccatgacaactgcctctgcatgaatgcttcaacaaggtaatatgtataaagtgcataccctgcttgtcacttagaaagcactgactacggccgggggtggtggctcacgcctgtaatccagcactttgggaggccgaggggggcagatcacaagatcaggagatggagaccattttgcctatctttgatagtgcatgagatcaacatgctctaaaatgtttcgcgactttgaaatataaatttacttacaaatgtttactcattgctattttgttcatggcattgtggtattaaataactggaaggaagagtaaaacttcttggcatccagcagtttatttcattgtgagtagtcaaagtcttaaaggtacaaggagtggtcgacgcggcccgcaaa

SEQ ID NO: 33059 - DNA, 306 bp, Homo sapiens
ggagactaaaaattatttgcagataataaaaagttcccaaggcaatcaactaaaatgtagtttagtagggttccactgtaaatcatgtaaatatcatgatcttttgtgtatgataataataaccagtttaaaagtatgaggaaaaaagcccattcatagtagcaacaaaaaatatgccagggattaaactcggtaagaaatgcaattggcctgtagaaaggaaactagtgaactttgctctgaagataatgaggagacttatgtttctggataggaagacaattctttagttagttttaatatttt

SEQ ID NO: 33060 - DNA, 580 bp, Homo sapiens
gaaagctgaagaggccagatacttcttttgccagaatcccttgcagcgagggtgagggacatgacctggacttctgctaatcagactgatcagacactcctgccatggactttggatctaaaaagccagagtttcgccctgttgtccaggctggtctcaaactcctggattcaagtgagccacccaccttggcctcccaaagtgctgggattacagatatgagccactgagcccagccaaggccacagtatcttaatctctagccatttgctttaacacctacatgaatgtcaagcaactggtaatgtggtcttcaaccctaagcagatggaccaaaccctgaaaaatggagaagcaacaaataaaagtgtcatgcaattattgaccatggaataaatatacagaagaccaagagaaattcagaaatcataaagcatcgatattgcactccagcctgggcaacaagaatgaaacatcatctcaaaaaaacaaaagtttactcttttatctcaaaagtttattgtacgatgtaaatcttcagctttggcaaaatactattttaaacactcaaccattctgt

SEQ ID NO: 33061 - DNA, 506 bp, Homo sapiens
gcaaagactgatattggtatggacgtaaagaatcattaatgaagcaagatttattttttgagaaagattgtcaatgtgaaatgcatgctgatgaaactagagtttgttcttatttaggttgctgatctttgagaaaataattgaaacagtatcaatcatgagcattatcctattagcacaaattcagatgtttaccagttgaactatgctacaaactcttgacttcacttgaaaactcatctatggaggagtatggctcagttgaacaaaaagtgacagaccttaatccttgtcaagtactatcccagatataaggagggcttgtcatggttgcagttctcaaggagcttatagaagtggaaagacacacacataagaaaaataattttagtataatatggtaaatgataacatagtgttatgtaaagacagacatgataacgtgaagtttagtggcaaatttcttagagatggtatttgagctaaaacttacagaatgagaaaaa

SEQ ID NO: 33062 - DNA, 223 bp, Homo sapiens
ttttcctttttagaaaaatgacccaacttgggatgttttcttgggttgaagttttatttaggaaaataaaccccaaataaaaacgatgttgagaaaatgggcggggggggagaaaagaaaatcatacactgacgttagctaaaatagaaacttccatcacccttaagccagtttgtcaatagttattcaacgcctgctactctaatcactggcttcctaaaat

SEQ ID NO: 33063 - DNA, 428 bp, Homo sapiens
ttttttttaaaggctaggtctcactctgttgcccaggctggagtgcagtagtgtgaacacagctcattgcagcctcaaccttctgggctcaggtgatctgaaaggtgtcactttttattatttaaaattcacttctcttttaattttgtggttggatcctaagagtagagcacgtgagccagatttaaattgtattcctttggtcacagtgattggctcaggggtgaacttatggtgtaagaagaaccaatcagaggaaaatttggactgtctctgggaaagtggaatctcaaactggagaacaaaaacattaggctccttgggacatggttcgaatcctgaatcaagtcttacctggtctgtttacttacataagacaatacattctctttttttgatttagctctttggagttcagtttttgttat

SEQ ID NO: 33064 - DNA, 1745 bp, Homo sapiens
caggtctccaggggtcaaaccacaccccacaggcaccttggaagaagaaatccacaggaggaaaaaaagaaaaaattctcaaactacaggaagtggagagaacagtacagtgaccctacacgcttgttaccagcctcacctgtcacccacatggagtccttcccatttgtggggtttccaggatttgctgagcacctactatgcatcagacgctgtgttctaggcaagggggatacacctgatggaagaaggtccttccctagacgtagctaacatcccagtgtgggagatgatacgaaacagcaaactccccacaacagcctcctcaacgctgcctcccacagtgcttggacaaaataattacagcaagatgcgggcaactgagctgactccttatgtaggacatcccagtgcaggtagagaaactgagggacagttggaggttccttgcccttggtgatcggtgagagggcctgcaggcaccagcccggccgcaccgcaccgcttctcgcggaccccagcggagccgcgcttctcgtgccgctcctgagggtttccgcggcgccggcgtttttgttcccggcgcgtttaagtcgttgaggccgaatcaagcgaaggcggaaaagcggcgcgcagcccgcgtcagctgcagttccgtccccctggttcccggtgcgctaacaaaggcatttgcatgaaaacaggaaccccgtctgcagaaaggactcgttggcggggtgcatcgtgcgctccagtgcccctaccgcggcgcccgctccccaggtggggaagaagcggggtgcggggactggccccaaacacggctcggccggcggggaccggcacgctgcggcccgggcgacccccttctccgcccctttcccaggccggcggaaacggccgtctcgggcgtgggcgcgcttctgcggactcctcgggaccttttacccaggcgtgcggccggggcgcccggggcctcggggagccggcgccagcgtgcggagcgcagcggagcggagggagcggcgggagcggcgtccgtggctggtccaggtctggggcgcagcctccaggctcgccctgcgccgctctgggcctcggcctcttcgcctgttcgaccggggcgcaagcgtgtcacagcgcctgtctgcagggggaagcgggcttcccagaggggcgcgtggctcgcagaggggctccgggaatatccgctccgttggccctttccagagcttttccttagctgcttctcctttgaaatccgcctttttcccagcagcccttggaggcaggataaattaagtggtaaaagcagaggattaggaaccgggaaccctggattcaaatcctgcccgccgctgaccagctttgtaaccatgagcaggttactccgcctctggaggcctcagcttccccgtctgtaaaatggggcctaacacagtccagaaagtgcttagtgccgcagtgtcacacaccgagtgcttaattcattcttaaaattatcacttccagctgtgggacaggcgcagggtagaaaggggttttcttaaggtcacaggcggggtcaaaggcaaaccctccgggtcctcacaagtaagacttgcgaagcagcaagttccccaaagggtcttatccagccgggtaaggagcgccggggcatctcccccctctctctccgcgaagacgcacaagcaatggctggcgaacctactgcctggaatggggttcttgggtcgagaccttta

SEQ ID NO: 33065 - DNA, 817 bp, Homo sapiens
ccaggctgggcccaatattctcaagtgccgagcctacctactgcgcacttgaggctattgttcaacctggttccccacatatcgtgcaacctgttgtttctccacctatcgtgcaacctgtttctccacatattgttcaacttcctatttcccttcaatagattattcaaccagcattttcctatctgtacaagggagtgaggattacatgacctaatgtgcatatagcatagagcagagcctggcataagcgctgcattggtgtttgctacgatattaacacttgttgctatttgaaattattttgtctgtatgtttcttgtttatttccctcttctctctgacaggcaaactccccacaacagcctcctcaacgctgcctcccacagtgcttggacaaaataattacagcaagatgcgggcaactgagctgactccttatgtaggacatcccagtgcaggtagagaaactgagggacagttggaggttccttgcccttggtgatcggtgagagggcctgcaggcaccagcccggccgcaccgcaccgcttctcgcggaccccagcggagccgcgcttctcgtgccgctcctgagggtttccgcggcgccggcgtttttgttcccggcgcgtttaagtcgttgaggccgaatcaagcgaaggcggaaaagcggcgcgcagcccgcgtcagctgcagttccgtccccctggttcccggtgcgctaacaaaggcatttgcatgaaaacaggaaccccgtctgcagaaaggactcgttggcggggtgcatcgtgcgctccagtgcccctaccgcggcgc

SEQ ID NO: 33066 - DNA, 356 bp, Homo sapiens
tatgatatggaaaaccaaacttaatcaactaaaaactatttagaagcaatggagaaatttaggaagatgactggcttattaaaaatatgaagttaggtcattgaaaagcataaaagaatccaacaaaaaataaaaattaaaaaatgaagtcagccgagcacagtggctcacgcctgtatccccagcaatttgggaggccaaggcaggtggatcacctgaggtcgggagtttgagaccagcctggccaacatggtgaaaccccatctctactaaaaatacaaaaattagccgggtgtggtggggcatgcctgtaatcccagctgcttgggaggctgaggcatgagaactgcttgaac

SEQ ID NO: 33067 - DNA, 763 bp, Homo sapiens
gagaatgagccctggtgtagtcattgccagtttgggtggaacttttaaaaatcaccagttcatgatttgaatagggaaggtgtgaccactgagacgagaaccagcattattttccagagatggcaaaatagagcttgagaagctggccaaagagaagatgaaatgaatgctggttgcacagtgttcagtatgtagacatcaagggattctggccctgttagatatgttagaggaaaggtttgtttaacattaatacaatgtgctacaggggaagtgttgtcaaacagttatgccggtttcttaggtaaagttggccagtattcttcttgcaggcctagtttgcttcatcattaggataactgtatgcattctcattggagcctattatccagatataattgttaattatgtccattctttcattctcaaaattgatttggtttggaccatttatcagtcctgggtagaaatgcacattttctgactttctgactgtctgtctctgtggagagcctctttgtatgacaccagctctgcagcaggagtgcttgtgcacatggccattatgagaaggccagttagatttcaggagtcatggggactgtgaggacctggaatacccatgcccagtataaaggtaattcaagttcagatctgtgcaaaacccacgctggatgcaaaaacacatttgctggccaaattcagatcacaggcacctggtaggttcatcttcttctttatagggaactgttaatgttctaga

SEQ ID NO: 33068 - DNA, 384 bp, Homo sapiens
tttttttaattttgagatgggagtcttactgtgtagcccaggctggagtacagtggtgtaatctcggctcactgcaatctccacctcccaggttcaagcgattctcctgcctcaacctcctgagtagctgggactacatggctgcgtcaccacgcccgactaatttttgtaatttgagtagagacggggtttcactgtgttggccagctggtctcaaactcctgacctcaggtgatccagccgcctcagcctcccaaagtgctgagattacaggcatgagccacggcgcccggcttccctctccttttttaacccaccttgctcttcaccttaggtttttcacttgacaatatatcctgattatttccgtatcaataaattagt

SEQ ID NO: 33069 - DNA, 378 bp, Homo sapiens
tatacctactggggctcgattccttaggtttatgccctgaggttaccatagagagttttgatacttcacatcagcgttacttttttttattaatcattttattatgaaaaatttcaaacatgcagaaaagtttaaagaattgtacagtgaatgcctgtaatcacctagattctacaatgaacatttagctctagatgatcagaaatctatcaatccatctattgactctgtatttttctgttagatgcatttcaaagtaagctaagccatcagtgcactcaccctaaagactttaggatgtatatattaaactgatattaacttgaggttctttctttttttattgtgaggtcaaatttacatagagcaaaaaaaaca

SEQ ID NO: 33070 - DNA, 874 bp, Homo sapiens
tgacctctcagcaggcatctagggttggcaggtagatagttcaagaaggaacgaagctgctgcagttgaggggtggggttgtccatcctattttctcgtctcaagcaagatggcacagtatcgattcagcagtatttactagaacccactctgtgctggtcggaggttactaagacagggtcctgggatgttcattctctaagtctttcctccgctctgtgacccaccctccttccccttttgagatctggtatttgatgcccaacacattgtccacgctgtgacgtgaccatcatcatagcaggcagagggcgcctctgctgctgaaggcctgtgattttgtggggaagggcctgttctagcaactggaaaggcactgccacctgccgttggatgccaggactcaagagctggccccagtcactgtgcgcagagctgtctgagaatgtgtgagtggactgggtccttcggcactgcctgcattggctcagggcagtcaaccgtcgcagaggatgaggggcacactcaggcagcctccccggccctggaggcagaaaggcccaggcagaaccactgactgggaggaaacagaaaaagcagaggagagccaggctgcaggcgtgtggatgggaccagctcaggcagacgctgtctcatacccactctcccctctcttgccagggcctggcctggtgtctctcaggagcctgggcatgagacaaaagcagagattgttctcttgtggtaccacaggctgtaaccagtccacccagtgttgttttagaaatttaaatcggttgcccatctttttaaattggcaacatcgtttaccacattaaaatctagatgccctgcttctcttgaaaatgtcaaa

SEQ ID NO: 33071 - DNA, 443 bp, Homo sapiens
gcaacagctgacatgacagttctgctgtccttcctggggttctaaaaccatgatctcttcaagaatgaggcttcgccaagctccttgaaacttgtttggttggtttctaccatagagctacttatgcagatactcaaatagagaaatcatggaagcagagcagtgaaaagttctcagatatcatctgaaccaatacctgtttctacagatgagtgtactgaggttcacagaggttgaatgacttgtccaagacacacagctggtttgtgacagatctaagaccagaactgggacctccagttctgatggaaacttcaggctacacagatttcaaggccaacagttgaggtttatatttgtgttaatttagtcaaactaagtatgacttaagtaaaatgaagtttaaatgatttgtttatgaaaaataaaatttaataaataga

SEQ ID NO: 33072 - DNA, 376 bp, Homo sapiens
ttctccatttgtttccccacttctactgccaatcagtgcaagaggcaatatggtgatagtttatgtctatgggtgctcagagaagagtgaaatggtgggaacagctggattgtcattgcttggtgcctgattagagaaatgtattcttgttgtacattagagaccagaataccttttcctatagaaacaatatgagaaatgagtgtagattaaaaagacgttttagattagctgggcatggtggtgcatgcctgtaatcccagctactcagaggctgaggcacaagaatcgcttgaacccaggaggcagagggttgcagtgagccgagattgcaccactccactccagcctgggtgacagagtgatactcggtctc

SEQ ID NO: 33073 - DNA, 365 bp, Homo sapiens
cctcctatgacttaaaatacctaacctcctggaaattcagcccagtgggtctcagcctcattttacccagccccccttcaagatgggagttgtgcttgttcaaaggcccctgacatgacgatgctaaaatctccactcagggaggagctatagctcatgaccatctcatgagaccttatactggcagaacggctcagtgcatgtgtgccactgaaactccctcctctacatgtggtgacgcaccctctcccctctccatggcctcagaaaaccctcctgtcactttgcctcagagagacactgctttggagaatactccccatggcctccttacttgagtcaagtagtaaaacctctactgacga

SEQ ID NO: 33074 - DNA, 493 bp, Homo sapiens
aaccccatctctactaaaaatacaaaaattagccaggcatgtggtggacacctgtaatcccagctactcaggaggctgaggcaggagaatcgcttgaacccaggaggcagaggttgcagtgagctgcgattatgccactgcactccagcctgggtgaaagaaactcagtctccaaaaagactgtcggagtggactgcaggagtcaggggcgagacacacgacactcaatttgcagcatgtgcccaatacacaacagccagtgtgtcagcagggacgctgcccccagcagtggcttccctgcccacgggggctcttccagggcaggagcatctgatgggaagctccaagctgccaaggggggagatggggaaacaccgtgttttacatttggactgtcctgcaacagtgcacatgctccttctgcagctaacaggccatgggagaccgtttcctcctctcccaaactgggccaatgcctgccaggaggggctgg

SEQ ID NO: 33075 - DNA, 295 bp, Homo sapiens
gtccctctttctcaatctggttttggtatcagggtgatggcttcataaaatgagttagggaggattcctgctttctcaatcttttggaatagtttcagtaggattggtataaattcttctttgaaagtccggtagaattcaactgtgaatccatctggccaatctgaccataaccttttcttggttggcaatttttaagttactgaatcaatctcacggctcattattggtctgttcagggtttctatttcttcctgatttaatctaggagggttgtatgtttccagaagtttat

SEQ ID NO: 33076 - DNA, 616 bp, Homo sapiens
gataagtatcactgctcagtgtaaaagacagcaaatcaggtaggaaatcactattactgaatacatttggcagatctgggtgccaacattgctctatagcttatgatgctaagatgggaaaaagacgcggtgtgtgattgagaatgatccattaattgatcacttgactgatcttcaagcagggaatgaaacaaatacttgaggtaattacaaatattttccaaagattcataataatatgactcatataagaaaaatacataatgcattttaaatatatattaattctgtttttatattatgacatctcattctgttcaattgttcaatttaaatttgaatgttatttgggtggctttattctaacaatttggcaatttactagggtaataaaagaattcattttaactaataagtgctcacaaaaagctttgtatattagagttaagttttattgaatttgaacctggtctggcattacattgctatttaacagataccgcatttatcatgttatattatattcattgcctgtgcattagcctcaccgtttcctcaaatgcactttggaaaagtatttaaaggagtgttcatttggataaaatgcatgtttatt

SEQ ID NO: 33077 - DNA, 316 bp, Homo sapiens
ggaagacaccttggaggccttctcagaatttcttctcagtgcctgtgactcgctgtgtatccccatggtgatggtgggttctcctgagccacgggcaacatgaagcttggggaagagaagaatgtgcaggcgagccaggctcagaggcataaggcagtgactgctcaaaggaactctctgggggcctcagcagtgcaattcttgctgctacctttcctttgttctaaaaataaaatgtagtgtttgattatgaaactaacaggttcatcttaagaaaaaatagaaagcagtaataataaaataataagtgggtaag

SEQ ID NO: 33078 - DNA, 474 bp, Homo sapiens
actccattgagttaataaaggtttaaaataagaatttagtcattactcctatcattctgctgaggtagcctttaaatagttctgtaccttaattggtgcccataaatgaaaaaaaaaaaagcatgtgtgtttgtatgtgtctgtgcctgtacctgctttcagaaaaggctattataatttccttttacaccaatagtgtaagagtaccttttacctgatagtctatttactattctacgttcttgcccattcattgatattaagcaatctcctttttactttagtgtccatttccatgattgccagagtttgagcacctttatgtttattggctgttggattttaattgttaaatgtgtgacttttatagctttaagtttgttttagttaaaagttctgtcttatcccaacttagatttttcatctgaaaacctttttttaaaaaataaaattaagtctttaaccatcaaaaaa

SEQ ID NO: 33079 - DNA, 579 bp, Homo sapiens
agaattttagggatcaaatgagttcctttggatactgtgcctgtttttgactgaacagctgtcttctgacatcctgagtggcttctttagcttagttgtcacctcttctatagcctcatcctgcctcatgacaaaactttacttctgcctgttcattgccttgtgtgtacataataatactgcagttgtccttgtcacaatgattgtaacctatttcttacatgtcacccttactcaactgcgagatgcttgagggtaaagactctctatacgaggtgtctgaagcataaaaggtattcactagattttcagtcagttttttggtattcattaaaaagaacttcattttgcgtttaaactgtttaaatttctaaatcatgaactttgtacttgctcacaaattttaggatagcattatttctgcatggtctaatatttattttcttaaataactgaccaggcatggtgtctcatgcctatgatcccagcactttgggaggctgagacaggagaaaggagaatcacttgagcctaggacttccagaccagcctggtcaacatagggagaccccatctcta

SEQ ID NO: 33080 - DNA, 635 bp, Homo sapiens
ccatggcagacatcattaatggattccagcatacttcctcaccaagttgggacatgtcctcagaagcctgcttagcttcttagccactagcaagaaggcagacttaccttctggggagatgccttctgctgaaagctagtcattctgacagggcaggctggggccctccagaaaagggtcttgaactttggccttggaactaaatctccgtttcctcatctgtaagcgtgtgtggttctcacactgtggtgtgctccggaatcaccaaggggaggtaattaatatgtgattcctagtccccatacccagaactctggaatcagaatctctaggggtggtgcccagaccctatattttaaacatgccccgagggatcatgatcttgccaaagtttgaatatcaccatcttaggccatttcttgatggtttctacaggagagagtccggaacgctgtccttccaaggcaaggcctcaggctcattcagatcaggcctggccactcctctttggagggcggttgaggcccacctgccttgggcttcccaatcctgattcccccactacacccttcccagttctattcccctcaccacacttgctccaataaaactatttatatacagataaaaaaaaa

SEQ ID NO: 33081 - DNA, 310 bp, Homo sapiens
tttttgtagggggaacaggctctcactctgtcgcccaagctggagtgcagtggtgcgatctcgactcactttaccctggacttcctcgggctcaagtgatcctccagcctcagcctcccgggcatctgagactacatttgagtctacaggcgcgcgccactaagcctgagtaattttgttgttgttgttgttgttgttgttgttgtacagacgggggtcccactgtgctgtccaggctggtctcgaacttcttggctcaagcgatgaacccgcttaggcctcccaaagtgctgggatttcataggcgcga

SEQ ID NO: 33082 - DNA, 383 bp, Homo sapiens
ttcacctcatgagacatataaatcaagtaacattcgttattgtgattagaaaagctgcatttacacacgttagccactagatggggacgtgcgattgttacaatgctgaaggtttcccgtatttctttattttttatttggccgctagagggcacgcctgcactgcacttaaagttgactactttcaaggaaagacaaaggaattcttggatttctccattttcctcatcacctgtgcttatcagagaattccaggggcaagctaccctttccaattcatcactaacttataaacaaaattctaaggagtaaggaatgcttcttacttacttcctataacatacgtaagaatgaacgctcaaaataaaagtaatttatttaaa

SEQ ID NO: 33083 - DNA, 707 bp, Homo sapiens
agtctcctcttcacgtcccagcgcgggtgggcgccggcggctcctcttaaccacaggttccagaagtcctctgcagaagtgcttccctctctcatttccaggaccacaattcccagagacttcggcttcacgacgtttctctttttgcccgatctctcccggagctggctgggcttcggccggccagaggcccacagcgacgacgtgatccgtcgtgagcgggtcccagggtttcctcggcggcccttttttctctcccctcggtcgtcccccttgcaggctgtcgcggctggcctgagcggtgacctggcgggtcgcgcctgcgctctgccctgtttcctgcctggctggtggcggcggccattttgttcatcctcctcctcctcctgctcctcctggttggagcgcagtgtccggagcgggctggggggagagagcccgagagcagggttcggtgccttttcctctgtccccagccggtgcccagagccacacaagaaagaacaagaagaaggaaaaaagcatgtggaaagctaggagcgcacgaagaacaaagcaagcaagtgagaagaataacgacgcacaatccagaagcatagaacaacccacaaaaagaattcacgaacaaaagacaactaaacaaatgccccgcgcaacccgagaaaaaaagagcgccaggggagaaacagaatggagtaaaaaacacc

SEQ ID NO: 33084 - DNA, 708 bp, Homo sapiens
agtctcctcttcacgtcccagcgcgggtgggcgccggcggctcctcttaaccacaggttccagaagtcctctgcagaagtgcttccctctctcatttccaggaccacaattcccagagacttcggcttcacgacgtttctctttttgcccgatctctcccggagctggctgggcttcggccggccagaggcccacagcgacgacgtgatccgtcgtgagcgggtcccagggtttcctcggcggcccttttttctctcccctcggtcgtcccccttgcaggctgtcgcggctggcctgagcggtgacctggcgggtcgcgcctgcgctctgccctgtttcctgcctggctggtggcggcggccattttgttcatcctcctcctcctcctgctcctcctggttggagcgcagtgtccggagcgggctggggggagagagcccgagagcagggttcggtgccttttcctctgtccccagccggtgcccagagcccccctccccttcctccccaccccctcccctccccaaccctgccctcccccttgtcccgggatcgctccgtcgcacccaccatgatggaagacgacgggcagccccggactctacacacacaagctaagacatatggttctatcttcagaaaacaatatggtgtttagagcctacatacgtaggtaacctttccagagatgtgacagaagtccttata

SEQ ID NO: 33085 - DNA, 1023 bp, Homo sapiens
gttttctctaggtaatttaacttaaagggacagtaagtatccacatcttccttgctgcttgtttaggattgaggttgacacatacctcttagaaggccggacgtttggtcactggagcagcagtgctcggcgactctccggagtgccccctctggctttccgctcggtcagctgagccgcacaagcagcagtggcgctgcccctacatggggcatgctttgcagggctgaggttttgcagttcccaccattgagggctgtaacatttctctatttctggcttagaatgtgtgtaggatgataattatttattcagcattcattccgctcacgctgtgctccgaccacacaccaggctctgcgtgcggtgctggcacagtctcaggactccgcttctcagctgtagggctcagggtgcagtggagaaggcgcgaaggggctgcccgcggatggatttgttcccttggcctttcactgttgctcctctcactctcttctcctaaactcggcgtagaggagcatcctcaggagaaacaggaagaggcaaagttcactgcaaagttttttttgggttgaacgcctgtaggataagaatagcagagggcacccccagatgagatgcggccgtggtcgagcatcaggatcgtctgcctgcgcccaccagtgtggtccgggagcagggaggtggcagagccaaggccgcgcccctccccgcgggtctcccgtgctgctcgctggcggttggtttcatcagtgccctggcgagtgtcgctggttgcgacggggcactgcccacacagagcgaattctcaggcaggcccccttcctctctctccccggaagctgcttcatggcactccctccctttcccttggccgtgggaacctctaggttgatcactgggtcattggatctgcttttagttagccttgatttttgtctgcattaaacaattaaatgagcttctaataatacggtgttttgaatgtcatacatggcttttcctgttgaaacatctgcagaa

SEQ ID NO: 33086 - DNA, 332 bp, Homo sapiens
tttttgttttactagtgccacagacttgccagtggtaacttatttaccccattcaagataactctgtagttttctttcctaggacttgttgttaaacgtcaaaagacatttttgagctgtatgtttgatcagactgttagcttttctgttttatttcttttaagaacctctgaataaaaaacatctgaaattgaaaaaaaaaagaaattaaatgtgttttgttttaagctgctaagttttgtggcaatttgttatacagcagttgataactaatagtagttccctgcagtctgccttttcattctggtctctctgcacttcagagtgcctgc

SEQ ID NO: 33087 - DNA, 550 bp, Homo sapiens
attttgccttgtaataactatcaatctagccattaagttccaaagaaccttatttccacagcctgtggttttgtggggaggcttttgttttattcagttttggtttgggttcttatagaacagctggaactatagagcctggacttagagaaagagcttggggagacggagggggagatgtcatgttggatgtccttatgacattcggttatatgattgaaaccatgggactggagatgatatcactggtgagaatataaaaagggaagagagaccaggctcagtggctcacgtgtgtaatctcagcactttgggcagccggggtgagtggatcacctgagctcaggagatggagaccagcctgagcaacatggtgaaaccccatctctacaaagatacaaaaattagctgggtgcggtggtgcacacttgtaatcccagctactcgggaggctgaggtgggaggattgcttgagcctgggatttggaggttgcagtgagtggagattgcaccactgcactccagcctgagtgacagagacagactgtct

SEQ ID NO: 33088 - DNA, 329 bp, Homo sapiens
  misc_feature (220)..(220): n is a, c, g, or t
gattctccctcaggaagacccagtgtgaatagtgttacatttataatccataaagagagaagtaacagctctgtggatcaaaaagcctgggttctctgggcaatttgtgaatgtcctggtcaaataaagtcacttcagtaacttgtgagaaggaccaatagaacagataagacagcacacccagcacctcatctaacatttgagtaagagaaaagggctngaaccacaaaataattattttgctatacacttcttccttagatgtgcgtctggtgtcttggagagacttctgttatattacacagtatggttactctgattcacacgcc

SEQ ID NO: 33089 - DNA, 178 bp, Homo sapiens
gctccattccgaaatgatcatttgggggtgatccggggagcccaagctgctaaggtcccacaacttccggacctttgtccttcctggagcgatctttccaggcagcccccggctccgctagatggagaaaatccaattgaaggctgtcagtcgtggaagtgagaagtgctaaaccagg

SEQ ID NO: 33090 - DNA, 219 bp, Homo sapiens
ttttttcattttctcagtcctcctaaaagctgctctaattaaagtcccctgtcactcagctcagctcttagcaaacgagtgggatttggtacagctgtctaggatttcacggatgtgctgcacacttcagccctcatgttagttcagtcatcagcggcgaaagaagctttcctttctcttgccaaaggcagcatctgaagagttctaaaagatgcaaaa

SEQ ID NO: 33091 - DNA, 213 bp, Homo sapiens
gaatataaaaaatgaaggcaattccttgtctgttctgaaaaatgctaaatgttttttcctttccctgagactatgaatttgaccatgtttagagatgaagaactaggcgtgatgtagttccagcgctttgggaggccggggtgagaggatctcttgggcgcgggagtttgagaccagtctgggtgacggggagagactttgtttctacaaaaa

SEQ ID NO: 33092 - DNA, 832 bp, Homo sapiens
tcacatggcaagtggggaccagacaggactgaggccaggactctggtgacaggacccccaggcctctctgccctactgctctctcttcacaccctcctcccccatctttcctggatttccccacatcagcctaccagaaggtagagagaagaagaaaagaagccacatcggagtgtccatgaaaagtccagcctccctgtgggatgtaaaatggtgcaaccaccttgggaaagagtctggcagttcctcaaaatttaaacatcaaattgaacatatgacccagcaattccgctcctaagtatgtccttaagagaggtgaaaacatgtgtctacacatgaacatgtacatgactgttcatagcagtattgttcataagagccaaaaggtggaaacaagccagatgtccatcaaaggttgaatggagaaacacaatgtgatttattcatgtaagaagatattatttgaccgtaagaaaggaagaagtactcacacatgcttcaacatgggtgaaccttacaaacatgctaaggagctagtcacaaagaccacatatgttatgattccatttaaatgaaagcccaaatttggaaaatctatagagatagaaagtaggttagtagttgccaagggctgggtgaaggagagactggggagtaattgccgatggacatggggtctctctttgcaggaatgagaatgctctagaagtagtggtgatgagtacacaacttggtgaacatactagaaaccactgaatcgtctgttttagaagactgacttctatggtgcatgaactctatctcaatacagctgttatttttttaaaaagtc

SEQ ID NO: 33093 - DNA, 977 bp, Homo sapiens
cattgtagaatagcagttcagacacaggccttgatataaccgtgtgagggtgatggcctttcccagccgtggttcctcacctgtaaagggtgaggacagcagcacctgcctcagggggtgagaaagcatggccctcagtagtcggtagtggctgccgtcaggttcacagcgtacctctcccgattttagatgaggaaactgtggcccgaagagtcacatggggttttctggcaaaatccctcttgttttagtgggttctatgtttatactgattcctgggatagataagtctgtcttctccacataatgaaaataaaaaactttaattttatacagtggcagttactttagccactttaaaagttaagaagtgtcagtacagccaagaaaaaaaatcagcaaaactacaggttgggaaaaaatattttccaaaccatatatctaatgatatcttagtatctaaaatagcaaaaaaaataaaaaataaaaaaaagccctactaaaaccaacctactaaaccctactaaaaaacaaccctactaaaaatgggcaaaggacttgaatagatatttttccagagaagacatacaaatggccagttgatgtatgaaaaaatgctcaacatcaccaagcaccagagaaatgcaaattaaaaccccaatgagtatcatctcatctcgctccagttagagtggctgttaccaagaggacaaaagatagtgttggtgaggatgtggagaaaagggaaccctgtgtgctgttggtgggaatgtaaattagtacaactattgtggaaaactctggaggttcctcaaaagtcacaggactaccatgtgctccagcaacctcatttctgggtgtatatccaaagggcatgaaatcagaagctcaaagagacacctggacccccatgttcattgcagcgttattcacaatacccgagatatggaaacaacctaaaaatttttggtgtttaa

SEQ ID NO: 33094 - DNA, 1280 bp, Homo sapiens
tttttctttttacaaaaaacaattgttatttgtgtacttttaaaacctcacagtaatattttcacactaccttcttggctgaaagttcacactcggaattccagagcagtccatggccaggccactgggctccccttgctctctccttggctttggtaaccactggccccagggactcagcctgctttcctatccatcccctcagtagctgtcaccatgcaggttaccccttctgtttcttctaccactaactccatgtctgactgcaagtgaaaggaacagaagcccaaaccttttgggttttaaggagtttattgctaatctgtaaaacagaaagagacaggagataagcatgacaaaatatagggaagaaatgacttttgcctaaacttccaaattgtgtacaattgaagcctctgctttatagctcttagcacacctctcaaataagaaggcagtactgggaaggctctgaacctgtggcagaaccactgatagctgtggagctattccaaggagtctgggaatcagggggattatcaagatcattgttagaataaattaatcttactgtatatatagcagaagttttcaagcatatgtaaatgctactaataaccaaataattacaccttgtttttctttaaactgtaactctcaagtatgtctctacataattttttgatggtagtgtctgcatgctcaaaaagcttgaaaacactactggagaagaaggtctcgggagtgtgatgaaatacgtttacatggcagcttcatcatttaattggtgaaagtgactatgtgtcttaaactctctgagcctcagtttgcacatccaaaagcaaggatataattccatgaacctttccacctcaagtccacaaggcagaatagcaagatgttaactgccactctgaggaccaccaaataaaaggacaatttattaggccacttgccagcatggacacaatcgactcttggcatttcttattatccacagaaaaattaaaagtataaatgtagaacaaaattatcgtgttttttttaatagtaacatgtaagatcaatctttgtctttaaaataccgtgtatctcattcttggaaagcgtcaaaatgaaaatggtatagtaagttttatctacaacttgaattaaaattattcttgaaatatgttctgaatggttagatgaaatggtaattaaatacaaatagagataatcatatactctctctccataaggctcccacctccttcaatgaagtctagttcacctaaaat

SEQ ID NO: 33095 - DNA, 375 bp, Homo sapiens
gttcgacgtgaaaggagcataaaccaggcttatcccaggtgaacctagaggtacggtgactctaattatagttcatcctttgcccctatctatcaggtggctggacacataattttctactgctactgctctggaaggagaaaaagaagagaataaaagatattggttaggcacccactattcctttccatttcattctcatttaattctgcccaaaagccaatgtacccaggcttttgggcaaaattaaatgagataaatgtacatgaaatcgctttgtaatctgcaatgtttcaaagctatgtttataaataatatcatcataatttagcacaaataagtacatgtgatggctagaaggaacccagtttggat

SEQ ID NO: 33096 - DNA, 419 bp, Homo sapiens
aacactatgctggaaaatcatgatcagaagaagcccagagactatactgagatttatgtcccataccaaaatgaaatctctggatcaactcttgattcctgatcaacacatacaccatcttcaccctacctgcaatggctctaggaatttatgcaactgcctacaaaataatatcaccaaatcattatgtctttgctataattagtttatcataagatgctccagtccatctgtaggattactagatgaccactcaatttgttcaatatgaaatgctttctctaaaggatatttaaggtctatctttattaagttcagaagagagtaaaccaagaaggattaagtgtagctgattgatgttttaaattcctggaaatttcccttggaaactccaaaattttacttctcagaacctaagt

SEQ ID NO: 33097 - DNA, 951 bp, Homo sapiens
gtgactctactcagaaaagcttagtaaagacttgttggttaaattggcacaaacaagacagagtagattatgagttctaaacttgggacatggctctgtctccactaggcaatgggtctgctctcagtggggcaaggaaggaatatttagagatttccccatccccatggctccagacttctaggagaaagattcaggtcaaaaagccttaaactgtgtgtcttcaactgatggtctatataagaggttcaaattttaagaaacgtttacgaatctctactatttaccaagccttgcactagccatgctagacacagtagctcaacacactcacaactctgtgacatcctttttctgatctgtaagatcagaatcaggcaaggtacttcatcccccctagacttactcctacaaatctggagtcacactgaccctgtgggattatggtcacacacatcagacgtgtgaccctgggactttcggttgaactcttggaacctcagctttccataacagatggttatgaggattaaatgaaagaccacattgatagaaaaagcttagcattgggcctgacatataatagatgtttaataaacacaagtttgttccttccctcccattccagatccggtgtttttgagaactgtgttacggtcaggtgatgataactggggcatgtctgctgccctgaataaataagagcttatctttctatctcgagtccactctaagtggtcagaacttgagtagcactaaacatatacctgttgactgactggctcatattgggtgttgtggaaggagcacatagcacctgggagcccagaggcctgggtggaagctctggctcctaccctagcttgttgaatggtcttgacctctctggccctcagatttctcatctgtaaaacaagcggaataaatcatacattctgattctaaaaaaaa

SEQ ID NO: 33098 - DNA, 199 bp, Homo sapiens
  misc_feature (9)..(9): n is a, c, g, or t
  misc_feature (33)..(33): n is a, c, g, or t
  misc_feature (49)..(49): n is a, c, g, or t
tgggggggnggtttgggttttttgggtcttggngggaaaaaaagggggnggaaagcacatagcacctgggagcccagaggcctgggtggaagctctggctcctaccctagcttgttgaatggtcttgacctctctggccctcagatttctcatctgtaaaacaagcggaataaatcatacattctgattctaaaaaaaa

SEQ ID NO: 33099 - DNA, 364 bp, Homo sapiens
ctaaagcaacttctgtcttataatcagccaagtctaggtggcaaattaaagaaaaatgtagctgtttctatgccaaggtttttagatgaagacgacataatctattgtggtggtgattaaactttttggttttgggaccctttactcttagaagcttttgaagtccctaaattgtttaggaccccaaagaacattgttttatgtacgatatctatccacacttactgtattaggaattaaagctaagtaatatttaacatacttaactcattaaaaataagccggtagcaaacctattacatgttaacataaaatgaaatgttttgaatcatgacttctccaaaacaaaaaaaaagaaattgca

SEQ ID NO: 33100 - DNA, 450 bp, Homo sapiens
ttttttttttgacatggagtctcgctcttgttgcccaggctgtagtacagtggcacgatctcggctcattgcagcctctgcctcccgggttcaagtgattctcctgcctcagccccccaagtagctgggactacaggtgcataccaccatgcccaactaattttgtatttttggtagagacggggtttctccatgttggtcaggctggtctcaaactcccgacctcaggtgatcggcccgccttggcctcccaaagtgctgggattacaggcgtgagtcaccgcgcccagcgaatattttccacatacctgtcaaaaggtttttccagacctagccttccataatgctttaagtgtttttgaaattgcacataatgctcatcattgtcaagccaacaacatttacttagcccctactaagccctggtcaccgtgcaacttgcctgggatt

SEQ ID NO: 33101 - DNA, 711 bp, Homo sapiens
agatgtacaaaactgaataagaacataacttagggtattttgtctgttaaactttagtcatgacatgttggggttggtttcgagatctttttccagcaccatggaaaacacaagggacagagagaaatgttggaattcgcagtgagatcattgtgttacctgttccgatttaattgctcctcaaattaactacatttttttctgtacatcttttgacctaagttgtttgtgaaggattaagtcgttgcctccctttccttggttcccaacagtatggcaggggcttctcacagagtccttttggaaactgtaaaactatcacccttgtattaaagcattggatattcttcattgcaaaatgccccataattttcaagttctacattaatttcaacaacatggtatatgaaatgaatttttttcatgaaaatattttcaaatatttaccaaaatgttaataattatttctctaggggacaaaatgtattttaaaaactacttgagaattttaatattccctaatctctgagcgaagatgaaggcttgggaagcatgaagtcatattcattcactgcttatttcaaaaccgtgtgaaagggatggtgaattcatccttcacataggcaaagtcacttaaaatgatgtattttcaaaattcactttaggaaagaattggcagtattccatattcagagtcaaaataaactgaga

SEQ ID NO: 33102 - DNA, 973 bp, Homo sapiens
gccatctctttactgaccagcttccttatgacttttggttgctgctaaatttgcttgtagccaccttggcttctcttgtagccctgtgtcagcctatggatttatctcttatagctaattggcttagtctttatctcctttggttctcataagattaattccaatgaacatttgttgtatacctaatgtatgtcagatcctatgattgatgtatagatagaatttccatgatatgttaaatatgtacctctttagtggcaggtgaggtgatttaattaaaagtattttttttcttatgatgaatgtttaaaaaatttttcttttcctctccattttattgtagtatttgataaattcaaaatatatgtaaaacatatgcaagctgtatagcagaacaataaaatgaacacctatgaattcaccactcaatccaataatcaaaatgaccagtattgaatgtgcttacttccagaggtgactaccatcctgaattgtgtatattatgccttgtttttaaaaataattttatcagatatgtatacatccctcaaaaatgtattgtatggtttctgttgtttttgagtggaaaaaatcatattgggtatagtttcctgggacttgcttatttcacttgatgttatgtttctgagttactaatattgggtatagatgtaagtcattaattttcactgctgtgtaatattccatgtgtgaatataacacagtgtatgcattcttctgttaatgggcattttggttgtttctaggttttgctgttatgaagttatatactttttggttcacagttgtaagaatttttctaattttcacactggggtatatgagccccagaggagtaatgaagatttgctaaggaatgtgtgggtacaaatgatgttaatgaatcagtttctagatcattacattccataggtactctttcctaaaaatggtaatgcctgaggcctcctgc

SEQ ID NO: 33103 - DNA, 474 bp, Homo sapiens
tctgtctcaaaaaaaaaaaaaaaaaaggaaagaaagaagtaagtccaaagcatgccaagatgaaaaagtgcttctctcatccaagttttcagtgctgaaaaaaaatgaagagggtttatgtaggcacacccacctttgaaatgacagccagtgcatttgtactgctgctgttagtgcttgtaatcttgaaggcaaagtagtttttgctattcaactttatatatatatacacacacacacattttttttctttttttttttgtttttaagagacagggtctctatctcctgacctcaggtgatctatttgaagtggttttcattgtgttgtaattgaagagctttggcaaccctcaaaatgctgattgaacaccttgtcctttcttgcaaatttcattccttacatgtaagagagaggtttgtaactacttatgcatgggtttactgcaggttgtactctactcaaaaaaaaag

SEQ ID NO: 33104 - DNA, 497 bp, Homo sapiens
gaccaggatttctggctgatgatttctttctgatttccttctcaaatttggatatggctccttgaggcctggcaagcagatgcttaatatttgttaaatgggaaagttttgtacaggggagtgatgtgaactggggtacagggaagaatagactgtagggcggagtgtagcgtggaagtagggaagttagagggctgttacgtaagtctagtggggaaatggtgggaacttaaactgtggtcatggtagagggagagagaagtggccagattcgcttatactgggtaaaacttaaactatcttagccaatatatctttaaaaaaaataggaacagagtaattacaatgaaaactctaattctgcaaagaggagaatggatgaaaaatagcacacagttattgttgatctgtagcataatttatgtcctgctaggcaggaatatggaagactccttgcctggcagtagaatgagttccttggcgaggtaactgggaaa

SEQ ID NO: 33105 - DNA, 1086 bp, Homo sapiens
gagtttgagaccagcctgaccaacatggtgaagccccgtctctactaaaattacaaagattagctgggcgtggtggcgggcacctgtggtcccggctactcaggaggctgaggcaggagaactgcttgaattgcttgaacctgggaggcgaaggttgtagtgagcagagatcgtgccactacactccagcctaggtgacagagactctgtctcaaaaaacaaacaaaaaaacaaaacaaaaaaaaacagttggacttgaatgtttttaactgggccccatcactcctttttgaatagtttgtgttgccagtcacaccctgtagggtttgtagcctgacttttcaagcagtgtggtggtagggagtccaaggaagttgagtggactgttttggacgtctttggaggaattggtgtggatgggtaatgacttagtatttcattgaaatgttcatttctctcgagttatttctggcagaggatagctctagtagtccccttctcttttccaaacacctttacctttgtcctaatgaaagtacttagttatctctttgggcagatgctatttctctagctaaattaacatgtcatcattcacagttggaaaactgtggctgtgctttttcatttttagagaaatgtttttaaaatacagaaaagaggctgggcgcggtggctcacacctgtaatcccagcactttgggaggccgaggtgggtgagtcacttgaggtcaggagtttaagaccagcctggccaacatggtgaaaccctgtctctactgaaaatacaaatatttagctgggcatggtggcgcgcacctgtaatcccagctacttgggaggctaagggaggagaatcgcttgaaagtgggaggcggaggttgcagtgagctgagattgcaccgctgcactccagcctgggcaacagagagagactccagctcagaaaaaataaaaataaaatacagaaaagaaagagaataactgtcacaaacccatatatccatcactgagaagtggcaattgtaaatattttgtaatttgctttaatttttttaaataaaagaaataaagtttattcacagc

SEQ ID NO: 33106 - DNA, 901 bp, Homo sapiens
caagcataaaatcagccttcaagggcttcttcatctctctccaggctgtccttagtcatcaggtctcacctggacaacagaggcccttatctgatggctgccctggtccagctgttaaccccttctaacctgtcctgcgaaaccaaaagaccaaactaaaaaaccttattaaacaaacacacagtgtcctcctactgaacaaaaggcaccagttctgatcccatggatacataaataggacactgactgggcagctcccatgcaggcacccttcccagggctgcacacatcctaggaggaattctcacaagccgctgcagggctgctaccctcatgatcttcattttatagatgaggaggttatgatgtgattctgggctgactcatgcccttataaatgcacaatgcctgaatttcgggctctcctgcctggtttcattcaatccaattgataattttctgccgggattgcagggctctctactaactgtgcttatgtccctcccacatctttgctgctgcacgcctccttgacaccaccttcccggcccctcctcttgtcatataacagtctttgcctttgaggcctactttctacaataagccctgctggtgcccctcctacatggccgggctccatgtccttcagtcagaccagtgtaagccctgaactgcgcacaaatcttctcacaggtgtcatttttcttctccaattagccatgtgctttcaaaggcagcaacgttatcttaacttttggtacgtcctatggcactcagcacggtgctgggcaaaaaaatgctccaaagtggtgactaagagaaaaagtattgaacacgttttcctacttctttctccttttatgtccccagctccttttgtgcatagtaataaattgccaac

SEQ ID NO: 33107 - DNA, 278 bp, Homo sapiens
tgagacagggtcttcctttgtcacccaggctggggtaccgtggcacaatcacatctcactgcagccttgacctcctggactccagtgacgtcctgcctgggcctctcaaagtgctggaattacaggtgtgagccaccatacctggtctcaacttgaaatttattttagctcataacttctactttagaagatgttttaaggccaggcgcgatggctcacacctataatcccagcactttgggaggctgaggcaggtggatcacctgaggtcaggaatt

SEQ ID NO: 33108 - DNA, 608 bp, Homo sapiens
gcaacatagtgagatctcatctcaacaaaaaatttaaaaatagctgggcatggtggcacatgcctatagtaccagttattgaggagactgaggcagaaggattgcttatttcctgtttatcttgtacttttacctgttggttgtagattgatttcaggtgacatttgaataaacccaataaagaagccaggaccctccacgtcttagaagccacgttaggctcattttgtgtgtatttctacactggtagacactgtaatgctctaagagtgctgcagctgtaagagaaatcacctggtctcatataatatagttccttaacctgataagctactactagtgtagtgttgtttatgcaccttaaaaaaaaaaaaaaaaaactgagcacgctttttatcttcattcaaagtgtttgcacctgtttttgtttggtttggtttggtttggtttttgacagtctcactgtctcccaggctggagtgctggagtgcaggagtggagtgagccaagatcgcaccattgcactccatcctgggcgacaaaaatgaaacaccgtctcaaaaaaaataaaaataataaaataaaatgcctttttgttgttgatgtaa

SEQ ID NO: 33109 - DNA, 402 bp, Homo sapiens
ccagtatttaatctgagcacttaaatcattttattaaagtgccaaaggcaatttgatatacctgttatccagcaaagaaacacaaggcaattattagtaaattttaacagattaatgcatttatttggtaggttttataatggctctatttcttgagtttgtatatatttgagaattatgttataaatatgttattatttcattgtctttgctatctatttgaaccaattttttagtaattgttaccgctcttttacttttttttttgttcctttgagactgagtctcgctccgtcgtccaggctggagtgcagtagcgcagtctcagcttactgcaacctccacctctcgggatcaagcagttctcctgcctcaccctcccgagtagctgggattacaggt

SEQ ID NO: 33110 - DNA, 1126 bp, Homo sapiens
aatttttgcatttttttgtagagacaaggcttcaccatgttgcccaagcggtctccaactcctgacctcaagtcatctgtccacctcggcctcctgaagtgctgggatcacagtcatgagccactgtgcccggcctcattgtcactgttaacacaggttttcatctccctattcctcattcttgacgttttctcaatcctcaaatctcatccatcatttctttgcaactgctgttctttgagatgtctgccaccaccataatacttacctttactactctcattccaggtaagtggaaaaggaaaacaattcttaaagtagctaagaagtactgttccagtcatgaatctggtatttaaaaaatccacctttcacagttgtttaagagccctctcttgaatgtcaataatccttaccacagctccctcctctgttctctctccctgttaagatgtcataattcactgataacaactaagctagccattgtgaactctttcccccactctcttcatctaatcctgtaaccaattccaaccagttctcctaactctctctccaagctgttccttcttgataattcacattatttttgcctatgcaaataccttttgaaagagtagtagcagctgagcacggtggctaacacttgtaatctcagcgctttgggaggccgaggcaggcaggagtttgcgaccagtttggccaacacggtgaaaccctgtctctactaaaaatacaaaaaattagctgggcgtggaggcaggagaatcgcttgaacctgggaggcagaggctgcagtgagccgagattgcgccactgcactccagcctcagtgagactccaactcaaaaaaaaaaaaaaaaaagagagtagcatgttacattttttccacaaaccattctccaacacttctgcatccctttaaaaagaaactcaaatgtggcaatctcccctcagtccaccagtcctccagtaaggtccattagttaccaatgactacccctgagccccactgtcaaatccattccctgacaatcagttttttcttttcaaaactctgtactcacttggcgtctgaaaaattattctactctaacttgtcccacttctgcttaggatcact

SEQ ID NO: 33111 - DNA, 471 bp, Homo sapiens
atactgtacatttcctcttacttaaaattctagacatacaaactaatcaaaattatagcaaggaaatgagtagttgcctgtgatctggggggaagacttgcaggccatgagttaacttgattatagtcacaagtatatgcatatgtcaaaacttaaccaaaccatatattttaaatatgtgcagttcctgaaacaaatgaaggctacatacttctcttccgtagtggaaagttagtaggataatatttaaaattgaaaagtcaagaagtaaaaatattaatgtacaattgaaggatataaagtttaaataccaaaagaatcagctaaaagttgacagcatttttttttttttttttttttttttgtagaaagcagaaactggaactgacataaaggatttctggctttcatttaaaaaaaaaaaagataaaagaagtttcctctttaaactatgtgtatatatcactttgg

SEQ ID NO: 33112 - DNA, 495 bp, Homo sapiens
agaaagtggaggcgtggaaagagaagctggtgaccacagtgcaaaatatgcagcagggagcagcccaatcccaagaggaactttgtcaacttcaggcaaagcttttaattgacagtgatgacgattctcagtgtcagatgaaccacagagatctgatccaaaaatatgaagggagtgaaactcaactcaaaaacctggggcaggagttagcacacacgcagcacagcatcaggcagctctgtgacggcaaagacagtctcttcccacagctggatattttaccccagactccccagtagaagcactttcttcacacaccgcagaatctcttcatgcaagtgagtctgctctatcaagtgagtcttctaaattgctccagcaagagatcgagaagctgagaaaatcactgcaggaaaaagatgcgaccattagatccctccaaggagacaatcaaagactgtatgattccattgctgccatctcagaacgagaaag

SEQ ID NO: 33113 - DNA, 412 bp, Homo sapiens
ctcactgcaacctccacctgccgggttcaagtaattctcctgcctcatcctcctgagtagctaggattataggagtgtaccaccaagcctggctaatttttgtatttttagtggagacggggtttcaccatgttgttcaggctggtctcgaactcctgatctcgtgaccccccgcctctgcctcccaaagtgctgggattacaggtgtgagccactgcacaggcccttcttaaaacaacattaaattagttttactcattcaatgctgttattagtttggggcattttagtcttccattggattcagaaataaacaaaataaagatttttagcacttttaaaccattgctttgctaatacctttatactttaacgatgattataatatattcactaataattttattcttaa

SEQ ID NO: 33114 - DNA, 2047 bp, Homo sapiens
gtggcactcacagcacaggcttgttatgggtctagcagcctctgtggcatctcctgtcacattgggaaaatgaagaattccaggacatgggcttggagggcgccggtggagctatttcttctctgtgctgccctgggctgtctcagtttgcctggctccagaggtgaaaggccacattcctttgggtcaaatgcagtcaacaagagctttgctaagagcagacagatgcggagtgtggatgttaccctgatgcccattgattgtgagctgtctagttggtcctcttggaccacatgtgacccctgtcagaagaaaaggtacaggtatgcctacttgctccagccctctcagttccatggggaaccgtgcaacttctctgacaaggaagtcgaagactgtgttaccaacagaccatgcagaagtcaagtgcgatgtgaaggctttgtgtgtgcacagacaggaaggtgtgtaaaccgcagacttctttgcaatggggacaatgactgtggagaccagtcagatgaagcaaactgtagaaggatttataaaaaatgtcagcatgaaatggaccaatactggggaattggcagtctggccagtgggataaatttgttcacaaacagttttgagggcccagttcttgatcacaggtattatgcaggtggatgctccccgcattacatcctgaacacgaggtttaggaagccctacaatgtggaaagctacacgccacagacccaaggcaaatacgaattcatattaaaagagtatgaatcatactcagattttgaacgcaatgtcacagagaaaatggcaagcaagtctggtttcagttttggttttaaaatacctggaatatttgaacttggcatcagtagtcaaagtgatcgaggcaaacactatattaggagaaccaaacgattctctcatactaaaagcgtatttctgcatgcacgctctgaccttgaagtagcacattacaagctgaaacccagaagcctcatgctccattacgagttccttcagagagttaagcggctgcccctggagtacagctacggggaatacagagatctcttccgtgattttgggacccactacatcacagaggctgtgcttgggggcatttatgaatacaccctcgttatgaacaaagaggccatggagagaggagattatactcttaacaacgtccatgcctgtgccaaaaatgattttaaaattggtggtgccattgaagaggtctacgtcagtctgggtgtgtctgtaggcaaatgcagaggtattctgaatgaaataaaagacagaaacaagagggacaccatggtggaggacttggtggtcctggtacgaggaggggcaagtgagcacatcaccaccctggcataccaggagctgccgacggcggacctgatgcaggagtggggagacgctgtgcagtacaacccagccatcatcaaagttaaggtggagcctctgtatgaactagtgacagccacagattttgcctattccagcacagtgaggcagaacatgaagcaggcactggaggagttccagaaggaagttagttcctgccactgtgctccctgccaaggaaatggagtccctgtcctgaaaggatcacgctgtgactgcatctgtcctgttggatcccaaggcctagcctgtgaggtctcctatcggaagaatacccccattgatgggaagtggaattgctggtcaaattggtcttcatgctctggaagacgtaagacaagacaaaggcagtgtaacaatccacctcctcaaaatgggggtagcccctgttcaggccctgcttcagaaacacttgactgctcctagcagatgatacagcagtgggctacatacaatgagagccctgagccctcaagaactcacgccagctcagccctacaccagtttccacctggagttcatgcaagggcaaaaggcagtgccatgcaagctgtttaaaataaagatgttaccttgtaaaatgcaagttgatttaaataaatactgagttaaaggcttaagcatcttt

SEQ ID NO: 33115 - DNA, 469 bp, Homo sapiens
  misc_feature (21)..(21): n is a, c, g, or t
  misc_feature (31)..(31): n is a, c, g, or t
  misc_feature (59)..(59): n is a, c, g, or t
  misc_feature (100)..(100): n is a, c, g, or t
ctgagagtcaagagtagtctncctggtcctncaagaatgagtcctttctaaagatcacnttggctgattttcctgtggatccaaggcttagctgtaggtntcctatggaagaatacccccattgatgggaagtggaattgctggtcaaattggtcttcatgctctggaagacgtaagacaagacaaaggcagtgtaacaatccacctcctcaaaatgggggtagcccctgttcaggccctgcttcagaaacacttgactgctcctagcagatgatacagcagtgggctacatacaatgagagccctgagccctcaagaactcacgccagctcagccctacaccagtttccacctggagttcatgcaagggcaaaaggcagtgccatgcaagctgtttaaaataaagatgttaccttgtaaaatgcaagttgatttaaataaatactgagttaaaggcttaagcatcttt

SEQ ID NO: 33116 - DNA, 1993 bp, Homo sapiens
gtggcactcacagcacaggcttgttatgggtctagcagcctctgtggcatctcctgtcacattgggaaaatgaagaattccaggacatgggcttggagggcgccggtggagctatttcttctctgtgctgccctgggctgtctcagtttgcctggctccagaggtgaaaggccacattcctttgggtcaaatgcagtcaacaagagctttgctaagagcagacagatgcggagtgtggatgttaccctgatgcccattgattgtgagctgtctagttggtcctcttggaccacatgtgacccctgtcagaagaaaaggtacaggtatgcctacttgctccagccctctcagttccatggggaaccgtgcaacttctctgacaaggaagtcgaagactgtgttaccaacagaccatgcagaagtcaagtgcgatgtgaaggctttgtgtgtgcacagacaggaaggtgtgtaaaccgcagacttctttgcaatggggacaatgactgtggagaccagtcagatgaagcaaactgtagaaggatttataaaaaatgtcagcatgaaatggaccaatactggggaattggcagtctggccagtgggataaatttgttcacaaacagttttgagggcccagttcttgatcacaggtattatgcaggtggatgctccccgcattacatcctgaacacgaggtttaggaagccctacaatgtggaaagctacacgccacagacccaaggcaaatacgaattcatattaaaagagtatgaatcatactcagattttgaacgcaatgtcacagagaaaatggcaagcaagtctggtttcagttttggttttaaaatacctggaatatttgaacttggcatcagtagtcaaagtgatcgaggcaaacactatattaggagaaccaaacgattctctcatactaaaagcgtatttctgcatgcacgctctgaccttgaagtagcacattacaagctgaaacccagaagcctcatgctccattacgagttccttcagagagttaagcggctgcccctggagtacagctacggggaatacagagatctcttccgtgattttgggacccactacatcacagaggctgtgcttgggggcatttatgaatacaccctcgttatgaacaaagaggccatggagagaggagattatactcttaacaacgtccatgcctgtgccaaaaatgattttaaaattggtggtgccattgaagaggtctacgtcagtctgggtgtgtctgtaggcaaatgcagaggtattctgaatgaaataaaaggggcaagtgagcacatcaccaccctggcataccaggagctgccgacggcggacctgatgcaggagtggggagacgctgtgcagtacaacccagccatcatcaaagttaaggtggagcctctgtatgaactagtgacagccacagattttgcctattccagcacagtgaggcagaacatgaagcaggcactggaggagttccagaaggaagttagttcctgccactgtgctccctgccaaggaaatggagtccctgtcctgaaaggatcacgctgtgactgcatctgtcctgttggatcccaaggcctagcctgtgaggtctcctatcggaagaatacccccattgatgggaagtggaattgctggtcaaattggtcttcatgctctggaagacgtaagacaagacaaaggcagtgtaacaatccacctcctcaaaatgggggtagcccctgttcaggccctgcttcagaaacacttgactgctcctagcagatgatacagcagtgggctacatacaatgagagccctgagccctcaagaactcacgccagctcagccctacaccagtttccacctggagttcatgcaagggcaaaaggcagtgccatgcaagctgtttaaaataaagatgttaccttgtaaaatgcaagttgatttaaataaatactgagttaaaggcttaagcatcttt

SEQ ID NO: 33117 - DNA, 1993 bp, Homo sapiens
gtggcactcacagcacaggcttgttatgggtctagcagcctctgtggcatctcctgtcacattgggaaaatgaagaattccaggacatgggcttggagggcgccggtggagctatttcttctctgtgctgccctgggctgtctcagtttgcctggctccagaggtgaaaggccacattcctttgggtcaaatgcagtcaacaagagctttgctaagagcagacagatgcggagtgtggatgttaccctgatgcccattgattgtgagctgtctagttggtcctcttggaccacatgtgacccctgtcagaagaaaaggtacaggtatgcctacttgctccagccctctcagttccatggggaaccgtgcaacttctctgacaaggaagtcgaagactgtgttaccaacagaccatgcagaagtcaagtgcgatgtgaaggctttgtgtgtgcacagacaggaaggtgtgtaaaccgcagacttctttgcaatggggacaatgactgtggagaccagtcagatgaagcaaactgtagaaggatttataagataaatttgttcacaaacagttttgagggcccagttcttgatcacaggtattatgcaggtggatgctccccgcattacatcctgaacacgaggtttaggaagccctacaatgtggaaagctacacgccacagacccaaggcaaatacgaattcatattaaaagagtatgaatcatactcagattttgaacgcaatgtcacagagaaaatggcaagcaagtctggtttcagttttggttttaaaatacctggaatatttgaacttggcatcagtagtcaaagtgatcgaggcaaacactatattaggagaaccaaacgattctctcatactaaaagcgtatttctgcatgcacgctctgaccttgaagtagcacattacaagctgaaacccagaagcctcatgctccattacgagttccttcagagagttaagcggctgcccctggagtacagctacggggaatacagagatctcttccgtgattttgggacccactacatcacagaggctgtgcttgggggcatttatgaatacaccctcgttatgaacaaagaggccatggagagaggagattatactcttaacaacgtccatgcctgtgccaaaaatgattttaaaattggtggtgccattgaagaggtctacgtcagtctgggtgtgtctgtaggcaaatgcagaggtattctgaatgaaataaaagacagaaacaagagggacaccatggtggaggacttggtggtcctggtacgaggaggggcaagtgagcacatcaccaccctggcataccaggagctgccgacggcggacctgatgcaggagtggggagacgctgtgcagtacaacccagccatcatcaaagttaaggtggagcctctgtatgaactagtgacagccacagattttgcctattccagcacagtgaggcagaacatgaagcaggcactggaggagttccagaaggaagttagttcctgccactgtgctccctgccaaggaaatggagtccctgtcctgaaaggatcacgctgtgactgcatctgtcctgttggatcccaaggcctagcctgtgaggtctcctatcggaagaatacccccattgatgggaagtggaattgctggtcaaattggtcttcatgctctggaagacgtaagacaagacaaaggcagtgtaacaatccacctcctcaaaatgggggtagcccctgttcaggccctgcttcagaaacacttgactgctcctagcagatgatacagcagtgggctacatacaatgagagccctgagccctcaagaactcacgccagctcagccctacaccagtttccacctggagttcatgcaagggcaaaaggcagtgccatgcaagctgtttaaaataaagatgttaccttgtaaaatgcaagttgatttaaataaatactgagttaaaggcttaagcatcttt

SEQ ID NO: 33118 - DNA, 1698 bp, Homo sapiens
gtttcttcatgctgctttctcagtacaggtatgcctacttgctccagccctctcagttccatggggaaccgtgcaacttctctgacaaggaagtcgaagactgtgttaccaacagaccatgcagaagtcaagtgcgatgtgaaggctttgtgtgtgcacagacaggaaggtgtgtaaaccgcagacttctttgcaatggggacaatgactgtggagaccagtcagatgaagcaaactgtagaaggatttataagataaatttgttcacaaacagttttgagggcccagttcttgatcacaggtattatgcaggtggatgctccccgcattacatcctgaacacgaggtttaggaagccctacaatgtggaaagctacacgccacagacccaaggcaaatacgaattcatattaaaagagtatgaatcatactcagattttgaacgcaatgtcacagagaaaatggcaagcaagtctggtttcagttttggttttaaaatacctggaatatttgaacttggcatcagtagtcaaagtgatcgaggcaaacactatattaggagaaccaaacgattctctcatactaaaagcgtatttctgcatgcacgctctgaccttgaagtagcacattacaagctgaaacccagaagcctcatgctccattacgagttccttcagagagttaagcggctgcccctggagtacagctacggggaatacagagatctcttccgtgattttgggacccactacatcacagaggctgtgcttgggggcatttatgaatacaccctcgttatgaacaaagaggccatggagagaggagattatactcttaacaacgtccatgcctgtgccaaaaatgattttaaaattggtggtgccattgaagaggtctacgtcagtctgggtgtgtctgtaggcaaatgcagaggtattctgaatgaaataaaagacagaaacaagagggacaccatggtggaggacttggtggtcctggtacgaggaggggcaagtgagcacatcaccaccctggcataccaggagctgccgacggcggacctgatgcaggagtggggagacgctgtgcagtacaacccagccatcatcaaagttaaggtggagcctctgtatgaactagtgacagccacagattttgcctattccagcacagtgaggcagaacatgaagcaggcactggaggagttccagaaggaagttagttcctgccactgtgctccctgccaaggaaatggagtccctgtcctgaaaggatcacgctgtgactgcatctgtcctgttggatcccaaggcctagcctgtgaggtctcctatcggaagaatacccccattgatgggaagtggaattgctggtcaaattggtcttcatgctctggaagacgtaagacaagacaaaggcagtgtaacaatccacctcctcaaaatgggggtagcccctgttcaggccctgcttcagaaacacttgactgctcctagcagatgatacagcagtgggctacatacaatgagagccctgagccctcaagaactcacgccagctcagccctacaccagtttccacctggagttcatgcaagggcaaaaggcagtgccatgcaagctgtttaaaataaagatgttaccttgtaaaatgcaagttgatttaaataaatactgagttaaaggcttaagcatcttt

SEQ ID NO: 33119 - DNA, 1752 bp, Homo sapiens
gtttcttcatgctgctttctcagtacaggtatgcctacttgctccagccctctcagttccatggggaaccgtgcaacttctctgacaaggaagtcgaagactgtgttaccaacagaccatgcagaagtcaagtgcgatgtgaaggctttgtgtgtgcacagacaggaaggtgtgtaaaccgcagacttctttgcaatggggacaatgactgtggagaccagtcagatgaagcaaactgtagaaggatttataaaaaatgtcagcatgaaatggaccaatactggggaattggcagtctggccagtgggataaatttgttcacaaacagttttgagggcccagttcttgatcacaggtattatgcaggtggatgctccccgcattacatcctgaacacgaggtttaggaagccctacaatgtggaaagctacacgccacagacccaaggcaaatacgaattcatattaaaagagtatgaatcatactcagattttgaacgcaatgtcacagagaaaatggcaagcaagtctggtttcagttttggttttaaaatacctggaatatttgaacttggcatcagtagtcaaagtgatcgaggcaaacactatattaggagaaccaaacgattctctcatactaaaagcgtatttctgcatgcacgctctgaccttgaagtagcacattacaagctgaaacccagaagcctcatgctccattacgagttccttcagagagttaagcggctgcccctggagtacagctacggggaatacagagatctcttccgtgattttgggacccactacatcacagaggctgtgcttgggggcatttatgaatacaccctcgttatgaacaaagaggccatggagagaggagattatactcttaacaacgtccatgcctgtgccaaaaatgattttaaaattggtggtgccattgaagaggtctacgtcagtctgggtgtgtctgtaggcaaatgcagaggtattctgaatgaaataaaagacagaaacaagagggacaccatggtggaggacttggtggtcctggtacgaggaggggcaagtgagcacatcaccaccctggcataccaggagctgccgacggcggacctgatgcaggagtggggagacgctgtgcagtacaacccagccatcatcaaagttaaggtggagcctctgtatgaactagtgacagccacagattttgcctattccagcacagtgaggcagaacatgaagcaggcactggaggagttccagaaggaagttagttcctgccactgtgctccctgccaaggaaatggagtccctgtcctgaaaggatcacgctgtgactgcatctgtcctgttggatcccaaggcctagcctgtgaggtctcctatcggaagaatacccccattgatgggaagtggaattgctggtcaaattggtcttcatgctctggaagacgtaagacaagacaaaggcagtgtaacaatccacctcctcaaaatgggggtagcccctgttcaggccctgcttcagaaacacttgactgctcctagcagatgatacagcagtgggctacatacaatgagagccctgagccctcaagaactcacgccagctcagccctacaccagtttccacctggagttcatgcaagggcaaaaggcagtgccatgcaagctgtttaaaataaagatgttaccttgtaaaatgcaagttgatttaaataaatactgagttaaaggcttaagcatcttt

SEQ ID NO: 33120 - DNA, 1751 bp, Homo sapiens
agacaagtcagagataaaacagtgactgggtggaagggcattctgggcgcagggaacagtacctaccacagaaggagctgagtagactggagcaagagcaagcctcttcacatggctggggactagggcacgtggctgtggttaagggcggccataaatgaagctggaaagtggcttggaccaggtatcaagggccttgaaggctgtgcaaggagtttttgttttcgttcagtagggtctgacagtcaagattaagcaaccgcaaacttttaacctctttcgccatctctgtctctttcctcacaggataaatttgttcacaaacagttttgagggcccagttcttgatcacaggtattatgcaggtggatgctccccgcattacatcctgaacacgaggtttaggaagccctacaatgtggaaagctacacgccacagacccaaggcaaatacgaattcatattaaaagagtatgaatcatactcagattttgaacgcaatgtcacagagaaaatggcaagcaagtctggtttcagttttggttttaaaatacctggaatatttgaacttggcatcagtagtcaaagtgatcgaggcaaacactatattaggagaaccaaacgattctctcatactaaaagcgtatttctgcatgcacgctctgaccttgaagtagcacattacaagctgaaacccagaagcctcatgctccattacgagttccttcagagagttaagcggctgcccctggagtacagctacggggaatacagagatctcttccgtgattttgggacccactacatcacagaggctgtgcttgggggcatttatgaatacaccctcgttatgaacaaagaggccatggagagaggagattatactcttaacaacgtccatgcctgtgccaaaaatgattttaaaattggtggtgccattgaagaggtctacgtcagtctgggtgtgtctgtaggcaaatgcagaggtattctgaatgaaataaaagacagaaacaagagggacaccatggtggaggacttggtggtcctggtacgaggaggggcaagtgagcacatcaccaccctggcataccaggagctgccgacggcggacctgatgcaggagtggggagacgctgtgcagtacaacccagccatcatcaaagttaaggtggagcctctgtatgaactagtgacagccacagattttgcctattccagcacagtgaggcagaacatgaagcaggcactggaggagttccagaaggaagttagttcctgccactgtgctccctgccaaggaaatggagtccctgtcctgaaaggatcacgctgtgactgcatctgtcctgttggatcccaaggcctagcctgtgaggtctcctatcggaagaatacccccattgatgggaagtggaattgctggtcaaattggtcttcatgctctggaagacgtaagacaagacaaaggcagtgtaacaatccacctcctcaaaatgggggtagcccctgttcaggccctgcttcagaaacacttgactgctcctagcagatgatacagcagtgggctacatacaatgagagccctgagccctcaagaactcacgccagctcagccctacaccagtttccacctggagttcatgcaagggcaaaaggcagtgccatgcaagctgtttaaaataaagatgttaccttgtaaaatgcaagttgatttaaataaatactgagttaaaggcttaagcatcttt

SEQ ID NO: 33121 - DNA, 2094 bp, Homo sapiens
gtggcactcacagcacaggcttgttatgggtctagcagcctctgtggcatctcctgtcacattgggaaaatgaagaattccaggacatgggcttggagggcgccggtggagctatttcttctctgtgctgccctgggctgtctcagtttgcctggctccagaggtgaaaggccacattcctttgggtcaaatgcagtcaacaagagctttgctaagagcagacagatgcggagtgtggatgttaccctgatgcccattgattgtgagctgtctagttggtcctcttggaccacatgtgacccctgtcagaagaaaaggtacaggtatgcctacttgctccagccctctcagttccatggggaaccgtgcaacttctctgacaaggaagtcgaagactgtgttaccaacagaccatgcagaagtcaagtgcgatgtgaaggctttgtgtgtgcacagacaggaaggtgtgtaaaccgcagacttctttgcaatggggacaatgactgtggagaccagtcagatgaagcaaactgtagaaggatttataaaaaatgtcagcatgaaatggaccaatactggggaattggcagtctggccagtgggataaatttgttcacaaacagttttgagggcccagttcttgatcacaggtattatgcaggtggatgctccccgcattacatcctgaacacgaggtttaggaagccctacaatgtggaaagctacacgccacagacccaaggcaaatacgaattcatattaaaagagtatgaatcatactcagattttgaacgcaatgtcacagagaaaatggcaagcaagtctggtttcagttttggttttaaaatacctggaatatttgaacttggcatcagtagtcaaagtgatcgaggcaaacactatattaggagaaccaaacgattctctcatactaaaagcgtatttctgcatgcacgctctgaccttgaagtagcacattacaagctgaaacccagaagcctcatgctccattacgagttccttcagagagttaagcggctgcccctggagtacagctacggggaatacagagatctcttccgtgattttgggacccactacatcacagaggctgtgcttgggggcatttatgaatacaccctcgttatgaacaaagaggccatggagagaggagattatactcttaacaacgtccatgcctgtgccaaaaatgattttaaaattggtggtgccattgaagaggtctacgtcagtctgggtgtgtctgtaggcaaatgcagaggtattctgaatgaaataaaaggggcaagtgagcacatcaccaccctggcataccaggagctgccgacggcggacctgatgcaggagtggggagacgctgtgcagtacaacccagccatcatcaaagttaaggtggagcctctgtatgaactagtgacagccacagattttgcctattccagcacagtgaggcagaacatgaagcaggcactggaggagttccagaaggaagttagttcctgccactgtgctccctgccaaggaaatggagtccctgtcctgaaaggatcacgctgtgactgcatctgtcctgttggatcccaaggcctagcctgtgaggtctcctatcggaagagtaagttaattggaaaaggaactctggggaggtccagagaataattcaccagaagaagagcaaggagctggtgtggagtgtggggctggatactaggaaacctgagatccatcctgcttaaactcagcttggattgaaattccatctccatcatttaataactgatggattgattgttatgcatttcattatttttacaacacagagtgcttcatgttagagaaatatcaatgcgtggcttttgtaagccatctctttggatcattctggaatgcttaccctcttttcctgcttagtatactgctattcagccctcaaattccagcacgtatgccccctcctccataaaaaattcctctaatccccaaagaatgagctaattcctcctgctggctcccccgggactttgaacatgtatctattatagctctttgtgcattgtattttgggttgatgta

SEQ ID NO: 33122 - DNA, 703 bp, Homo sapiens
  misc_feature (703)..(703): n is a, c, g, or t
gtggcactcacagcacaggcttgttatgggtctagcagcctctgtggcatctcctgtcacattgggaaaatgaagaattccaggacatgggcttggagggcgccggtggagctatttcttctctgtgctgccctgggctgtctcagtttgcctggctccagaggtgaaaggccacattcctttgggtcaaatgcagtcaacaagagctttgctaagagcagacagatgcggagtgtggatgttaccctgatgcccattgattgtgagctgtctagttggtcctcttggaccacatgtgacccctgtcagaagaaaaggtacaggtatgcctacttgctccagccctctcagttccatggggaaccgtgcaacttctctgacaaggaagtcgaagactgtgttaccaacagaccatgcagaagtcaagtgcgatgtgaaggctttgtgtgtgcacagacaggaaggtgtgtaaaccgcagacttctttgcaatggggacaatgactgtggagaccagtcagatgaagcaaactgtagaaggatttataagataaatttgttcacaaacagttttgagggcccagttcttgatcacaggtattatgcaggtggatgctccccgcattacatcctgaacacgaggtttaggaagccctacaatgtggaaagctacacgccacagacccaaggctacgttcatattn

SEQ ID NO: 33123 - DNA, 370 bp, Homo sapiens
gattttaaaattggtggtgccattgaagaggtctacgtcagtctgggtgtgtctgtaggcaaatgcagaggtattctgaatgaaataaaaggtgagtgacaggggcttgtgacttccacacttataatgtttatcctcctagtgcctctggtgattacaacacctccctccctttttgagacaaatactatcccaacttctaggccaactatgtccttctgttttttatagttttaccatctaacatatcgctaactaacatgacttagtgttgcttatttttgaactttatatgaatggaatataatccttccagtcctgtgttttccattcaacataatgtttttgtgtataactatagttagttcac

SEQ ID NO: 33124 - DNA, 462 bp, Homo sapiens
agacaagtcagagataaaacagtgactgggtggaagggcattctgggcgcagggaacagtacctaccacagaaggagctgagtagactggagcaagagcaagcctcttcacatggctggggactagggcacgtggctgtggttaagggcggccataaatgaagctggaaagtggcttggaccaggtatcaagggccttgaaggctgtgcaaggagtttttgttttcgttcagtagggtctgacagtcaagattaagcaaccgcaaacttttaacctctttcgccatctctgtctctttcctcacaggataaatttgttcacaaacagttttgagggcccagttcttgatcacaggtattatgcaggtggatgctccccgcattacatcctgaacacgaggtttaggaagccctacaatgtggaaagctacacgccacaggtaagagacagccaggtagcagt

SEQ ID NO: 33125 - DNA, 336 bp, Homo sapiens
tcccacctacctgtctccctccagcttccatgtccctcctatctctctccatttccaggcaaccactgctcttctgtcattgtagattgatttacatttcctataattttatgtaaatggcatcatacaatatgtatttttttggtctggcttcttacattcagcctattaactttttgatttatctttattgttgcatgattgaataattcctttttaaaattgctaagtagtatatggatataccacaatttgttttatccattcactttttcatggacagtaggtagttttcagtttggggttcttctaaataaagctgccataaccatttgt

SEQ ID NO: 33126 - DNA, 703 bp, Homo sapiens
gtatgggaagaaatggtaatgccgcagaaaaatagacaaaggaatggccaatagatgtatgaaatctgtgtgacagattgtattttccacagatagtggcaacaatatcttccatcctacatgttcctcttacagtgtcactttgaccatccttacaattagaggtagagcctattcttccttcccttgaaactggtgggacttttgtggctattcaggccaataaagagtattgcagaagtgacattatgtgacttctgagtttagatcacaaacgatgacaaagcctgtgctttatttgctggaatactctctctttaagcctttagccaccatgtaagcagtatgactgttctgagggcactgtactgtaaggaagcccaaacagagggaccacagggttgggccctgggctacatgaagagaaagagatagacacctgcagctgctccagccaccatctggctgcatgtgcaggagagaccccaagccatttctgcccagccaacctcctaaaatccagactcctgaaactgtgtgagatagtaaatggactgctcattgtttaagcttctaagttggaggttgatttgttacatagtaaagaatggcaggaatagcatgcataacttcattagtcatcagggaaatgcaaattaaaaccaaaatgagattatcacttcacacctaccagaatgactga

SEQ ID NO: 33127 - DNA, 581 bp, Homo sapiens
gtccaatccatggattgcataaatgagcatgaaagccgtacttttcacccacattacatttatttacttttattttagaccccaaatgacaaaatttattttttcacaaatttttaaaaatgcttatgagttattgagatgagtgactcctactacttatacagcaagaagattacaaaggtacatttggcacagaaaatgccgccaattaattatacaaagaagttggaacaagctcagattatgtgaagaatgtgtacaagctcataaactgactttaattactatccaaactgtcccaaggggggaattagtgtatcaggtttggagcaagagcttggtaggatttttttctatttaaaaataagttacacttgctaaatatgtaacaatttaaagattactttcatatgtgctatcacatttacgcctcacaacaactcccgggtgcatgtattataagtgatattttagagactttcagaaactgagaattgctcaaggtcatatagcaagtgaatagcaaaagacatcaaattcaagtaatttgacttgaaggaggaaaatgtttttcatcagat

SEQ ID NO: 33128 - DNA, 592 bp, Homo sapiens
atctcttgaagccaaatgtttgagtccagtacaggcaacatggtgaaattctgtcaccataaaaaaataaataaaataaatatggctgggcatggtggttcacgcttgtaataccagcactttgggagtcggaggcaggtggataatgaggtcagggttcgagaccagcctggccaaaatggtgaaaccctttctctcctaaaaataataacaataaaaaatcagccaggcatggtgctgtgcgcctgtaatgccagctactcaaaaggttgaagcaagagaattgcttgagcctgggaggcggaggttgcattgagctaagatcatgccactacactctagcctgacccacagagcaagacactgtcttgaataaataaataaataaataaataaataaatttagccaggcctggaggtgcatgcctatagtcctaggtaattaagaggttgaggcaggaggactgctcaaacccaagaagttaaggttatagtgagctatgattatgccattgcacttcagactaagcaaaagagtaagattccatctcaaaaaattactaaaaaaagttctctaaattacattgtttaa

SEQ ID NO: 33129 - DNA, 1407 bp, Homo sapiens
aaatctttgtcttctttcccataaatagaacccaggatgagttatcctactaaagaaggaagtgatacagctggaaatgctcacaaaaattctgaaaatgagcctcctaatgactgtagtacagacatagagtctccatctgctgatcccaatatgatctatcaggtagaaaccaacccaataaacagggagccaggcacagcaacctcccaggaagatgttgttcctcaagcagcagaaaacagcgagctcgaaacagagatccaaaaagatcaacgagaagaagatctaaaagaagagcttcttctacttcagacccccattcccagaaaattggtctctcacaagcccttaaatgatagatcaagatcccactcagggaaagttgagatgaaagcaaacaatttccccataaatcacaaaactcgttttcgactttcaacttcatggagagtcccatttattaacagtcatgagataagaagtatgattctccatctgctatgtgatagatatttctctcaggctgcagggtgtcagaataccatgtgggtaaagcgaaaatatatagcatgtctttaccatccaaatagtttcacccatcacgagagagccataacatttagaaggccttcgagggtgcactactaccgtcccctcactgagagaatgacatcaggaaaattttgcaaatcaactgacactaaagggaaatgtagattccgtgctattgtgaggtctgtgctctttgtgtcacagatacaaattgaaagtatttttaatataaaaggttttgtggatatattgacatatatccataccatgaatgttatgatcacaaacaccaataatggttggaaatacttttgtcccatctgtggaaggctttttaacacttactctgaattaagacaacattcatgcagctcttctgggaattaaattaaattggggtaaattcattttaaaatataacttctaaaattcataatttgactactaaagtaagacaaaattgcatgaacataaattttagtattattagagggagtagcagaaaggaacacaaactaatagtacctctcagtaagaaatacctatggggagtgaggaaacatctgtttatactttgcttttacaagtacatcattgaaatatcagacctgtcatctatattgagtcagcatttgaaccaagtaaatgttttcactgtcttaacatctatttctgtagatgtaaatattgttaacataaaagaatccaagttaacaggatcctgactaagatagcaaacatatattggaaggccagacaaagttctaccaagtgtttccagagattctgctacatgtattatctgaaatgttctccatatattcaataaaaaccaatttgaagacatagaaa

SEQ ID NO: 33130 - DNA, 1605 bp, Homo sapiens
agaagaaaaggggtcaagaaggcaggaccccgtgaagcacacctttcctaaggattttgacgaatgagaatgaagataaactgtgagttgaaagtgaaagagaaagcataagggatcttaggtgcatctgacaagccttagatgacctccagcaacttcagttctcaccgaattactgcatttcagccttactgagaagcagccagtcatactatcctcaaattttaacccaggatgagttatcctactaaagaaggaagtgatacagctggaaatgctcacaaaaattctgaaaatgagcctcctaatgactgtagtacagacatagagtctccatctgctgatcccaatatgatctatcaggtagaaaccaacccaataaacagggagccaggcacagcaacctcccaggaagatgttgttcctcaagcagcagaaaacagcgagctcgaaacagagatccaaaaagatcaacgagaagaagatctaaaagaagagcttcttctacttcagacccccattcccagaaaattggtctctcacaagcccttaaatgatagatcaagatcccactcagggaaagttgagatgaaagcaaacaatttccccataaatcacaaaactcgttttcgactttcaacttcatggagagtcccatttattaacagtcatgagataagaagtatgattctccatctgctatgtgatagatatttctctcaggctgcagggtgtcagaataccatgtgggtaaagcgaaaatatatagcatgtctttaccatccaaatagtttcacccatcacgagagagccataacatttagaaggccttcgagggtgcactactaccgtcccctcactgagagaatgacatcaggaaaattttgcaaatcaactgacactaaagggaaatgtagattccgtgctattgtgaggtctgtgctctttgtgtcacagatacaaattgaaagtatttttaatataaaaggttttgtggatatattgacatatatccataccatgaatgttatgatcacaaacaccaataatggttggaaatacttttgtcccatctgtggaaggctttttaacacttactctgaattaagacaacattcatgcagctcttctgggaattaaattaaattggggtaaattcattttaaaatataacttctaaaattcataatttgactactaaagtaagacaaaattgcatgaacataaattttagtattattagagggagtagcagaaaggaacacaaactaatagtacctctcagtaagaaatacctatggggagtgaggaaacatctgtttatactttgcttttacaagtacatcattgaaatatcagacctgtcatctatattgagtcagcatttgaaccaagtaaatgttttcactgtcttaacatctatttctgtagatgtaaatattgttaacataaaagaatccaagttaacaggatcctgactaagatagcaaacatatattggaaggccagacaaagttctaccaagtgtttccagagattctgctacatgtattatctgaaatgttctccatatattcaataaaaaccaatttgaagacatagaaa

SEQ ID NO: 33131 - DNA, 404 bp, Homo sapiens
ggaggctgggaagcaggagaaacggggagtgactgctaatggacataggatttcttttgtgggggggatcaataaaaatattctggaattagacagtggtaatggttgaacatcttcatgaaatatactaaaaaccaataaattgtacaagttgaacaggtaaagttcatgcttcatgatatgtaaatttttttcacaacagaaaaaaaaaagagagtgagacagaaaagcaaatggcagccagatttggcctatgggctatagtttgccaaggcctaaactagacagacatccagctctttgagactatcctctagtgaggacctcacataacctaagtgtccctgtgatgtagcctggggggtgaggtagggaggagcaagaggaaggacatccgatacatc

SEQ ID NO: 33132 - DNA, 562 bp, Homo sapiens
aaagcactattaaagcacatctgtctcagcaggcccacccagccatcatcagaagtgggaggcaggaattctcgtggtatggtagaggaaggatttgaggtagacaggaggaacaagggaagggaaagtggaatcacattccctggaagcctcctatttgtgaggcaccagctgaaaccctgagagccaggtctctgagattccccatcctgccgttgattcttcctagtgggctaagtcccaactcccctactgtctggctgtaggatcctgaacaaattaatgaatcaacgaatctggagtccgaatattatgcacaccatacagtcataatgtgtcaaacaaaatgatgtgacccacactgataagggctctacagaagttagttatgccttaagacactgagggcagtaatctgtggatgagttggcctgaagggctttgagggaagggcatacggactgtcagaaagacctggaagatagcacctgttgccttaagagatatgcagagcttctggctaacacggtgaaaccccgtctcaccaaaaatccaaaaaaaa

SEQ ID NO: 33133 - DNA, 439 bp, Homo sapiens
ctctctgggctccagatgcctgtctcaaaaacagtgtggggccagagagggcagctccaggggtctctctcttcttgtccgagagcctggaaccagatgtcctctgctgactcatgggaatgttggaactgccagcacaggctatcccaggaccgtcccccgggccacagcagccagcgtcctccccacgccaggccctcagaccccatgttcccaatgctgggatatatcccaatgtgtgaggcagtgcttcttaatatttcctggtttcctggggttgacaccatgatgcagggtataggaagggttaaatgaggcgcaggtgtaacagaatcgggtgcacatgcaaaaactcagatgtgcaaataactgttccctattaactacaactaatcactttttttaattgccaattaaaatgaactcagtctttccatta

SEQ ID NO: 33134 - DNA, 376 bp, Homo sapiens
atggatgctgacccactctcatttgtcagcagaggaagtcggctcagagaacagtcacacagcaagtcgatggcagcgccaggccctgtcctgcagactccttgtccctctctcctctgaagcaaactctgggggctgagctcccaccccagccttgcttgctgtgtggcttggggcttgccaatgagcctctctgagtcctggtttcctggggttgacaccatgatgcagggtataggaagggttaaatgaggcgcaggtgtaacagaatcgggtgcacatgcaaaaactcagatgtgcaaataactgttccctattaactacaactaatcactttttttaattgccaattaaaatgaactcagtctttccatta

SEQ ID NO: 33135 - DNA, 345 bp, Homo sapiens
ggagaagtgggtaaattctcagtatggcaggttatgtcctgttggtatggttttctgaatgacacatgtcagagccataagaagaggtgttagtcaacacatatttattgatctcttaccatgttctgggccttggatatagagtgtgcttttccattttctgacaaaggccacatggcacatgatatgaaatgtaggaaggagattggacataggagaggacataaatgtcatcagatctaggaaaggaaaagatgagcgttgatcacatagcctgtgtcagggttgcagggaacttctagactaggatttatagaacccatggggcagacacaaaagtagtag

SEQ ID NO: 33136 - DNA, 950 bp, Homo sapiens
ggcacaaacgatgaatactgctaaagcaataacaataaaagaggcaacagacagtgggggaagccccagcaccaaccctcatttttctcataatatactctgttgtacaatgagacagagtgattccataggtaccagccagaaattacatgaaaaattgatcatgtttctttttctgggtgatatcagtgattgaggcccttgatttatgctggccaaactttttcagtgcagaatggaacccttcctaacttcagtctccgtggctcacacagactggccattaacagaagacacactgcatcataccatttagtcaggaccctacactaacagagggaactgcagcagagtcttaatagcaactccaatttgccaggaatctcaccacagatcagaaatttacagtggcggagaccttttaggaactttcagcatggatgctccctcaaggtgtgggtcagaatttgcggcgcaggaggtgaggtgaggtgaatagtttataatgatttttctatgccttttaacctttggaattaacatttggtcaagaaagccaattgaaggctaagtgtgtacttgacatgtgaaaaaatgaatgtgtcttctaggcgttggcttaggacactgctgagccctggctacagccaactcaggcttaactcattaaggtgattagccaacaatcaattctttaaaattagtaacataaaacaggccataccaggctcatggatataaaatttgggtatcaagttttgctccagagaaatgtcacaccctcaccggcaaaaagtctatagaggtagggagtgtcacaggtaaggttgagttaatgagacatcctctagctggcatgaatgtgtaaagtgcgctccatggtcatacatccagcaagtcaggatttcacagcaagcatagctttcactttaagctaagtgacatggaag

SEQ ID NO: 33137 - DNA, 613 bp, Homo sapiens
tttgccatgttgaccaggctggtcttgaacaccttacttcaggtgatctgccagcctcagtctcccaaagtgctgggattgcaggtgtgagccaccacatttttaggaataatactgacgtgatttggctgcatccccacctaaatctcatcttgaattgtagttcccataatccccatgtgtcccagaagggacccagtgggagctaatttaatcatgggggtgtttacccgcatgctggtcttgtgatagtgaattctcacaacaaggtctgatggttttataaggtcctttccccccttttgctcagcatttctccttgctgtccttctccatgtgaggaaggatgtgtttgcttccacttccaccatgactgtatgtttcctgaagcatcccaagccacgctgaactgtgagtcaattaaacctctttcctttataaattacccagtctcagctatgtctttattagcattgtaagaacgtattaatacaaatactcattgtgatagctaaattaacctattctcacaatttaatataataacccagtacttgcctcaaaactgaaatgacgtcttttgacaagttgcctaagaatcattgcttttgta

SEQ ID NO: 33138 - DNA, 475 bp, Homo sapiens
gctcacctcagcctcccaaagcctcagcctcttacagtgttgggattacaggcgtgagacactgtgacccgggacgattttcaatcacagttttttgttacgagtggaaaatgcgtatttataagaatgaagtagtacagacatgaatgtgtagaaatctgtataatcctgccatccaaggatggcacctgttaatgtgtatatcagggatgtccaatcttttggcctccctgtgccacactggaagaagaagaatcgccttgggccacgcataaaatacactaacactagcaatacctgatgagctaaaagaaaaaaaatcacaaaaaaacctcgtactgtttgaagaaagtttacagatttgcgttgggccgcaggttggacaagactgctatatgtatattctaggttttcccctataggtatacttatgtgaaaatgattattgtgataaattttgttttgagatgaagtc

SEQ ID NO: 33139 - DNA, 492 bp, Homo sapiens
gccgccgcctactactactaaattcgccgccggtcgacgggcttgctgtgagccagacactcagctcctccgctccccagagccccccatgaagcagaggctgagttcaacccactttacagaagaagctgagagaggggaagtgggtttcacaccgagaaatgccagagccagagctgcctctgggcacccaaccccaggtcctccctgctgtgtgggccgcaaggcatctgttctacagataagcacaggaagcctgcagaccccaggcttgtcccgggtcccacagctggaagtgacaggcgtggaggcaaatatgcaaacttctcagcactcggccagcggccttcccaattccatgagccccacatggaattgggaattgaaccaaatgtaataccggtctggattatgcttcatatcaactatttatatatttcagaagaaggtctgtttctatttgaatttggatatattcaaaacaaattgttt

SEQ ID NO: 33140 - DNA, 4444 bp, Homo sapiens
cgcccagctctgcgggcgccgccaccttcgccgccaccgctgcctttctcctcctcctgtcggcgtgcgggggccgcgcccggcggcagctctgccctaggtgggcggcggcgcggcccaggctgcagctgagcgctctgcgcggcgcagccgggtctcccgcgtgtaccacgccgtgacaggtgcagagtccgggctgaggacccacctgcagccgccgccgcgatgcccaccatgcggaggaccgtgtcggagatccgctcgcgcgccgaaggttatgagaagacagatgatgtttcagagaagacctcactggctgaccaggaggaagtaaggactattttcatcaaccagccccagctgacaaaattctgcaataaccatgtcagcactgcaaaatacaacataatcacattccttccaagatttctctactctcagttcagaagagctgctaattcattttttctctttattgcactgctgcagcaaatacctgatgtgtcaccaacaggtcgttatacaacactggttcctctcttatttattttagctgtggcagctatcaaagagataatagaagatattaaacgacataaagctgataatgcagtgaacaagaaacaaacgcaagttttgagaaatggtgcttgggaaattgtccactgggaaaaggtggcagtaggggagatagtgaaagtgaccaatggggaacatctcccagcagatctcatcagtctgtcctcaagtgagccccaagccatgtgctacattgaaacatccaacttagatggtgaaacaaacttgaaaattagacagggcttaccagcaacatcagatatcaaagacgttgacagtttgatgaggatttctggcagaattgagtgtgaaagtccaaacagacatctctacgattttgttggaaacataaggcttgatggacatggcaccgttccactgggagcagatcagattcttcttcgaggagctcagttgagaaatacacagtgggttcatggaatagttgtctacactggacatgacaccaagctgatgcagaattcaacaagtccaccacttaagctctcaaatgtggaacggattacaaatgtacaaattttgattttattttgtatcttaattgccatgtctcttgtctgttctgtgggctcagccatttggaatcgaaggcattctggaaaagactggtatctcaatctaaactatggtggcgctagtaattttggactgaatttcttgaccttcatcatccttttcaacaatctcattcctatcagcttattggttacattagaagttgtgaaatttacccaggcatacttcataaattgggatcttgacatgcactatgaacccacagacactgctgctatggctcgaacatctaatctgaatgaggaacttggccaggttaaatacatattttctgacaaaactggtactctgacatgcaatgtaatgcagtttaagaagtgcaccatagcgggagttgcttatggccatgtccctgaacctgaggattatggctgctctcctgatgaatggcagaactcacagtttggagatgaaaaaacatttagtgattcatcattgctggaaaatctccaaaataatcatccaactgcacctataatatgtgaatttcttacaatgatggcagtctgtcacacagcagtgccagagcgagaaggtgacaagattatttatcaagcagcatctccagatgagggagcattggtcagagcagccaagcaattgaattttgttttcactggaagaacacccgactcggtgattatagattcactggggcaggaagaaagatatgaattgctcaatgtcttggagtttaccagtgctaggaaaagaatgtcagtgattgttcgcactccatctggaaagttacgactctactgcaaaggagctgacactgtaatttatgatcgactggcagagacgtcaaaatacaaagaaattaccctaaaacatttagagcagtttgctacagaagggttaagaactttatgttttgctgtggctgagatttcagagagcgactttcaggagtggcgagcagtctatcagcgagcatctacatctgtgcagaacaggctactcaaactcgaagagagttatgagttgattgaaaagaatcttcagctacttggagcaacagccattgaggataaattacaagatcaagtgcctgaaaccatagaaacgctaatgaaagcagacatcaaaatctggatccttacaggggacaagcaagaaactgccattaacatcggacactcctgcaaactgttgaagaagaacatgggaatgattgttataaatgaaggctctcttgatggaacaagggaaactctcagtcgtcactgtactacccttggtgatgctctccggaaagagaatgattttgctcttataattgatgggaaaaccctcaaatatgccttaacctttggagtacgacagtatttcctggacttagctttgtcatgcaaagctgtcatttgctgtcgggtttctcctcttcaaaaatctgaagttgttgagatggttaagaaacaagtcaaagtcgtaacgcttgcaatcggtgatggagcaaatgatgtcagcatgatacagacagcgcacgttggtgttggtatcagtggcaatgaaggcctgcaggcagctaattcctctgactactccatagctcagttcaaatatttgaagaatttactgatgattcatggtgcctggaactataacagagtctccaagtgcatcttatactgcttctacaagaatatagtgctctatattatcgagatctggtttgcctttgttaatggcttttctggacagatcctctttgaaagatggtgtataggtctctataacgtgatgtttacagcaatgcctcctttaactcttggaatatttgagagatcatgcagaaaagagaacatgttgaagtaccctgaattatacaaaacatctcagaatgccctggacttcaacaccaaggttttctgggttcattgtttaaatggcctcttccactcagttattctgttttggtttccactaaaagcccttcagtatggtactgcatttggaaatgggaaaacctcggattatctgctactgggaaactttgtgtacacttttgtggtgataactgtgtgtttgaaagctggattggagacatcatattggacatggttcagccacatagcgatatgggggagcatcgcactctgggtggtgttttttggaatctactcatctctgtggcctgccattccgatggcccctgatatgtcaggagaggcagccatgttgttcagttctggagtcttttggatgggcttgttattcatccctgtggcatctctgctccttgatgtggtgtacaaggttatcaagaggactgcttttaaaacattggtcgatgaagttcaggagctggaggcaaaatctcaagacccaggagcagttgtacttggaaaaagcctgaccgagagggcgcaactgctcaagaacgtctttaagaagaaccacgtgaacttgtaccgctctgaatccttgcaacaaaatctgctccatgggtatgcgttctctcaagatgaaaatggaatcgtttcacagtctgaagtgataagagcatatgataccacgaaacagaggcccgacgaatggtgatggggagagcctgaaaggcaggctctgttacctctctaaggagagctaccaggttgtcaccgcagtctgctaaccaattccagtctggtccatgaagaggaaaggtagatctgagctcatctcgctgatggacattcagattcatgtatattatagacataagcactgtgcaactgtactgtaacaccatctcttttggatttttttaaggtatttgctaagtctttgtaaacggaaattgaaaatgacctggtatcttgccagagggctttcttaaacggagaataagtcagtattcttatgccattactgtggggctgtaactgactgtcagtttattggctgtaccacaaggtaaccaaccattaaaaaactctaaatgatatttagttaaagggactcttggtatccagacttagatttcaggatatgctgaaacaaaccagcattcttaaggaactgactcaccttcctgagcaaaatttctaaacaagcatttgtgtccaaaattgtcttgataaatgtttgccaaagaggttcagtaagtgtttttctagttcagtagtcatatgcccagaaatgtaagagaaagtttacttccagttccgctgtaagatctgcatgcctgactttccaaatgtaagagtgatttacaaaaatgaatatttcaaggcatttgctactaaaatcggtgatgttgcacctttggccttacaaatgcttc

SEQ ID NO: 33141 - DNA, 1095 bp, Homo sapiens
tttttttttcctctgttcattttttttttttggccattttaattattttatactgggacgtgtaggtggcagtaggggagatagtgaaagtgaccaatggggaacatctcccagcagatctcatcagtctgtcctcaaggttagaaccactgagtcgtataggatgcgtgtatgtgggtcctcaccgtaaaccggagaacagttgcacccaaatatggttgagttctgtgtctcttcctttaaaacacaaactttttatactgcttggtgatggacatttcacagatgttttaaagggatttttgaatgctatgttgactgatgcttgtccttcagctgggcaaattgaactcctgttgttatcaataggagtctaagaggcatgacagtaaaggtagattttaatttcctgtgcaccattaatatatattcgtatttaataacatgcctaagtactaaggcttaatttattatctctccgggatattattttgaataatgttaagcttttcatgaaacagtcattgaaaattgattagattataaacatgtcttattcttgtattttaaatttttctgtaagttctgtaaaatccttccagcgattgtgactataatttgggctcatagggtttatagaggaccccctgcacaaagctggatgttgcacattttgtaccgcatgctttgggatcgacttttatcccacttgtatctagtgacaaagtgcacgttactgtgatcaatttcagctgtctactagtgactgtattgtgatatgcatcttgtttcatttttcacttactaatcaaaaagcctgctttgcctctcttgactagtttgtgttttagatgtcatcataatttgctgaaatatttatgatctagcatgattccttatctgagacttcttgctgccttttcacagcactattaagaattgcttcagtaactgctgtcctaagtgattgttgagaatgttctgaatttcgatgcttattttattaccccaacttcaaatagaacttagccatttgaacttcctaacttcctagccatttaaagacctagataagttactttatgcaaaaaaaaa

SEQ ID NO: 33142 - DNA, 772 bp, Homo sapiens
cgcccagctctgcgggcgccgccaccttcgccgccaccgctgcctttctcctcctcctgtcggcgtgcgggggccgcgcccggcggcagctctgccctaggtgggcggcggcgcggcccaggctgcagctgagcgctctgcgcggcgcagccgggtctcccgcgtgtaccacgccgtgacaggtgcagagtccgggctgaggacccacctgcagccgccgccgcgatgcccaccatgcggaggaccgtgtcggagatccgctcgcgcgccgaaggttatgagaagacagatgatgtttcagagaagacctcactggctgaccaggaggaagtaaggactattttcatcaaccagccccagctgacaaaattctgcaataaccatgtcaggtaagaactaccaaagaatgccatgagaccagccagcagagcagagctggttaggtcaaaatgaaaatgcttgcaaagagctttcagtgcagtcagttaatatttgagagctccctgttggcagtgtgaataggctgtttccccatcttctctcccatagagaaatattcataagaatctggaaatagcgaggagcagaaagaataagcacccatcctctgccgatgctgcatagatattgaataatgaaagctgcttatgtgtaaatgcctctgtcctaaacctgttaatagagcgatgcgttactggttttggttagcaagttttaacattttagaagaggtctttgcaattctgcaccaagaattccttctggttatata

SEQ ID NO: 33143 - DNA, 1742 bp, Homo sapiens
  misc_feature (17)..(17): n is a, c, g, or t
  misc_feature (25)..(25): n is a, c, g, or t
ctactactactaaattngcggccgntcgacgttcaaatatttgaagaatttactgatgattcatggtgcctggaactataacagagtctccaagtgcatcttatactgcttctacaagaatatagtgctctatattatcgagatctggtttgcctttgttaatggcttttctggacagatcctctttgaaagatggtgtataggtctctataacgtgatgtttacagcaatgcctcctttaactcttggaatatttgagagatcatgcagaaaagagaacatgttgaagtaccctgaattatacaaaacatctcagaatgccctggacttcaacaccaaggttttctgggttcattgtttaaatggcctcttccactcagttattctgttttggtttccactaaaagcccttcagtatggtactgcatttggaaatgggaaaacctcggattatctgctactgggaaactttgtgtacacttttgtggtgataactgtgtgtttgaaagctggattggagacatcatattggacatggttcagccacatagcgatatgggggagcatcgcactctgggtggtgttttttggaatctactcatctctgtggcctgccattccgatggcccctgatatgtcaggagaggcagccatgttgttcagttctggagtcttttggatgggcttgttattcatccctgtggcatctctgctccttgatgtggtgtacaaggttatcaagaggactgcttttaaaacattggtcgatgaagttcaggagctggaggcaaaatctcaagacccaggagcagttgtacttggaaaaagcctgaccgagagggcgcaactgctcaagaacgtctttaagaagaaccacgtgaacttgtaccgctctgaatccttgcaacaaaatctgctccatgggtatgcgttctctcaagatgaaaatggaatcgtttcacagtctgaagtgataagagcatatgataccacgaaacagaggcccgacgaatggtgatggggagagcctgaaaggcaggctctgttacctctctaaggagagctaccaggttgtcaccgcagtctgctaaccaattccagtctggtccatgaagaggaaaggtagatctgagctcatctcgctgatggacattcagattcatgtatattatagacataagcactgtgcaactgtactgtaacaccatctcttttggatttttttaaggtatttgctaagtctttgtaaacggaaattgaaaatgacctggtatcttgccagagggctttcttaaacggagaataagtcagtattcttatgccattactgtggggctgtaactgactgtcagtttattggctgtaccacaaggtaaccaaccattaaaaaactctaaatgatatttagttaaagggactcttggtatccagacttagatttcaggatatgctgaaacaaaccagcattcttaaggaactgactcaccttcctgagcaaaatttctaaacaagcatttgtgtccaaaattgtcttgataaatgtttgccaaagaggttcagtaagtgtttttctagttcagtagtcatatgcccagaaatgtaagagaaagtttacttccagttccgctgtaagatctgcatgcctgactttccaaatgtaagagtgatttacaaaaatgaatatttcaaggcatttgctactaaaatcggtgatgttgcacctttggccttacaaatgcttc

SEQ ID NO: 33144 - DNA, 3070 bp, Homo sapiens
cgcccagctctgcgggcgccgccaccttcgccgccaccgctgcctttctcctcctcctgtcggcgtgcgggggccgcgcccggcggcagctctgccctaggtgggcggcggcgcggcccaggctgcagctgagcgctctgcgcggcgcagccgggtctcccgcgtgtaccacgccgtgacaggtgcagagtccgggctgaggacccacctgcagccgccgccgcgatgcccaccatgcggaggaccgtgtcggagatccgctcgcgcgccgaaggttatgagaagacagatgatgtttcagagaagacctcactggctgaccaggaggaagtaaggactattttcatcaaccagccccagctgacaaaattctgcaataaccatgtcagcactgcaaaatacaacataatcacattccttccaagatttctctactctcagttcagaagagctgctaattcattttttctctttattgcactgctgcagcaaatacctgatgtgtcaccaacaggtcgttatacaacactggttcctctcttatttattttagctgtggcagctatcaaagagataatagaagatattaaacgacataaagctgataatgcagtgaacaagaaacaaacgcaagttttgagaaatggtgcttgggaaattgtccactgggaaaaggtggcagtaggggagatagtgaaagtgaccaatggggaacatctcccagcagatctcatcagtctgtcctcaagtgagccccaagccatgtgctacattgaaacatccaacttagatggtgaaacaaacttgaaaattagacagggcttaccagcaacatcagatatcaaagacgttgacagtttgatgaggatttctggcagaattgagtgtgaaagtccaaacagacatctctacgattttgttggaaacataaggcttgatggacatggcaccgttccactgggagcagatcagattcttcttcgaggagctcagttgagaaatacacagtgggttcatggaatagttgtctacactggacatgacaccaagctgatgcagaattcaacaagtccaccacttaagctctcaaatgtggaacggattacaaatgtacaaattttgattttattttgtatcttaattgccatgtctcttgtctgttctgtgggctcagccatttggaatcgaaggcattctggaaaagactggtatctcaatctaaactatggtggcgctagtaattttggactgaatttcttgaccttcatcatccttttcaacaatctcattcctatcagcttattggttacattagaagttgtgaaatttacccaggcatacttcataaattgggatcttgacatgcactatgaacccacagacactgctgctatggctcgaacatctaatctgaatgaggaacttggccaggttaaatacatattttctgacaaaactggtactctgacatgcaatgtaatgcagtttaagaagtgcaccatagcgggagttgcttatggccatgtccctgaacctgaggattatggctgctctcctgatgaatggcagaactcacagtttggagatgaaaaaacatttagtgattcatcattgctggaaaatctccaaaataatcatccaactgcacctataatatgtgaatttcttacaatgatggcagtctgtcacacagcagtgccagagcgagaaggtgacaagattatttatcaagcagcatctccagatgagggagcattggtcagagcagccaagcaattgaattttgttttcactggaagaacacccgactcggtgattatagattcactggggcaggaagaaagatatgaattgctcaatgtcttggagtttaccagtgctaggaaaagaatgtcagtgattgttcgcactccatctggaaagttacgactctactgcaaaggagctgacactgtaatttatgatcgactggcagagacgtcaaaatacaaagaaattaccctaaaacatttagagcagtttgctacagaagggttaagaactttatgttttgctgtggctgagatttcagagagcgactttcaggagtggcgagcagtctatcagcgagcatctacatctgtgcagaacaggctactcaaactcgaagagagttatgagttgattgaaaagaatcttcagctacttggagcaacagccattgaggataaattacaagatcaagtgcctgaaaccatagaaacgctaatgaaagcagacatcaaaatctggatccttacaggggacaagcaagaaactgccattaacatcggacactcctgcaaactgttgaagaagaacatgggaatgattgttataaatgaaggctctcttgatggaacaagggaaactctcagtcgtcactgtactacccttggtgatgctctccggaaagagaatgattttgctcttataattgatgggaaaaccctcaaatatgccttaacctttggagtacgacagtatttcctggacttagctttgtcatgcaaagctgtcatttgctgtcgggtttctcctcttcaaaaatctgaagttgttgagatggttaagaaacaagtcaaagtcgtaacgcttgcaatcggtgatggagcaaatgatgtcagcatgatacagacagcgcacgttggtgttggtatcagtggcaatgaaggcctgcaggcagctaattcctctgactactccatagctcagttcaaatatttgaagaatttactgatgattcatggtgcctggaactataacagagtctccaagtgcatcttatactgcttctacaagaatatagtgctctatattatcgagaacactgacattcaagcaaataacaatttatacagtttatttacatagatttatcaagataccaggaatttaaagccactgccagcaataaatctgcttataaaaagttaattttataaaataagaatgtccaacttgtcgctttttaaatctaaattgacagacaataaaggaggttccccgaagccgtggtattttatgcgaaattatagggacgaaacataga

SEQ ID NO: 33145 - DNA, 2023 bp, Homo sapiens
cgcccagctctgcgggcgccgccaccttcgccgccaccgctgcctttctcctcctcctgtcggcgtgcgggggccgcgcccggcggcagctctgccctaggtgggcggcggcgcggcccaggctgcagctgagcgctctgcgcggcgcagccgggtctcccgcgtgtaccacgccgtgacaggtgcagagtccgggctgaggacccacctgcagccgccgccgcgatgcccaccatgcggaggaccgtgtcggagatccgctcgcgcgccgaaggttatgagaagacagatgatgtttcagagaagacctcactggctgaccaggaggaagtaaggactattttcatcaaccagccccagctgacaaaattctgcaataaccatgtcagcactgcaaaatacaacataatcacattccttccaagatttctctactctcagttcagaagagctgctaattcattttttctctttattgcactgctgcagcaaatacctgatgtgtcaccaacaggtcgttatacaacactggttcctctcttatttattttagctgtggcagctatcaaagagataatagaagatattaaacgacataaagctgataatgcagtgaacaagaaacaaacgcaagttttgagaaatggtgcttgggaaattgtccactgggaaaaggtggcagtaggggagatagtgaaagtgaccaatggggaacatctcccagcagatctcatcagtctgtcctcaagtgagccccaagccatgtgctacattgaaacatccaacttagatggtgaaacaaacttgaaaattagacagggcttaccagcaacatcagatatcaaagacgttgacagtttgatgaggatttctggcagaattgagtgtgaaagtccaaacagacatctctacgattttgttggaaacataaggcttgatggacatggcaccgttccactgggagcagatcagattcttcttcgaggagctcagttgagaaatacacagtgggttcatggaatagttgtctacactggacatgacaccaagctgatgcagaattcaacaagtccaccacttaagctctcaaatgtggaacggattacaaatgtacaaattttgattttattttgtatcttaattgccatgtctcttgtctgttctgtgggctcagccatttggaatcgaaggcattctggaaaagactggtatctcaatctaaactatggtggcgctagtaattttggactgaatttcttgaccttcatcatccttttcaacaatctcattcctatcagcttattggttacattagaagttgtgaaatttacccaggcatacttcataaattgggatcttgacatgcactatgaacccacagacactgctgctatggctcgaacatctaatctgaatgaggaacttggccaggttaaatacatattttctgacaaaactggtactctgacatgcaatgtaatgcagtttaagaagtgcaccatagcgggagttgcttatggccatgtccctgaacctgaggattatggctgctctcctgatgaatggcagaactcacagtttggagatgaaaaaacatttagtgattcatcattgctggaaaatctccaaaataatcatccaactgcacctataatatgtgaatttcttacaatgatggcagtctgtcacacagcagtgccagagcgagaaggtgacaagattatttatcaagcagcatctccagatgagggagcattggtcagagcagccaagcaattgaattttgttttcactggaagaacacccgactcggtgattatagattcactggggcaggaagaaagatatgaattgctcaatgtcttggagtttaccaggtaaaacatctgctcagtgatttgtatggataagataaatttatatccatttttattttttcccttttgaataactagaaagtatgttttgtttttatttaactaaatttgtttagacaaaatattaaatcaaaatctttagtaca

SEQ ID NO: 33146 - DNA, 738 bp, Homo sapiens
gtgagagcatgcagaccaagagtaaggcaggcttccaaatgttcaggggtaaaaaaggtaagcgtaagaggagaaaactaccaaaaaagctagaggaggaacagttcgaaattccagtaccacaaacattgcaactgttgtagaagagattagcacttaaagatccaattaaaaaacacacacaattaggtagaaactcctatagataatatttttatggatataataaaaagttaataagggaatttgagagagtttcattagtatttgtgtactcggtctacataaaacttttttgactcagatttccttgctctacagttcagccacatagcgatatgggggagcatcgcactctgggtggtgttttttggaatctactcatctctgtggcctgccattccgatggcccctgatatgtcaggagaggtaatgtgcgctaataactcacaatccaacaaaaccttaaaaactggtattttttagcaaaccttaatcgtttagcataattttccatcttgttgatttatattaaaataggatttgaccatttaaaagctgtttttaaattccacagtttcgagtgattaatcttgagagaatattttaaacttgaacattttacttaaatctgacttaccttttcataaacataaccaagacaataaaatatggttgtcgggagcttgaatctcgttaagaatatccatatagaagatgccattttaaaattacacc

SEQ ID NO: 33147 - DNA, 457 bp, Homo sapiens
  misc_feature (401)..(401): n is a, c, g, or t
  misc_feature (419)..(419): n is a, c, g, or t
  misc_feature (432)..(432): n is a, c, g, or t
ttttttggtattacctaagaaatccatgtttattgtgcaaaatattagaaagcacatagcattaaataaagcaaattaaagtgctccataactccatcacccagaaataaccactctttgatatttttgctgtactatgtacagcaaattattccagatttttttcaaggcatattttttgagggcctaattttgtttttaaaaacttgctgggaattaaatagaaaattatagatgaatagaaaaacttgaatataatagttgatagactgcataggggacttccatttattcagttttaaatggtttatcaataggctttttcttctggggtggatctttccatggcttctccaaagctggtgacttccgacacagctgcagggaaaatcagagatatntgccatcactgaagcgtncttatttattttnaaatatattaaaacattttactatt

SEQ ID NO: 33148 - DNA, 3157 bp, Homo sapiens
taaccactcaaaatgcacattttctatgacattataaggccccaaccaaacaaatcagtcaggagtaaaagggaacatctcccatattgaagggacatctcccttcaataataccaaattggagccataaatgatacattttagcacaaacttttacccactgtatattaaaatacaatcatgtaaaagccgggcatggtggctcatgcctgtaatcccagcactttgagaggtcaaggcgggtggatcacttgaggtcggctacaaacttgtattatctgatacctactttgagcccaggccagaaaggataaagtaaagcatgagacgttgttagttcatttcaacagattggggagttgtgggttttagtctctgacgcttcattgttaccatgagagcctgcaagtttttcttttttctctcttttttttttttaacctctttgggtcatctgggaggacgtggtgctcttttagctctaacattttctggttgcaatgcgtttaggactgggatgcgaagtgagtgagtgagtgagccttctcaggaaaacactttctagaattttgtccgagtgtctgttgggaaacgcgcttacatcccgcagaaggcggtaaggacacagcgcacaactctgcattatacctgcgagttaaaaagccaagggttcgctcactcaaccttgaatgcgcgtcagaatcacctgggggaggttttacaaaatacccgtgctccacccaagacaatgaaatcagactccctgcgagcggggccgaacatcagcatttttgaggacgctccctgtggctgtgcatcggtgatctttaatcccctgctacttgttagaggagctggatgacacttcgtgggctcattctcataaataagctgctgaatggagtcctctcctcccaagagttgtcggtgttgcatcttttttgttgtttatttttttttaagccaacggacgaagacatccaacggtgctgcatcttaatggagggacatccagctaaagggaatcttggagacctccgcgggtttctagcagctcgcggcatgttggtttcccagggcaagaggccgccactgaaggtcagctctgtctttccagctgggcactggaggctctaagtctgttttcagcaggatcggaggaaggagacggggtggcgccaaggaaggaggagaaaaggcggccgagaaaaggaggagggcaaggggaagaggaagggcgagggaggagcctgaggagactcgcccggctcaaccccgacgtccgcgccccggccgcctgttggccatggcgggcctgggcctgggctccgccgttcccgtgtggctggccgaggacgacctcggctgcatcatctgccaggggctgctggactggcccgccacgctgccctgcggccacagcttctgccgccactgcctggaggccctgtggggcgcccgcgacgcccgccgctgggcctgccccacttgccgccagggcgccgcgcagcagccgcacctgcggaagaacacgctactgcaggacctggccgacaagtaccgccgcgccgcacgcgagatacaggcgggctccgaccctgcccactgcccctgcccgggctccagttccctctccagcgcggccgcgaggccccggcgccgcccggaactgcagcgggtggcagtagagaagagcatcacagaagttgctcaggagctgacagagctggtggaacatcttgtagacattgtcagaagcctgcagaatcagaggcccctatcagaatctggaccagacaacgaactgagcatcctgggcaagagaactcctggaagccccgtcttcctcctcatgcccattgcctgaccagagccaccctgcactcaggagagcttctcggtttgctcagtgggccatccatccaacctttaacttgaagagcctttcctgcagcctggaggtgtccaaggattcccgtacagtgactgtgtctcaccgcccacaaccctatcgctggagctgtgagaggttttctaccagccaggtcttatgttcccaggccctgtcttctggaaagcattactgggaagtggacactaggaattgcagccactgggcagttggggtggcttcctgggagatgagccgcgaccaggtcctgggaaggactatggactcttgttgtgtggaatggaaggggactagccagctctctgcatggcacatggtcaaggaaactgtccttggctcagacagacctggggtggtgggcatctggctgaaccttgaggagggaaagcttgccttctattcagtggacaatcaggagaagcttctgtatgagtgtaccatctctgcctcctctcctttgtaccctgccttctggctgtatggcttacatcctggaaattacctgataataaagcaagtaaaggtgtaaggtttcctaagggattacaacacagtggtttcctggtctctctccctgtcatcaatcagggtagtaacttgacttaagaataccactttttagaaaaattacgatagagatgggatctcactaggttgcccaggctggtgtcgaattcctggtctcaagcagtcctcccacctcagcctcccaaggtgctgggattacaggtgtgagccaccacacctggccaagaataccacttttgaagttaatccttttgtgtgatacaggatgaacttgggatgtttgaaccctggacattccaaataaagaataggcccctgcctggctcctgggagataacctctaagccattagaatatcttgcctgataagagtgtttttgtttacctgtgggccttgggccatgcagtatcagcttgaccttgcaaggtcaagctgaggagactaagttagccatgtgggcagtgaagcatgccaatgtgatcaatccctagtaaaagccctggacacctaggcatgggtgagctactctggttggtaatactctgtgcacacatcattgtagccacacatcattgctgggagaattaagcattatcctgaagactctgccaggagaggataattggaagttctcttggaccttaccttatgtgcctttcttcattgctgattttaatctgtatcctttcactgtaataaactgtaactatgagtgc

SEQ ID NO: 33149 - DNA, 3321 bp, Homo sapiens
taaccactcaaaatgcacattttctatgacattataaggccccaaccaaacaaatcagtcaggagtaaaagggaacatctcccatattgaagggacatctcccttcaataataccaaattggagccataaatgatacattttagcacaaacttttacccactgtatattaaaatacaatcatgtaaaagccgggcatggtggctcatgcctgtaatcccagcactttgagaggtcaaggcgggtggatcacttgaggtcggctacaaacttgtattatctgatacctactttgagcccaggccagaaaggataaagtaaagcatgagacgttgttagttcatttcaacagattggggagttgtgggttttagtctctgacgcttcattgttaccatgagagcctgcaagtttttcttttttctctcttttttttttttaacctctttgggtcatctgggaggacgtggtgctcttttagctctaacattttctggttgcaatgcgtttaggactgggatgcgaagtgagtgagtgagtgagccttctcaggaaaacactttctagaattttgtccgagtgtctgttgggaaacgcgcttacatcccgcagaaggcggtaaggacacagcgcacaactctgcattatacctgcgagttaaaaagccaagggttcgctcactcaaccttgaatgcgcgtcagaatcacctgggggaggttttacaaaatacccgtgctccacccaagacaatgaaatcagactccctgcgagcggggccgaacatcagcatttttgaggacgctccctgtggctgtgcatcggtgatctttaatcccctgctacttgttagaggagctggatgacacttcgtgggctcattctcataaataagctgctgaatggagtcctctcctcccaagagttgtcggtgttgcatcttttttgttgtttatttttttttaagccaacggacgaagacatccaacggtgctgcatcttaatggagggacatccagctaaagggaatcttggagacctccgcgggtttctagcagctcgcggcatgttggtttcccagggcaagaggccgccactgaaggtcagctctgtctttccagctgggcactggaggctctaagtctgttttcagcaggatcggaggaaggagacggggtggcgccaaggaaggaggagaaaaggcggccgagaaaaggaggagggcaaggggaagaggaagggcgagggaggagcctgaggagactcgcccggctcaaccccgacgtccgcgccccggccgcctgttggccatggcgggcctgggcctgggctccgccgttcccgtgtggctggccgaggacgacctcggctgcatcatctgccaggggctgctggactggcccgccacgctgccctgcggccacagcttctgccgccactgcctggaggccctgtggggcgcccgcgacgcccgccgctgggcctgccccacttgccgccagggcgccgcgcagcagccgcacctgcggaagaacacgctactgcaggacctggccgacaagtaccgccgcgccgcacgcgagatacaggcgggctccgaccctgcccactgcccctgcccgggctccagttccctctccagcgcggccgcgaggccccggcgccgcccggaactgcagcgggtggcagtagagaagagcatcacagaagttgctcaggagctgacagagctggtggaacatcttgtagacattgtcagaagcctgcagaatcagaggcccctatcagaatctggaccagacaacgaactgagcatcctgggcaaggctttttcttctggggtggatctttccatggcttctccaaagctggtgacttccgacacagctgcagggaaaatcagagatattctccatgacctagaagaaattcaggaaaaattacaagaaagcgtcacctggaaagaggctcctgaagcacaaatgcagggagaactcctggaagccccgtcttcctcctcatgcccattgcctgaccagagccaccctgcactcaggagagcttctcggtttgctcagtgggccatccatccaacctttaacttgaagagcctttcctgcagcctggaggtgtccaaggattcccgtacagtgactgtgtctcaccgcccacaaccctatcgctggagctgtgagaggttttctaccagccaggtcttatgttcccaggccctgtcttctggaaagcattactgggaagtggacactaggaattgcagccactgggcagttggggtggcttcctgggagatgagccgcgaccaggtcctgggaaggactatggactcttgttgtgtggaatggaaggggactagccagctctctgcatggcacatggtcaaggaaactgtccttggctcagacagacctggggtggtgggcatctggctgaaccttgaggagggaaagcttgccttctattcagtggacaatcaggagaagcttctgtatgagtgtaccatctctgcctcctctcctttgtaccctgccttctggctgtatggcttacatcctggaaattacctgataataaagcaagtaaaggtgtaaggtttcctaagggattacaacacagtggtttcctggtctctctccctgtcatcaatcagggtagtaacttgacttaagaataccactttttagaaaaattacgatagagatgggatctcactaggttgcccaggctggtgtcgaattcctggtctcaagcagtcctcccacctcagcctcccaaggtgctgggattacaggtgtgagccaccacacctggccaagaataccacttttgaagttaatccttttgtgtgatacaggatgaacttgggatgtttgaaccctggacattccaaataaagaataggcccctgcctggctcctgggagataacctctaagccattagaatatcttgcctgataagagtgtttttgtttacctgtgggccttgggccatgcagtatcagcttgaccttgcaaggtcaagctgaggagactaagttagccatgtgggcagtgaagcatgccaatgtgatcaatccctagtaaaagccctggacacctaggcatgggtgagctactctggttggtaatactctgtgcacacatcattgtagccacacatcattgctgggagaattaagcattatcctgaagactctgccaggagaggataattggaagttctcttggaccttaccttatgtgcctttcttcattgctgattttaatctgtatcctttcactgtaataaactgtaactatgagtgc

SEQ ID NO: 33150 - DNA, 3622 bp, Homo sapiens
taaccactcaaaatgcacattttctatgacattataaggccccaaccaaacaaatcagtcaggagtaaaagggaacatctcccatattgaagggacatctcccttcaataataccaaattggagccataaatgatacattttagcacaaacttttacccactgtatattaaaatacaatcatgtaaaagccgggcatggtggctcatgcctgtaatcccagcactttgagaggtcaaggcgggtggatcacttgaggtcggctacaaacttgtattatctgatacctactttgagcccaggccagaaaggataaagtaaagcatgagacgttgttagttcatttcaacagattggggagttgtgggttttagtctctgacgcttcattgttaccatgagagcctgcaagtttttcttttttctctcttttttttttttaacctctttgggtcatctgggaggacgtggtgctcttttagctctaacattttctggttgcaatgcgtttaggactgggatgcgaagtgagtgagtgagtgagccttctcaggaaaacactttctagaattttgtccgagtgtctgttgggaaacgcgcttacatcccgcagaaggcggtaaggacacagcgcacaactctgcattatacctgcgagttaaaaagccaagggttcgctcactcaaccttgaatgcgcgtcagaatcacctgggggaggttttacaaaatacccgtgctccacccaagacaatgaaatcagactccctgcgagcggggccgaacatcagcatttttgaggacgctccctgtggctgtgcatcggtgatctttaatcccctgctacttgttagaggagctggatgacacttcgtgggctcattctcataaataagctgctgaatggagtcctctcctcccaagagttgtcggtgttgcatcttttttgttgtttatttttttttaagccaacggacgaagacatccaacggtgctgcatcttaatggagggacatccagctaaagggaatcttggagacctccgcgggtttctagcagctcgcggcatgttggtttcccagggcaagaggccgccactgaaggtcagctctgtctttccagctgggcactggaggctctaagtctgttttcagcaggatcggaggaaggagacggggtggcgccaaggaaggaggagaaaaggcggccgagaaaaggaggagggcaaggggaagaggaagggcgagggaggagcctgaggagactcgcccggctcaaccccgacgtccgcgccccggccgcctgttggccatggcgggcctgggcctgggctccgccgttcccgtgtggctggccgaggacgacctcggctgcatcatctgccaggggctgctggactggcccgccacgctgccctgcggccacagcttctgccgccactgcctggaggccctgtggggcgcccgcgacgcccgccgctgggcctgccccacttgccgccagggcgccgcgcagcagccgcacctgcggaagaacacgctactgcaggacctggccgacaagtaccgccgcgccgcacgcgagatacaggcgggctccgaccctgcccactgcccctgcccgggctccagttccctctccagcgcggccgcgaggccccggcgccgcccggaactgcagcgggtagggaggccgggcccgcagctcccctggctcccccgggctgcccgccgcctgaccctttcccatgtggctcgaacccctttcctcagccgttctacttttacgttccttttctcagtctaaaagtcgagttccgctcttcggaggcactttggaaagttcataaaagtatgaagaagtagaaaaaaacaaattccccatcttccgaaagcttgtcaacttagctgttacacagcttggcatatttcaacttcttcccaatcgatcttcggtctctttctctgaaacttgtaaaattgtggtggcagtagagaagagcatcacagaagttgctcaggagctgacagagctggtggaacatcttgtagacattgtcagaagcctgcagaatcagaggcccctatcagaatctggaccagacaacgaactgagcatcctgggcaaggctttttcttctggggtggatctttccatggcttctccaaagctggtgacttccgacacagctgcagggaaaatcagagatattctccatgacctagaagaaattcaggaaaaattacaagaaagcgtcacctggaaagaggctcctgaagcacaaatgcagggagaactcctggaagccccgtcttcctcctcatgcccattgcctgaccagagccaccctgcactcaggagagcttctcggtttgctcagtgggccatccatccaacctttaacttgaagagcctttcctgcagcctggaggtgtccaaggattcccgtacagtgactgtgtctcaccgcccacaaccctatcgctggagctgtgagaggttttctaccagccaggtcttatgttcccaggccctgtcttctggaaagcattactgggaagtggacactaggaattgcagccactgggcagttggggtggcttcctgggagatgagccgcgaccaggtcctgggaaggactatggactcttgttgtgtggaatggaaggggactagccagctctctgcatggcacatggtcaaggaaactgtccttggctcagacagacctggggtggtgggcatctggctgaaccttgaggagggaaagcttgccttctattcagtggacaatcaggagaagcttctgtatgagtgtaccatctctgcctcctctcctttgtaccctgccttctggctgtatggcttacatcctggaaattacctgataataaagcaagtaaaggtgtaaggtttcctaagggattacaacacagtggtttcctggtctctctccctgtcatcaatcagggtagtaacttgacttaagaataccactttttagaaaaattacgatagagatgggatctcactaggttgcccaggctggtgtcgaattcctggtctcaagcagtcctcccacctcagcctcccaaggtgctgggattacaggtgtgagccaccacacctggccaagaataccacttttgaagttaatccttttgtgtgatacaggatgaacttgggatgtttgaaccctggacattccaaataaagaataggcccctgcctggctcctgggagataacctctaagccattagaatatcttgcctgataagagtgtttttgtttacctgtgggccttgggccatgcagtatcagcttgaccttgcaaggtcaagctgaggagactaagttagccatgtgggcagtgaagcatgccaatgtgatcaatccctagtaaaagccctggacacctaggcatgggtgagctactctggttggtaatactctgtgcacacatcattgtagccacacatcattgctgggagaattaagcattatcctgaagactctgccaggagaggataattggaagttctcttggaccttaccttatgtgcctttcttcattgctgattttaatctgtatcctttcactgtaataaactgtaactatgagtgc

SEQ ID NO: 33151 - DNA, 2384 bp, Homo sapiens
catggctggatcaggcctggatttaatcggacgaggcccgacgtccgcgccccggccgcctgttggccatggcgggcctgggcctgggctccgccgttcccgtgtggctggccgaggacgacctcggctgcatcatctgccaggggctgctggactggcccgccacgctgccctgcggccacagcttctgccgccactgcctggaggccctgtggggcgcccgcgacgcccgccgctgggcctgccccacttgccgccagggcgccgcgcagcagccgcacctgcggaagaacacgctactgcaggacctggccgacaagtaccgccgcgccgcacgcgagatacaggcgggctccgaccctgcccactgcccctgcccgggctccagttccctctccagcgcggccgcgaggccccggcgccgcccggaactgcagcgggtagggaggccgggcccgcagctcccctggctcccccgggctgcccgccgcctgaccctttcccatgtggctcgaacccctttcctcagccgttctacttttacgttccttttctcagtctaaaagtcgagttccgctcttcggaggcactttggaaagttcataaaagtatgaagaagtagaaaaaaacaaattccccatcttccgaaagcttgtcaacttagctgttacacagcttggcatatttcaacttcttcccaatcgatcttcggtctctttctctgaaacttgtaaaattgtggtggcagtagagaagagcatcacagaagttgctcaggagctgacagagctggtggaacatcttgtagacattgtcagaagcctgcagaatcagaggcccctatcagaatctggaccagacaacgaactgagcatcctgggcaaggctttttcttctggggtggatctttccatggcttctccaaagctggtgacttccgacacagctgcagggaaaatcagagatattctccatgacctagaagaaattcaggaaaaattacaagaaagcgtcacctggaaagaggctcctgaagcacaaatgcagggagaactcctggaagccccgtcttcctcctcatgcccattgcctgaccagagccaccctgcactcaggagagcttctcggtttgctcagtgggccatccatccaacctttaacttgaagagcctttcctgcagcctggaggtgtccaaggattcccgtacagtgactgtgtctcaccgcccacaaccctatcgctggagctgtgagaggttttctaccagccaggtcttatgttcccaggccctgtcttctggaaagcattactgggaagtggacactaggaattgcagccactgggcagttggggtggcttcctgggagatgagccgcgaccaggtcctgggaaggactatggactcttgttgtgtggaatggaaggggactagccagctctctgcatggcacatggtcaaggaaactgtccttggctcagacagacctggggtggtgggcatctggctgaaccttgaggagggaaagcttgccttctattcagtggacaatcaggagaagcttctgtatgagtgtaccatctctgcctcctctcctttgtaccctgccttctggctgtatggcttacatcctggaaattacctgataataaagcaagtaaaggtgtaaggtttcctaagggattacaacacagtggtttcctggtctctctccctgtcatcaatcagggtagtaacttgacttaagaataccactttttagaaaaattacgatagagatgggatctcactaggttgcccaggctggtgtcgaattcctggtctcaagcagtcctcccacctcagcctcccaaggtgctgggattacaggtgtgagccaccacacctggccaagaataccacttttgaagttaatccttttgtgtgatacaggatgaacttgggatgtttgaaccctggacattccaaataaagaataggcccctgcctggctcctgggagataacctctaagccattagaatatcttgcctgataagagtgtttttgtttacctgtgggccttgggccatgcagtatcagcttgaccttgcaaggtcaagctgaggagactaagttagccatgtgggcagtgaagcatgccaatgtgatcaatccctagtaaaagccctggacacctaggcatgggtgagctactctggttggtaatactctgtgcacacatcattgtagccacacatcattgctgggagaattaagcattatcctgaagactctgccaggagaggataattggaagttctcttggaccttaccttatgtgcctttcttcattgctgattttaatctgtatcctttcactgtaataaactgtaactatgagtgc

SEQ ID NO: 33152 - DNA, 3013 bp, Homo sapiens
taaccactcaaaatgcacattttctatgacattataaggccccaaccaaacaaatcagtcaggagtaaaagggaacatctcccatattgaagggacatctcccttcaataataccaaattggagccataaatgatacattttagcacaaacttttacccactgtatattaaaatacaatcatgtaaaagccgggcatggtggctcatgcctgtaatcccagcactttgagaggtcaaggcgggtggatcacttgaggtcggctacaaacttgtattatctgatacctactttgagcccaggccagaaaggataaagtaaagcatgagacgttgttagttcatttcaacagattggggagttgtgggttttagtctctgacgcttcattgttaccatgagagcctgcaagtttttcttttttctctcttttttttttttaacctctttgggtcatctgggaggacgtggtgctcttttagctctaacattttctggttgcaatgcgtttaggactgggatgcgaagtgagtgagtgagtgagccttctcaggaaaacactttctagaattttgtccgagtgtctgttgggaaacgcgcttacatcccgcagaaggcggtaaggacacagcgcacaactctgcattatacctgcgagttaaaaagccaagggttcgctcactcaaccttgaatgcgcgtcagaatcacctgggggaggttttacaaaatacccgtgctccacccaagacaatgaaatcagactccctgcgagcggggccgaacatcagcatttttgaggacgctccctgtggctgtgcatcggtgatctttaatcccctgctacttgttagaggagctggatgacacttcgtgggctcattctcataaataagctgctgaatggagtcctctcctcccaagagttgtcggtgttgcatcttttttgttgtttatttttttttaagccaacggacgaagacatccaacggtgctgcatcttaatggagggacatccagctaaagggaatcttggagacctccgcgggtttctagcagctcgcggcatgttggtttcccagggcaagaggccgccactgaaggtcagctctgtctttccagctgggcactggaggctctaagtctgttttcagcaggatcggaggaaggagacggggtggcgccaaggaaggaggagaaaaggcggccgagaaaaggaggagggcaaggggaagaggaagggcgagggaggagcctgaggagactcgcccggctcaaccccgacgtccgcgccccggccgcctgttggccatggcgggcctgggcctgggctccgccgttcccgtgtggctggccgaggacgacctcggctgcatcatctgccaggggctgctggactggcccgccacgctgccctgcggccacagcttctgccgccactgcctggaggccctgtggggcgcccgcgacgcccgccgctgggcctgccccacttgccgccagggcgccgcgcagcagccgcacctgcggaagaacacgctactgcaggacctggccgacaagtaccgccgcgccgcacgcgagatacaggcgggctccgaccctgcccactgcccctgcccgggctccagttccctctccagcgcggccgcgaggccccggcgccgcccggaactgcagcggagaactcctggaagccccgtcttcctcctcatgcccattgcctgaccagagccaccctgcactcaggagagcttctcggtttgctcagtgggccatccatccaacctttaacttgaagagcctttcctgcagcctggaggtgtccaaggattcccgtacagtgactgtgtctcaccgcccacaaccctatcgctggagctgtgagaggttttctaccagccaggtcttatgttcccaggccctgtcttctggaaagcattactgggaagtggacactaggaattgcagccactgggcagttggggtggcttcctgggagatgagccgcgaccaggtcctgggaaggactatggactcttgttgtgtggaatggaaggggactagccagctctctgcatggcacatggtcaaggaaactgtccttggctcagacagacctggggtggtgggcatctggctgaaccttgaggagggaaagcttgccttctattcagtggacaatcaggagaagcttctgtatgagtgtaccatctctgcctcctctcctttgtaccctgccttctggctgtatggcttacatcctggaaattacctgataataaagcaagtaaaggtgtaaggtttcctaagggattacaacacagtggtttcctggtctctctccctgtcatcaatcagggtagtaacttgacttaagaataccactttttagaaaaattacgatagagatgggatctcactaggttgcccaggctggtgtcgaattcctggtctcaagcagtcctcccacctcagcctcccaaggtgctgggattacaggtgtgagccaccacacctggccaagaataccacttttgaagttaatccttttgtgtgatacaggatgaacttgggatgtttgaaccctggacattccaaataaagaataggcccctgcctggctcctgggagataacctctaagccattagaatatcttgcctgataagagtgtttttgtttacctgtgggccttgggccatgcagtatcagcttgaccttgcaaggtcaagctgaggagactaagttagccatgtgggcagtgaagcatgccaatgtgatcaatccctagtaaaagccctggacacctaggcatgggtgagctactctggttggtaatactctgtgcacacatcattgtagccacacatcattgctgggagaattaagcattatcctgaagactctgccaggagaggataattggaagttctcttggaccttaccttatgtgcctttcttcattgctgattttaatctgtatcctttcactgtaataaactgtaactatgagtgc

SEQ ID NO: 33153 - DNA, 3356 bp, Homo sapiens
taaccactcaaaatgcacattttctatgacattataaggccccaaccaaacaaatcagtcaggagtaaaagggaacatctcccatattgaagggacatctcccttcaataataccaaattggagccataaatgatacattttagcacaaacttttacccactgtatattaaaatacaatcatgtaaaagccgggcatggtggctcatgcctgtaatcccagcactttgagaggtcaaggcgggtggatcacttgaggtcggctacaaacttgtattatctgatacctactttgagcccaggccagaaaggataaagtaaagcatgagacgttgttagttcatttcaacagattggggagttgtgggttttagtctctgacgcttcattgttaccatgagagcctgcaagtttttcttttttctctcttttttttttttaacctctttgggtcatctgggaggacgtggtgctcttttagctctaacattttctggttgcaatgcgtttaggactgggatgcgaagtgagtgagtgagtgagccttctcaggaaaacactttctagaattttgtccgagtgtctgttgggaaacgcgcttacatcccgcagaaggcggtaaggacacagcgcacaactctgcattatacctgcgagttaaaaagccaagggttcgctcactcaaccttgaatgcgcgtcagaatcacctgggggaggttttacaaaatacccgtgctccacccaagacaatgaaatcagactccctgcgagcggggccgaacatcagcatttttgaggacgctccctgtggctgtgcatcggtgatctttaatcccctgctacttgttagaggagctggatgacacttcgtgggctcattctcataaataagctgctgaatggagtcctctcctcccaagagttgtcggtgttgcatcttttttgttgtttatttttttttaagccaacggacgaagacatccaacggtgctgcatcttaatggagggacatccagctaaagggaatcttggagacctccgcgggtttctagcagctcgcggcatgttggtttcccagggcaagaggccgccactgaaggtcagctctgtctttccagctgggcactggaggctctaagtctgttttcagcaggatcggaggaaggagacggggtggcgccaaggaaggaggagaaaaggcggccgagaaaaggaggagggcaaggggaagaggaagggcgagggaggagcctgaggagactcgcccggctcaaccccgacgtccgcgccccggccgcctgttggccatggcgggcctgggcctgggctccgccgttcccgtgtggctggccgaggacgacctcggctgcatcatctgccaggggctgctggactggcccgccacgctgccctgcggccacagcttctgccgccactgcctggaggccctgtggggcgcccgcgacgcccgccgctgggcctgccccacttgccgccagggcgccgcgcagcagccgcacctgcggaagaacacgctactgcaggacctggccgacaagtaccgccgcgccgcacgcgagatacaggcgggctccgaccctgcccactgcccctgcccgggctccagttccctctccagcgcggccgcgaggccccggcgccgcccggaactgcagcgggtggcagtagagaagagcatcacagaagttgctcaggagctgacagagctggtggaacatcttgtagacattgtcagaagcctgcagaatcagaggcccctatcagaatctggaccagacaacgaactgagcatcctgggcaaggctttttcttctggggtggatctttccatggcttctccaaagctggtgacttccgacacagctgcagggaaaatcagagatattctccatgacctagaagaaattcaggaaaaattacaagaaagcgtcacctggaaagaggctcctgaagcacaaatgcagggagaactcctggaagccccgtcttcctcctcatgcccattgcctgaccagagccaccctgcactcaggagagcttctcggtttgctcagtgggccatccatccaacctttaacttgaagagcctttcctgcagcctggaggtgtccaaggattcccgtacagtgactgtgtctcaccgcccacaaccctatcgctggagctgtgagaggttttctaccagccaggtcttatgttcccaggccctgtcttctggaaagcattactgggaagtggacactaggaattgcagccactgggcagttggggtggcttcctgggagatgagccgcgaccaggtcctgggaaggactatggactcttgttgtgtggaatggaaggggactagccagctctctgcatggcacatggtcaaggaaactgtccttggctcagacagacctggggtggtgggcatctggctgaaccttgaggagggaaagcttgccttctattcagtggacaatcaggagaagcttctgtatgagtgtaccatctctgcctcctctcctttgtaccctgccttctggctgtatggcttacatcctggaaattacctgataataaagcaagtaaaggtgtaaggtttcctaagggattacaacacagtggtttcctggtctctctccctgtcatcaatcagggtagtaacttgacttaagaataccactttttagaaaaattacgatagagatgggatctcactaggttgcccaggctggtgtcgaattcctggtctcaagcagtcctcccacctcagcctcccaaggtgctgggattacaggtgtgagccaccacacctggccaagaataccacttttgaagttaatccttttgtgtgatacaggatgaacttgggatgtttgaaccctggacattccaaataaagaataggcccctgcctggctcctgggagataacctctaagccattagaatatcttgcctgataagagtgtttttgtttacctgtgggccttgggccatgcagtatcagcttgaccttgcaaggtcaagctgaggagactaagttagccatgtgggcagtgaagcatgccaatgtgatcaatccctagtaaaagccctggacacctaggcatgggtgagctactctggttggtaatactctgtgcacacatcattgtagccacacatcattgctgggagaattaagcattatcctgaagactctgccaggagaggataattggaagttctcttggaccttaccttatgtgcctttcttcattgctgattttaatctgtatcctttcactgtaataaactgtaactatgagtgcccacaacaaaccacgacacaaccacaaccaaacac

SEQ ID NO: 33154 - DNA, 1816 bp, Homo sapiens
ttttttggtattacctaagaaatccatgtttattgtgcaaaatattagaaagcacatagcattaaataaagcaaattaaagtgctccataactccatcacccagaaataaccactctttgatatttttgctgtactatgtacagcaaattattccagatttttttcaaggcatattttttgagggcctaattttgtttttaaaaacttgctgggaattaaatagaaaattatagatgaatagaaaaacttgaatataatagttgatagactgcataggggacttccatttattcagttttaaatggtttatcaataggctttttcttctggggtggatctttccatggcttctccaaagctggtgacttccgacacagctgcagggaaaatcagagatattctccatgacctagaagaaattcaggaaaaattacaagaaagcgtcacctggaaagaggctcctgaagcacaaatgcagggagaactcctggaagccccgtcttcctcctcatgcccattgcctgaccagagccaccctgcactcaggagagcttctcggtttgctcagtgggccatccatccaacctttaacttgaagagcctttcctgcagcctggaggtgtccaaggattcccgtacagtgactgtgtctcaccgcccacaaccctatcgctggagctgtgagaggttttctaccagccaggtcttatgttcccaggccctgtcttctggaaagcattactgggaagtggacactaggaattgcagccactgggcagttggggtggcttcctgggagatgagccgcgaccaggtcctgggaaggactatggactcttgttgtgtggaatggaaggggactagccagctctctgcatggcacatggtcaaggaaactgtccttggctcagacagacctggggtggtgggcatctggctgaaccttgaggagggaaagcttgccttctattcagtggacaatcaggagaagcttctgtatgagtgtaccatctctgcctcctctcctttgtaccctgccttctggctgtatggcttacatcctggaaattacctgataataaagcaagtaaaggtgtaaggtttcctaagggattacaacacagtggtttcctggtctctctccctgtcatcaatcagggtagtaacttgacttaagaataccactttttagaaaaattacgatagagatgggatctcactaggttgcccaggctggtgtcgaattcctggtctcaagcagtcctcccacctcagcctcccaaggtgctgggattacaggtgtgagccaccacacctggccaagaataccacttttgaagttaatccttttgtgtgatacaggatgaacttgggatgtttgaaccctggacattccaaataaagaataggcccctgcctggctcctgggagataacctctaagccattagaatatcttgcctgataagagtgtttttgtttacctgtgggccttgggccatgcagtatcagcttgaccttgcaaggtcaagctgaggagactaagttagccatgtgggcagtgaagcatgccaatgtgatcaatccctagtaaaagccctggacacctaggcatgggtgagctactctggttggtaatactctgtgcacacatcattgtagccacacatcattgctgggagaattaagcattatcctgaagactctgccaggagaggataattggaagttctcttggaccttaccttatgtgcctttcttcattgctgattttaatctgtatcctttcactgtaataaactgtaactatgagtgc

SEQ ID NO: 33155 - DNA, 1370 bp, Homo sapiens
ttgagcatctctgctgtggcaccaactacagccaactgcctgttcccaaacctgctgaggtatttctgcatctgtgctgtggccaccaactatagccaactgcctcttcctaaacctgctcagtgggccatccatccaacctttaacttgaagagcctttcctgcagcctggaggtgtccaaggattcccgtacagtgactgtgtctcaccgcccacaaccctatcgctggagctgtgagaggttttctaccagccaggtcttatgttcccaggccctgtcttctggaaagcattactgggaagtggacactaggaattgcagccactgggcagttggggtggcttcctgggagatgagccgcgaccaggtcctgggaaggactatggactcttgttgtgtggaatggaaggggactagccagctctctgcatggcacatggtcaaggaaactgtccttggctcagacagacctggggtggtgggcatctggctgaaccttgaggagggaaagcttgccttctattcagtggacaatcaggagaagcttctgtatgagtgtaccatctctgcctcctctcctttgtaccctgccttctggctgtatggcttacatcctggaaattacctgataataaagcaagtaaaggtgtaaggtttcctaagggattacaacacagtggtttcctggtctctctccctgtcatcaatcagggtagtaacttgacttaagaataccactttttagaaaaattacgatagagatgggatctcactaggttgcccaggctggtgtcgaattcctggtctcaagcagtcctcccacctcagcctcccaaggtgctgggattacaggtgtgagccaccacacctggccaagaataccacttttgaagttaatccttttgtgtgatacaggatgaacttgggatgtttgaaccctggacattccaaataaagaataggcccctgcctggctcctgggagataacctctaagccattagaatatcttgcctgataagagtgtttttgtttacctgtgggccttgggccatgcagtatcagcttgaccttgcaaggtcaagctgaggagactaagttagccatgtgggcagtgaagcatgccaatgtgatcaatccctagtaaaagccctggacacctaggcatgggtgagctactctggttggtaatactctgtgcacacatcattgtagccacacatcattgctgggagaattaagcattatcctgaagactctgccaggagaggataattggaagttctcttggaccttaccttatgtgcctttcttcattgctgattttaatctgtatcctttcactgtaataaactgtaactatgagtgc

SEQ ID NO: 33156 - DNA, 903 bp, Homo sapiens
  misc_feature (2)..(2): n is a, c, g, or t
  misc_feature (5)..(5): n is a, c, g, or t
  misc_feature (49)..(49): n is a, c, g, or t
cnggnacttctgtgcttgttctcttgtaggagaggttagttttgttttnctatttcacgtgttcatattctttgagaagcttctgtatgagtgtaccatctctgcctcctctcctttgtaccctgccttctggctgtatggcttacatcctggaaattacctgataataaagcaagtaaaggtgtaaggtttcctaagggattacaacacagtggtttcctggtctctctccctgtcatcaatcagggtagtaacttgacttaagaataccactttttagaaaaattacgatagagatgggatctcactaggttgcccaggctggtgtcgaattcctggtctcaagcagtcctcccacctcagcctcccaaggtgctgggattacaggtgtgagccaccacacctggccaagaataccacttttgaagttaatccttttgtgtgatacaggatgaacttgggatgtttgaaccctggacattccaaataaagaataggcccctgcctggctcctgggagataacctctaagccattagaatatcttgcctgataagagtgtttttgtttacctgtgggccttgggccatgcagtatcagcttgaccttgcaaggtcaagctgaggagactaagttagccatgtgggcagtgaagcatgccaatgtgatcaatccctagtaaaagccctggacacctaggcatgggtgagctactctggttggtaatactctgtgcacacatcattgtagccacacatcattgctgggagaattaagcattatcctgaagactctgccaggagaggataattggaagttctcttggaccttaccttatgtgcctttcttcattgctgattttaatctgtatcctttcactgtaataaactgtaactatgagtgc

SEQ ID NO: 33157 - DNA, 2289 bp, Homo sapiens
taaccactcaaaatgcacattttctatgacattataaggccccaaccaaacaaatcagtcaggagtaaaagggaacatctcccatattgaagggacatctcccttcaataataccaaattggagccataaatgatacattttagcacaaacttttacccactgtatattaaaatacaatcatgtaaaagccgggcatggtggctcatgcctgtaatcccagcactttgagaggtcaaggcgggtggatcacttgaggtcggctacaaacttgtattatctgatacctactttgagcccaggccagaaaggataaagtaaagcatgagacgttgttagttcatttcaacagattggggagttgtgggttttagtctctgacgcttcattgttaccatgagagcctgcaagtttttcttttttctctcttttttttttttaacctctttgggtcatctgggaggacgtggtgctcttttagctctaacattttctggttgcaatgcgtttaggactgggatgcgaagtgagtgagtgagtgagccttctcaggaaaacactttctagaattttgtccgagtgtctgttgggaaacgcgcttacatcccgcagaaggcggtaaggacacagcgcacaactctgcattatacctgcgagttaaaaagccaagggttcgctcactcaaccttgaatgcgcgtcagaatcacctgggggaggttttacaaaatacccgtgctccacccaagacaatgaaatcagactccctgcgagcggggccgaacatcagcatttttgaggacgctccctgtggctgtgcatcggtgatctttaatcccctgctacttgttagaggagctggatgacacttcgtgggctcattctcataaataagctgctgaatggagtcctctcctcccaagagttgtcggtgttgcatcttttttgttgtttatttttttttaagccaacggacgaagacatccaacggtgctgcatcttaatggagggacatccagctaaagggaatcttggagacctccgcgggtttctagcagctcgcggcatgttggtttcccagggcaagaggccgccactgaaggtcagctctgtctttccagctgggcactggaggctctaagtctgttttcagcaggatcggaggaaggagacggggtggcgccaaggaaggaggagaaaaggcggccgagaaaaggaggagggcaaggggaagaggaagggcgagggaggagcctgaggagactcgcccggctcaaccccgacgtccgcgccccggccgcctgttggccatggcgggcctgggcctgggctccgccgttcccgtgtggctggccgaggacgacctcggctgcatcatctgccaggggctgctggactggcccgccacgctgccctgcggccacagcttctgccgccactgcctggaggccctgtggggcgcccgcgacgcccgccgctgggcctgccccacttgccgccagggcgccgcgcagcagccgcacctgcggaagaacacgctactgcaggacctggccgacaagtaccgccgcgccgcacgcgagatacaggcgggctccgaccctgcccactgcccctgcccgggctccagttccctctccagcgcggccgcgaggccccggcgccgcccggaactgcagcgggtagggaggccgggcccgcagctcccctggctcccccgggctgcccgccgcctgaccctttcccatgtggctcgaacccctttcctcagccgttctacttttacgttccttttctcagtctaaaagtcgagttccgctcttcggaggcactttggaaagttcataaaagtatgaagaagtagaaaaaaacaaattccccatcttccgaaagcttgtcaacttagctgttacacagcttggcatatttcaacttcttcccaatcgatcttcggtctctttctctgaaacttgtaaaattgtggtggcagtagagaagagcatcacagaagttgctcaggagctgacagagctggtggaacatcttgtagacattgtcagaagcctgcagaatcagaggcccctatcagaatctggaccagacaacgaactgagcatcctgggcaaggtaggctccactgggagaggaaaggatgtggaagggaatagggctagggattgctttcaactggaacaacatgaacatatttgaacctgaaggatacaataagtctcaatcttttattgttctctttactaccagacatggatgattggacatttggaatgcttga

SEQ ID NO: 33158 - DNA, 363 bp, Homo sapiens
cccggcgccgcccggaactgcagcgggtagggaggccgggcccgcagctcccctggctcccccgggctgcccgccgcctgaccctttcccatgtggctcgaacccctttcctcagccgttctacttttacgttccttttctcagtctaaaagtcgagttccgctcttcggaggcactttggaaagttcataaaagtatgaagaagtagaaaaaaacaaattccccatcttccgaaagcttgtcaacttagctgttacacagcttggcatatttcaacttcttcccaatcgatcttcggtctctttctctgaaacttgtaaaattgtggtaagatctatataacattaaaactggccattttaa

SEQ ID NO: 33159 - DNA, 389 bp, Homo sapiens
gcctcgacttcccaggctcaagtgatcctcccagctctcagcctccaaagtagctggcactacaagtgtacacccccacacaaggctaagttttgtattttttgtagagacagggtttcaacatattatccaggctggtgtcgaattcctgggctccagggatccacaccgcctcagcctcccaaagtgctgggattacaggccccttgttcagccactgcacctggccccttattttgtttttgttttctaatatactttgatgtaatcagcttgagaaagcaacacaatttcaaatcctatcttctagatgcaagcagtgttaaatttgttaataaatttgcttttcacacctttctttaaataaaaggtatatctctctttcttgt

SEQ ID NO: 33160 - DNA, 1529 bp, Homo sapiens
cacaaaaaccctgactatcacctgatagattgcttgtgctgcctgataattactcgcacttttcccaggctagtgcaaatcttcaggggccgtccaggactacagagctgtttcaccctaccttggcttcaatctcttcccccatgctcgaaggtgcggagctgtacttcaacgtggaccatggctacctggagggcctggttcgaggatgcaaggccagcctcctgacccagcaagactatatcaacctggtccagtgtgagaccctagaagacctgaaaattcatctccagactactgattatggtaactttttggctaatcacacaaatcctcttactgtttccaaaattgacactgagatgaggaaaagactatgtggagaatttgagtatttccggaatcattccctggagcccctcagcacatttctcacctatatgacgtgcagttatatgatagacaatgtgattctgctgatgaatggtgcattgcagaaaaaatctgtgaaagaaattctggggaagtgccaccccttgggccgtttcacagaaatggaagctgtcaacattgcagagacaccttcagatctctttaatgccattctgatcgaaacgccattagctccattcttccaagactgcatgtctgaaaatgctctagatgaactgaatattgaattgctacgcaataaactatacaagtcttaccttgaggcattctataaattctgtaagaatcatggtgatgtcacagcagaagttatgtgtcccattcttgagtttgaggccgacagacgtgcttttatcatcactcttaactcctttggcactgaattgagcaaagaagaccgagagaccctctatccaaccttcggcaaactctatcctgaggggttgcggctgttggctcaagcagaagactttgaccagatgaagaacgtagcggatcattacggagtatacaaacctttatttgaagctgtaggtggcagtgggggaaagacattggaggacgtgttttacgagcgtgaggtacaaatgaatgtgctggcattcaacagacagttccactacggtgtgttttatgcatatgtaaagctgaaggaacaggaaattagaaatattgtgtggatagcagaatgtatttcacagaggcatcgaactaaaatcaacagttacattccaattttataacccaagtaaggttctcaaatgtagaaaattataaatgttaaaaggaagttattgaagaaaataaaagaaattatgttatattatctagactacacaaaagtaagccacactatatcttcatgagttgcaaatccatggaaacacagtaaaccagccctgaaacaaagcatttccttgttttcagtggtattagatcttgtttccacatgtctgtctcattcttcactgggccttacaggttagttttaattaactctatggtatttttcttattcttgtttgatcatgttaaaaattggacctaataaaagtattttattcttgcttttccat

SEQ ID NO: 33161 - DNA, 1761 bp, Homo sapiens
ttaaaatcacagataaaataagttcctatggtgaggaatggaggcctccagctgacagagagcaaagaactgaggcctgcgacaactataggcgtgatcctgggaaccgattctcaacctcatctgagccttgagacgactgctgctctggccgacagcctgacggcaacctcctgagacagctctgagaggagattttccaggttcaagtcccgagacgaggtttcaccgtgctggccaagctggtctccacctcaggtgatctgccccgctaagcctccgcaagtgctgggattacaggctagtgcaaatcttcaggggccgtccaggactacagagctgtttcaccctaccttggcttcaatctcttcccccatgctcgaaggtgcggagctgtacttcaacgtggaccatggctacctggagggcctggttcgaggatgcaaggccagcctcctgacccagcaagactatatcaacctggtccagtgtgagaccctagaagacctgaaaattcatctccagactactgattatggtaactttttggctaatcacacaaatcctcttactgtttccaaaattgacactgagatgaggaaaagactatgtggagaatttgagtatttccggaatcattccctggagcccctcagcacatttctcacctatatgacgtgcagttatatgatagacaatgtgattctgctgatgaatggtgcattgcagaaaaaatctgtgaaagaaattctggggaagtgccaccccttgggccgtttcacagaaatggaagctgtcaacattgcagagacaccttcagatctctttaatgccattctgatcgaaacgccattagctccattcttccaagactgcatgtctgaaaatgctctagatgaactgaatattgaattgctacgcaataaactatacaagtcttaccttgaggcattctataaattctgtaagaatcatggtgatgtcacagcagaagttatgtgtcccattcttgagtttgaggccgacagacgtgcttttatcatcactcttaactcctttggcactgaattgagcaaagaagaccgagagaccctctatccaaccttcggcaaactctatcctgaggggttgcggctgttggctcaagcagaagactttgaccagatgaagaacgtagcggatcattacggagtatacaaacctttatttgaagctgtaggtggcagtgggggaaagacattggaggacgtgttttacgagcgtgaggtacaaatgaatgtgctggcattcaacagacagttccactacggtgtgttttatgcatatgtaaagctgaaggaacaggaaattagaaatattgtgtggatagcagaatgtatttcacagaggcatcgaactaaaatcaacagttacattccaattttataacccaagtaaggttctcaaatgtagaaaattataaatgttaaaaggaagttattgaagaaaataaaagaaattatgttatattatctagactacacaaaagtaagccacactatatcttcatgagttgcaaatccatggaaacacagtaaaccagccctgaaacaaagcatttccttgttttcagtggtattagatcttgtttccacatgtctgtctcattcttcactgggccttacaggttagttttaattaactctatggtatttttcttattcttgtttgatcatgttaaaaattggacctaataaaagtattttattcttgcttttccat

SEQ ID NO: 33162 - DNA, 646 bp, Homo sapiens
ttaaaatcacagataaaataagttcctatggtgaggaatggaggcctccagctgacagagagcaaagaactgaggcctgcgacaactataggcgtgatcctgggaaccgattctcaacctcatctgagccttgagacgactgctgctctggccgacagcctgacggcaacctcctgagacagctctgagaggagattttccaggttcaagtcccgagacgaggtttcaccgtgctggccaagctggtctccacctcaggtgatctgccccgctaagcctccgcaagtgctgggattacaggctagtgcaaatcttcaggggccgtccaggactacagagctgtttcaccctaccttggcttcaatctcttcccccatgctcgaaggtgcggagctgtacttcaacgtggaccatggctacctggagggcctggttcgaggatgcaaggccagcctcctgacccagcaagactatatcaacctggccccttattttgtttttgttttctaatatactttgatgtaatcagcttgagaaagcaacacaatttcaaatcctatcttctagatgcaagcagtgttaaatttgttaataaatttgcttttcacacctttctttaaataaaaggtatatctctctttcttgt

SEQ ID NO: 33163 - DNA, 299 bp, Homo sapiens
ggtggggcttctggtatggggctgagcaagtgccagtggcctctggcctgggagccaaaggacagaggaagatctgaggatccgacaagacctggggccaatcatcaagggtcagggaggctgagaggtggaataagggaagagctggaaggaaagggaggccgggccatcttctagcaaagctgtcagcccagagaacactgtcttggggtgcagcacttgagggagaaatctgaggtgccatttctaagcccaacaggcaccatgccaagcattttgaaggggtgtaaaggacagtt

SEQ ID NO: 33164 - DNA, 434 bp, Homo sapiens
cttggctaatttttttgttgttgtttcaaatatttgtagagacagggtcttgctatgttgaccaagctggtatggtactctgatcctccagcctcagcctcccaaagcaatgagattataggaatgagccaccgcacccagccaaaactaacagttccaggggagcgtcctgatttttagactggattcttctgggctgctgggaagatcctggtgagtcataatgagagaggctgggctgatagtgaagtttgcctcatgtcctcattctcctcaatttttctgagtccctctccttgccttccttttccactcatctatcacagacatcaaatccagaggtattccaaagcaggcagccttctactagctcatcctacaaattttacctctgaacatgaacataaaaatcttcagactctatctcaaaaaaa

SEQ ID NO: 33165 - DNA, 578 bp, Homo sapiens
gtttatatggttgattttaatcaataatactgagagaacttaacacgtttaatataaatcctcacaacacccctgtgaggtaagtattgcttacacccactttacggatgggaaatcagaaagagcaagaagtaacaatctcaagagttataaataaaaaaattttttgttttcttataaggcagactgtgctgagttctgatgatacgctaataagaacaaatactaaaacagtctctatttttctccagaaaacaactgcgtgagatttcaaaagaaggaaaaattttaagctgactcaaggggaaaatgtttagtatctgcctgatacacacgaaagtgcatatgacatttccagtttcaagcttggtaatcattatgcaaactgcactatactattaggatactggctaacagtatagctccattttgtggagatgtagtcaaaaaataaaggttttagctggaagaacttttttttttttgagatggagtctcgctctgtcacccaggctggagcgcagtggcgcgatctccgcccaccgcaacctccgcctggcgacacagcacgactgtct

SEQ ID NO: 33166 - DNA, 1246 bp, Homo sapiens
atgcatgagaagcagtagatgtgtctctcattctttcttctttcattgcctgctaagtactgtttgtataccagtagcatgggtcagagtgggaggttgtcaacagaagagtccagcatgtatccatgatggactctcgatcaactttatatgattaactcatataaaacagccctgtatggaagctgaggctgcctcttcctagccacaggatattgacctactttccccttcttatctgcttgcaaaatatttgttgtacttagtgtgttctccctgtcacaacgaatgtttgtctctctctttcatatgaactgaaggctaaagtgctagttaaatcagtggaaaaagcaatggagaagaaaagttgctggagaccatggccaaaatggaggtgaaaacctcacttctggacaatatgattggagttggggatatggttcttttagaacctctcaatgaggagaccttcatcaacaacctcaagaagcgctttgaccacagtgaaatatacacatacattggaagtgtggttatatctgttaacccataccggtctttacccatttattcaccagagaaagtggaagaatacaggaacagaaatttttatgaactgagccctcacatctttgccctttcggatgaagcatacagatccctacgagatcaagataaggaccaatgtattctcattactggggaaagtggagcaggaaaaacagaggccagtaagcttgtcatgtcctatgtggcagctgtttgtggaaaaggagcagaagttaatcaagttaaagaacagcttttacagtccaacccggtcctggaagcttttggaaatgccaaaactgtaaggaatgacaactcctctagatttggcaaatatatggatattgaatttgactttaaaggcgatccactaggaggagtaataagtaactatcttttagagaaatctcgggttgttaaacagccaagaggtgaaagaaacttccactgtgttctatcagctgctctctggtggcctctgaagagctcctcaataaacttagcttgagaggggattcagcagggtattactaacctgagtccgatttccggccaaagtgcatggagtggattgatggccgcaattttagaaccgtgcggaaatgccatgcagatggtggcctactgcatcaggagctgaatctggctggggtgtgcgcaaggtaactgcggaacttgggttcagccaattctgtga

SEQ ID NO: 33167 - DNA, 1105 bp, Homo sapiens
atgcatgagaagcagtagatgtgtctctcattctttcttctttcattgcctgctaagtactgtttgtataccagtagcatgggtcagagtgggaggttgtcaacagaagagtccagcatgtatccatgatggactctcgatcaactttatatgattaactcatataaaacagccctgtatggaagctgaggctgcctcttcctagccacaggatattgacctactttccccttcttatctgcttgcaaaatatttgttgtacttagtgtgttctccctgtcacaacgaatgtttgtctctctctttcatatgaactgaaggctaaagtgctagttaaatcagtggaaaaagcaatggagaagaaaagttgctggagaccatggccaaaatggaggtgaaaacctcacttctggacaatatgattggagttggggatatggttcttttagaacctctcaatgaggagaccttcatcaacaacctcaagaagcgctttgaccacagtgaaatatacacatacattggaagtgtggttatatctgttaacccataccggtctttacccatttattcaccagagaaagtggaagaatacaggaacagaaatttttatgaactgagccctcacatctttgccctttcggatgaagcatacagatccctacgagatcaagataaggaccaatgtattctcattactggggaaagtggagcaggaaaaacagaggccagtaagcttgtcatgtcctatgtggcagctgtttgtggaaaaggagcagaagttaatcaagttaaagaacagcttttacagtccaacccggtcctggaagcttttggaaatgccaaaactgtaaggaatgacaactcctctagatttggcaaatatatggatattgaatttgactttaaaggcgatccactaggaggagtaataagtaactgtgagtatttttctccagtccttgtaagaagttcagaatactaaaacatatatttatagtagaatagtttagatacttgttgtctttgaggccataagaatatgttccttgctttatatttagactttaagctttgcatttcagattgttttataatagaatgt

SEQ ID NO: 33168 - DNA, 902 bp, Homo sapiens
accagagcgcgcggcgcgcagtcggccggcagccgcgggacagccttggcagaacagccgcggcgggagccccgcagccccgggctgggcccgcgtcccggagcgccaccggagagcgaggacgacgtggaggcggagtggcgcccggcgaggtagcgccaggcgagctggagaccatggccaaaatggaggtgaaaacctcacttctggacaatatgattggagttggggatatggttcttttagaacctctcaatgaggagaccttcatcaacaacctcaagaagcgctttgaccacagtgaaatatacacatacattggaagtgtggttatatctgttaacccataccggtctttacccatttattcaccagagaaagtggaagaatacaggaacagaaatttttatgaactgagccctcacatctttgccctttcggatgaagcatacagatccctacgagatcaagataaggaccaatgtattctcattactggggaaagtggagcaggaaaaacagaggccagtaagcttgtcatgtcctatgtggcagctgtttgtggaaaaggagcagaagttaatcaagttaaagaacagcttttacagtccaacccggtcctggaagcttttggaaatgccaaaactgtaaggaatgacaactcctctagatttggcaaatatatggatattgaatttgactttaaaggcgatccactaggaggagtaataagtaactgtgagtatttttctccagtccttgtaagaagttcagaatactaaaacatatatttatagtagaatagtttagatacttgttgtctttgaggccataagaatatgttccttgctttatatttagactttaagctttgcatttcagattgttttataatagaatgt

SEQ ID NO: 33169 - DNA, 849 bp, Homo sapiens
ggaagttaacttttcttaatcgggtttctacaaggtagttcactattgtatgttttatttcttaccaaaacttttcttgggaaaatttgttttattgctccatacgtggtcaagctggagaccatggccaaaatggaggtgaaaacctcacttctggacaatatgattggagttggggatatggttcttttagaacctctcaatgaggagaccttcatcaacaacctcaagaagcgctttgaccacagtgaaatatacacatacattggaagtgtggttatatctgttaacccataccggtctttacccatttattcaccagagaaagtggaagaatacaggaacagaaatttttatgaactgagccctcacatctttgccctttcggatgaagcatacagatccctacgagatcaagataaggaccaatgtattctcattactggggaaagtggagcaggaaaaacagaggccagtaagcttgtcatgtcctatgtggcagctgtttgtggaaaaggagcagaagttaatcaagttaaagaacagcttttacagtccaacccggtcctggaagcttttggaaatgccaaaactgtaaggaatgacaactcctctagatttggcaaatatatggatattgaatttgactttaaaggcgatccactaggaggagtaataagtaactgtgagtatttttctccagtccttgtaagaagttcagaatactaaaacatatatttatagtagaatagtttagatacttgttgtctttgaggccataagaatatgttccttgctttatatttagactttaagctttgcatttcagattgttttataatagaatgt

SEQ ID NO: 33170 - DNA, 1041 bp, Homo sapiens
acctgaattcccgggcctgagtctcagagcgcggtttgcatctttgcaggctgtaggcgcatgatgtcacaagttattggaagaaatccctccaacctaggttgggacagatgaaggcggcgcttattggtgttcaccaaaacaccagcatggtgtaccagctttggctagatgatgctcaggaaaacacagatcctggtgccgaacatgaggacagggcaggccgaaggagaaagtggaaggaggggagcttctctctcagcctcatccttctgggcctggatgctggagagtcatgaggtgcttcagagtactctgggtgaggagggaaagatggtgcccaccacatggaggccagcctaggtcttgtatgaaacctgtgagctagctgaaagcagagaacccagcagaggattctgggaaggtcctgggggatggcagagccagcagagagagggtatggatccaccaggcataggatggaacagagcactattgaccacagtgaactggggcatgggcaatcaataaacacatattagattaagctattgagactcagggatttttatacaactgacattccctaagaagccatgatcttcctgtctcaggaggtgcataagcagtggttgaatgttcaacagtcaagaatgttataaaaagaggttcttgggagagtggacctgatggccagcaaaaatcatagctcacatttattgagttattatggctcaggcatgtgcacatattcttttatttaaatctacaatatgctttatcatgctcattttatacatgaggaacacaaggcatggagaggttagataacatgcctaagatcatgaagcaagcaagggggagaaaagatacccttctcactccttccagacagctcacttcaccaccactccccactgtctctaaagcaaaagttatttgaaggcttagggactggtttggtattatccatgcagggcggtttgttttgtttttcttttaaaatttcagcctatgcttaaaagatttcatgtaaaaatt

SEQ ID NO: 33171 - DNA, 999 bp, Homo sapiens
ccccagacgggcctgtctaattgcaggaaaacaaactcagggctcccactgattctacattacggaggatctcatttctgtaccctgccctggaagttggcaaaaaataaatacctggagtgggattgctagatcacatggaaaacacagatcctggtgccgaacatgaggacagggcaggccgaaggagaaagtggaaggaggggagcttctctctcagcctcatccttctgggcctggatgctggagagtcatgaggtgcttcagagtactctgggtgaggagggaaagatggtgcccaccacatggaggccagcctaggtcttgtatgaaacctgtgagctagctgaaagcagagaacccagcagaggattctgggaaggtcctgggggatggcagagccagcagagagagggtatggatccaccaggcataggatggaacagagcactattgaccacagtgaactggggcatgggcaatcaataaacacatattagattaagctattgagactcagggatttttatacaactgacattccctaagaagccatgatcttcctgtctcaggaggtgcataagcagtggttgaatgttcaacagtcaagaatgttataaaaagaggttcttgggagagtggacctgatggccagcaaaaatcatagctcacatttattgagttattatggctcaggcatgtgcacatattcttttatttaaatctacaatatgctttatcatgctcattttatacatgaggaacacaaggcatggagaggttagataacatgcctaagatcatgaagcaagcaagggggagaaaagatacccttctcactccttccagacagctcacttcaccaccactccccactgtctctaaagcaaaagttatttgaaggcttagggactggtttggtattatccatgcagggcggtttgttttgtttttcttttaaaatttcagcctatgcttaaaagatttcatgtaaaaatt

SEQ ID NO: 33172 - DNA, 921 bp, Homo sapiens
acctgaattcccgggcctgagtctcagagcgcggtttgcatctttgcaggctgtaggcgcatgatgtcacaagttattggaagaaatccctccaacctaggttgggacagatgaaggcggcgcttattggtgttcaccaaaacaccagcatggtgtaccagctttggctagatgatgctcagaacaccagagactgggtaattaataaaaagaagaaattgatctggcctacagttctggagccttggaagtccgagatcaaggagctgcatctgggttctaggatgcctcataaaggcccgtagtgtactttctgtctacttcacttagctccgcatttgcaatttctgttaacatgcatacagttgaatggatggccaggatcaaagctatctgctgtgagacacaatgagaaatgcttttgtgtaaaggactcaatgatcacccgctccagaggatgcagcaaaaaggtgccatcttggaagcagagaccagctctcaccagacgctgaatctgctggctccctgatcttggacttcccagggtccagaactctgagaaataaatttctattgtttataatgtactcagtctgtggtattttgttatagcagcaggaatggactgagagaaaagcagctagttgaggatttgagaatttgggtgtttttttggtttttggttttggtttgagtgaatctttttgcaaaacattttagacattttatgtacaataaaatgcttccattttaaatatgcatttgagtaggctttagaaatgtatacaaccatgtaaacaccttaatcaagacacagaatgttttcataaccctcaaaagttcccttgtatccagttgcagtaaatctccccttctccccacccccaggtgactcctaatctgctttctatcagtttagaa

SEQ ID NO: 33173 - DNA, 1141 bp, Homo sapiens
acctgaattcccgggcctgagtctcagagcgcggtttgcatctttgcaggctgtaggcgcatgatgtcacaagttattggaagaaatccctccaacctaggttgggacagatgaaggcggcgcttattggtgttcaccaaaacaccagcatggtgtaccagctttggctagatgatgctcaggaaaacacagatcctggtgccgaacatgaggacagggcaggccgaaggagaaagtggaaggaggggagcttctctctcagcctcatccttctgggcctggatgctggagagtcatgaggtgcttcagagtactctgggtgaggagggaaagatggtgcccaccacatggaggccagcctaggtcttgtatgaaacctgtgagcaggagccaggccgtggcctgctgactgcatctgccagatgactaccaatgtgagattctctctcccttgctgtctttgaaaaagcaagttgccatgtgaagagggccatatagcataggagctgaaggcagcctccaactgacggcaagaaaatgaggtcctcagtctgacaacctgcaagaaactgaatgttctaaaagccacatgagcttgggagcagatctgaccccagccaaatctctgaagtccgcaggcaggaaatgaagatcagaaaaaggctattgtctcatgaatatgagccagactccacagaagctggagtccttcattatggagctaaacacatacacctggcttaggagtcagaaaaactgaaagagaattcagggaagtagagaaattgcaagcccagatgctgcttcataccaaagaagcaagtcagcaggtcagcaacaatgtgtatcagttccaaaatgacttacacaggtaccaagacaagacattatatacacttatatagtcaaatactttaaaactgttaacaaacttgctacaattgtctcatttgtcttttaaccttaatatcacagatcaagtttgtaatctcaaaagttcaccctggctgctgtgtggagtattctcttatctgctcatattacactgtgcttattcattcatcagttaatggaaatttgggttgtttcctgattttgactgtaatgaataatgttgctgtaaacattcatgtacaaaaaa

SEQ ID NO: 33174 - DNA, 1528 bp, Homo sapiens
acctgaattcccgggcctgagtctcagagcgcggtttgcatctttgcaggctgtaggcgcatgatgtcacaagttattggaagaaatccctccaacctaggttgggacagatgaaggcggcgcttattggtgttcaccaaaacaccagcatggtgtaccagctttggctagatgatgctcaggaaaacacagatcctggtgccgaacatgaggacagggcaggccgaaggagaaagtggaaggaggggagcttctctctcagcctcatccttctgggcctggatgctggagagtcatgaggtgcttcagagtactctgggtgaggagggaaagatggtgcccaccacatggaggccagcctaggtcttgtatgaaacctgtgagcaggagccaggccgtggcctgctgactgcatctgccagatgactaccaatgtgagattctctctcccttgctgtctttgaaaaagcaagttgccatgtgaagagggccatatagcataggagctgaaggcagcctccaactgacggcaagaaaatgaggtcctcagtctgacaacctgcaagaaactgaatgttctaaaagccacatgagcttgggagcagatctgaccccagccaaatctctgaagtccgcaggcaggaaatgaagatcagaaaaaggctattgtctcatgaatatgagccagactccacagaagctggagtccttcattatggagctaaacacatacacctggcttaggagtcagaaaaactgaaagagaattcagggaagtagagaaattgcaagcccagatgctgcttcataccaaagaagcaagtcagcaggtcagcaacaatgtgtatcagttccaaaatgacttacacagctagctgaaagcagagaacccagcagaggattctgggaaggtcctgggggatggcagagccagcagagagagggtatggatccaccaggcataggatggaacagagcactattgaccacagtgaactggggcatgggcaatcaataaacacatattagattaagctattgagactcagggatttttatacaactgacattccctaagaagccatgatcttcctgtctcaggaggtgcataagcagtggttgaatgttcaacagtcaagaatgttataaaaagaggttcttgggagagtggacctgatggccagcaaaaatcatagctcacatttattgagttattatggctcaggcatgtgcacatattcttttatttaaatctacaatatgctttatcatgctcattttatacatgaggaacacaaggcatggagaggttagataacatgcctaagatcatgaagcaagcaagggggagaaaagatacccttctcactccttccagacagctcacttcaccaccactccccactgtctctaaagcaaaagttatttgaaggcttagggactggtttggtattatccatgcagggcggtttgttttgtttttcttttaaaatttcagcctatgcttaaaagatttcatgtaaaaatt

SEQ ID NO: 33175 - DNA, 388 bp, Homo sapiens
tccagaagctgatagtgttgatcaacaaaatgagacaatttgtactataatccctggtttcagtagtttcttggttttgtctttctcatacctagactacctccttgtaactggaagtcacagacatgctatctaatgttccagcataatttttccttttggagtgaccctgagactagtgactgcagcccagactggctgaagtctgagcttggcccagtgtcaagatctgtcctaacattctcttgtattttcattttagctagtacaggtagcagtaacaaaggaattgtttcattaactttttttttttttttttagaggagtcttgtgctattgcccaggcttcgagtgcagtggctcactgaaggcttgaattcctgggctc

SEQ ID NO: 33176 - DNA, 4254 bp, Homo sapiens
  misc_feature (221)..(221): n is a, c, g, or t
  misc_feature (1162)..(1162): n is a, c, g, or t
  misc_feature (2730)..(2730): n is a, c, g, or t
  misc_feature (3714)..(3714): n is a, c, g, or t
  misc_feature (3779)..(3779): n is a, c, g, or t
ggaaaagaagacaatacaaataacttgaaaaggagtatgaactggatatggtcagagagacaaatcacatgttccatgctgctttaattggaaaacaattctttcatggggttactttcccttcagctgagataattaagtctggactgacactggtgaccagctactgatgataaatagtcagttactaacaatgcagcaatcagtaatcaaaatttatntttcccaggttaccagggcacagttgaagagaaaagtgggtttgataaggctgggagataggcttcctcgtgcagtattcacatggcttcttctccacagcatctgggtgggatcattaggtctgctttatttcaaccttgtcataaaagaaaacatacctattgtctgtgtttgcattagaaatactttgcacgccccatgctggaaaagaagtttctgtatgcctccctgtaatttttaatggattaaattatattctgtaagtgggttggcatgagggtaggtttcaatgtccagttgttattggacatgaaataaacttagatatttttaaagccactccatgcagctggcacaagtaaaggtttttgaatcatggctaattatccctggctgtggctgaaggcattgaaatgaaagggattaggattgtaatatggatgccatttgtatttgtatcagcggctccgatatttgtctactcactagaatcacctggggttctactaaaatttttcacagcccaggtcacacccaagccacttaagtcaaaatctctgggtatggaacacagacatctttaatttttgaagctctctaggtgattccaatgtgcaggcaagtttggaaagcactggtctatactcagttttatgcatatttttgcataaaaatatgaaactgctgtctaggccgggtgcagtggctcatgcatgtaatcccaacactttgggagactgaggcgggtggatcacttgagcccaggagttcgagaccggcctcggcaacatgatgaaatcccgtctctacaaaaaatacaaaaattagctgggcatggtggcgcgtgcctgtagtctcagactcgggaggctgaggcaggagaatcgcttgaacccgagaggtggaggttgcagtgagcagagattgcatcactgcactncagcctgggcagcagagcaagaccctgtctcaaaaagaaaagaaactgctgtctcccaccccagtaagaccttaaaccccaagagaaaaagcataatgtgacccacccggtgagaaaagcaacctcaaagtggtcaaaatagactcagctctgaggagaaggagaaccaaaaaaggaggaaacatgcctttgctcctttcttagtgcttagctcagtgttagttgaataaatgaataaaaagagaaaagaggaggtggtcatgtgcagctcagttcccagaaagggtactgggatgggatggaggaaactcattgaccacatccttgcacagtgggcacctctccacactgccctcctcgctctcctgatgaattctttcttttctctctagtttagtcaatctcctgtcttctctgggagcagtcattctgagatggtcgaagatgactgtctcaggggaggacactcattcagcttttaaaatgtcaggtgtcctttggggatgcttcaaaagcagcatttgggcttcctttgccataggaaatgaacaggaagaaaggccagtgaagacagagaacaagggggcaggtgcctgcccagaaatcaacgtgcagatagagaagggagaaaaaaaaaagttcccatctgcagtactggaatcccacttatggagcataaaataaaaaatatgaaggttatttgctttgagctcatctgattctttgtgttagactgcactgtggcctgcctttctgagtttgctacatttttatttgaaagctaataaattagccattcatatggcacgcaggcgggtttatagtgctgtgtaaaccaccagccaccatatacatccatctgcatcacagatcgactagaattatcactactgacaccacaatgcctataaattccctcacccgcatcctgtattccagaatatttctattggctgaccatactgcgaagagacgggatcctgggaaaaatccttttttctttctagtttagtgggaactggcaggttatcagtaggtctaagctctaggtttgcctctagagacaaagagtttaaaaaatagtaactagttttattttgttctaaaaaaacacatgcacaagaaaaatattgtcaataaaacataaaaatgtacaacataaaaagtgagtttcttacccaaatctgacctcctacacctcctccctcagagacactgttactagttgcttatatatgagaactgcaatattcacgacactttaaaaaatcagtcaatcttggcttgtatttcaagtttcattaacaaaaaacagccccctttacaatcactggggtactgaatgcactgatatttaaaaatacccaaagctatttggatcaaaatcaacaaatatttaataagtaccttcaatgtgcacaatgttgcctaaacaagccatttctaatgaggattttacacatatatgtttcatactttttttctggtgtataacaactaatctaaaattatgttagtgaaagggtagtcagtctttgttttaaatgtttttctcagaaacaaaaatnatctctttctctccctcacccctctaacttctcagcctttcacacattctctcatttgagttctgttttacgccgagacatctgggtaggtggtatgttctggccagagtactctctctcataccttccccagatggattggctcaaggatctaatattccccaaagaaataaaacatcccccaactggccattgaagaagagctgcagtgctttctattctaaacacacatgtgttgaaggatgagagacggtcatgacagagccagtgtccccacccatgacttgtctgcagagggggagacttccagtctgtagcccactgcaggatactaggctgactgcacagccccgttacccctcaaactccagccagctacatctgtatgtcttctctccagctggctggcccagctgttctggtgtcaaagaaagttatgagtcactgggaagggctttgagacaagagtagagttaaaccatctcctggggtctgtgtgtcattggcaatcgagccttagtaacaagccagtgcttgacagtcccaggaaggccacacaaccagagcttcactttgtattccacaatccacacctctgggctttgtagtgaaaaagaggtagagctgtatagatgctggatgtctccatccctagagactttctgtcattggccatgatgttcattaggttcttgccatctgtctccttgcaaatgctttttggctgtagatctatatcctatacaatctggtcaaactgggagacaatgaatgaggattggccaaagcctgaggactttcttttggtcttttgattccagggacattattacaacagagccctaggagcagctgccagcaagagtttgagtccacagcaggatccttctggaccatctgtggcttcctgctctgaacagtacttcctcactacgtgggaggaaagacttgtcagaggatccaagaaccataggcagtcaggtnctccatggggaccctaaatgttgtctggtctagccctgcatcctgcgtctaaattcctggagaanattccttctgtcctagcactcatctggcctccccatccccttaggtaggctagtccatgtgtgtgttacaggggctgctagaaagttcctccctattttgagcagaaatcatctttatagtttctacccattgatcttaggtctaccctcacaactgtcctctaggtttctcttcagatatctgaaaaatgccagtctctgccccttgcatctccccttttccttgttttagtactgatttttcagaaattgtcctgatactctttttttagagcttcattcactatttaatgaatatttgttaagagtttactgtacattagactttgttcttgaatgggagggatacagtgattaataagaccaatttacccacatagagcttacattctagtggaggggaggaacagacaaaagcaagtgaaaatctcaattaggaacaaatccattgcagaaatgtagaataaagtgatga

SEQ ID NO: 33177 - DNA, 725 bp, Homo sapiens
ttaatgaggcattagtggtggtggatgaggggtggccagaaactaaacagcaaaagcaaagagaaagctgcagaaaccataagtaagcagaggtcatgagacatttgtataatgagatcacggagccacagggtggcagaagccatgaagcagcaaggcaacaatgggctagaagccatgaagcaataggagccacgaggaacagaaaccgtgagacaaaactgactatgagatccacaaagcagcagaaggcttgaatagataagatcatgagacagtagaagcgatgagactgcaagaaccacaaggtagccagaaccatgtggcaacatggcaacaggaatggaagaggcagcaggagctacaatgcagaaaagccatggattaataggaactgaagcgccgggagccatgaagctgcaggacccatgaggcagaaaaagccatgggctagcatcgaggggggcagaaagaagttagtcagtagcagtaggaggagtataaatacagccagaaaggagttgagtcaccaatttgggaagcactagagaagggagcaacagatgcctgcagctgagggggtgacaagataagccaggctctagagctgctttggatcatgaaccattttcaagtttctgttcttccatgaggctgcctgtgtagctgttcttgtcttccttatttccctgtgaatgctttaataaatccccatcactaacctg

SEQ ID NO: 33178 - DNA, 422 bp, Homo sapiens
gccccggcctcccatgctcaagacattggcccacctcagtttccagaatagctgggactaccggcaagcacaaccatgcctggctaatttttgtattttttgtagagaccgggttgcgccacatttcccaggctggtcttgaactcctcggcctaccaaggtgttgggattacagttgtgagccactgcaccagctacagaaggcttctctaaggaagcaacttttgagtccaaatctggataagtgtcattcaagggacagggcattctagctggaaagacagcctacaaaagtgtgaagggggaaatgtactttggacattaagtgtataaaagggccagtttgggaagggcatggtggctcacacccataatcccagcactttgggaggccgaggtgggtggctcacctgaggtcagga

SEQ ID NO: 33179 - DNA, 589 bp, Homo sapiens
tgaggaagggctgaaagacctgaaggtcagggctagagatgggagctagcatcccaccctttcctgccctgctgatctgaattaagtgaacagagtgaccagatcatgagcctaaagctgtgttcttcctccactcattcttcattcattctacagatatttactgagcacatactatgcaccaagcatgatgttaaatcctggagagagatcaatcaacaagacatatggtctctgaactccaagaagtcgtagtcaggagacttgtatcctgagagctcctcatggttcactgaagctgggggcagcatggttgaggggaaagagccctggaattggagtcagagatctgatactggttctaacttaactgtgtaacattggtcaagttcattctcctctgtaggcttccctttccctgtctgattcagggatcttgtcattgcaaagatggggcctactctaccagcttaaataaaacagagcaacaagaaggacagaaaagtatctgacaggagccaaggccccgcaacggactggaagtcagggactgaggttcctctccaggagtcactcacctctgcttctc

SEQ ID NO: 33180 - DNA, 791 bp, Homo sapiens
aaagacaatctgtcaaggtgagacttagagactaagtctcatttgggttgtctcctagaagaagggtttataaagttgacagtttagggcagaaccttaaactgactccaggtgagagtttcttgcttttgaaaataaagatcttgaagggaagattgttcccacatgaggtgggaacaggaggacatgttgagctcccagagttaaatccttaggtttctctgcctcatcaccagggactgatagactcttgggcccctttcaacagagtctgactcccaagcttgggaatatgtttgtcacttggcgttttccttgtaaatggtagtgcagtgtagactgcttaaatgaaccaattcagatgtttccttttcttccgtttttattcctttatagaatattgctgtcatataactcccctttttcccatatattaaataactgtattcccttgttggtgtgttttaattttttggctgaaaatgagtaggcaggccgggcacggtggctcactcctgtaatcccagcactttgcaaggccaaggcaggtggatcatttgaggtcaggagttcgagaccagcctgaccaacaaggtgaaactccgtctctactaaaatacaaaaattagcctggtgtggtggtgggtgcctgtaatctcagctactcaggaggctgaggcaggagaattgcttgaacccgtgaggcagaggttgcagtgacccgagatcatgccacgccactgcactccagcctgggcgacagagcaagactctgtctcaaaaaaaaaaaa

SEQ ID NO: 33181 - DNA, 441 bp, Homo sapiens
cccatcatcaccaatcaccagaaaaatgcaaatcaaaaccatctcacaccaagtcagaatggcttttgttagaaagcttaaagacagcagtggctaacaaggctgtttagaaaggggaatacttattcaccactggtggaatgtaaattactccagccactgtggagaacagtttggagatttctcagagaactaagagtggaactactgtttgatctagcaactatattatgggtttataccctaaggaaagtaagtcattctactaaaaggacacatgaacctgtatgttcatcgcagtgctatttgcaatagcaaagacatggaatcaccccaggtgcacatcaactctggattggataaagaaaatgtggtacctctatgccagggaatactatacagccataaaaagaataaaatctgcagcaacatggatgcagc

SEQ ID NO: 33182 - DNA, 627 bp, Homo sapiens
  misc_feature (4)..(4): n is a, c, g, or t
  misc_feature (6)..(6): n is a, c, g, or t
  misc_feature (16)..(16): n is a, c, g, or t
  misc_feature (37)..(37): n is a, c, g, or t
  misc_feature (46)..(46): n is a, c, g, or t
tacntnttccacttgncgacatttgagatccgattgncatcgacgnctggagctactcaacattgtggagggaatttaccagctgaagaaagcctgccggcgagagctacaaactgagcaaggccagctgctcacacccgaggaggtcgtggacaggatcttcctcctggtggatgagaatggagatggccagctgtctctgaacgagtttgttgaaggtgcccgtcgggacaagtgggtgatgaagatgctgcagatggacatgaatcccagcagctggctcgctcagcagagacggaaaagtgccatgttctgaggagtctggggcccctccacgactccaggctcacccaggtttccagggtagtaggagggtccctggctcagcctgctcatgcccactcttcccctggtgttgacttcctggcaccccctgtgcagggctgagtggggatggggaagggctgctgggtttgaagtggccaacagggcatagtccattttggaggagtccctgggatggtgaagggaattctactccagggtgatcattctcttgaggggctgagaggtggttcctcgattttcactaccacattagcttggctctctgtctcagagggtatt

SEQ ID NO: 33183 - DNA, 267 bp, Homo sapiens
agccgcaagcttgaggtctgagactgcaggatagttggcataagacgtgtaggcgcatcctgggagcgaggtctctcctcctgcccccagacccaggtctccccttcttctacatgaccacctctcctcccccttgctcaggccagctgtctctgaacgagtttgttgaaggtgcccgtcgggacaagtgggtgatgaagatgctgcagatggacatgaatcccagcagctggctcgctcagcagagacggaaaagtgccatgttct

SEQ ID NO: 33184 - DNA, 967 bp, Homo sapiens
ttttcctgagtttaggtgatatggtgtttgtacctattgtagtacagcaaagaataacaccagaaataactttaaaaaattatttggcctcaaatattcttattaacagaatggagctgggtataagttcattaataaattaaaaaaaaaaatcctgtagctgctacttttccaaatgtagtgactcagaaaaggacaggtataagcaaaaggaagaactctgcagtggtggtcatttcattctcggttgctaagccttagatttcttgcctgtttccttctggtgaagtataggggaaaaacatgaccatgttgctcctgtgtctttggagttccctgactcctcccatcaagcctgagagccctctaggattaggatctttctgactgttacaccacccaagagttgagtcttacttacattccactgtatgcagtaaatacaaaatgaacagaggtttagaatgttattattgtgagtctgaagctaaacactagtttgaactataaagatattttaacagtctttttatgaaaaggtattacgtctataatgtcactggaccctgaaagttagcactgaaaaggaatactgattttgtttttgagtccccttctgtgcagaatgttttatttccagttgcaccagttcaacttaatatatattatatacagtttgtttgtgagacattggattggttattgatagtggatacaaaaatgagcaatattctgttcttgccctcaggaagtttacagtttaataaggcagataagcaggattacttataaatctaatattaggcaaatgtaggtgccacacaagaatatttgtaaaggccaggcaccgtggcacatgcctgtaatcctagcattttgggatgccaagacaggagaatcacatgagcccaggagttcgagacctgtagtcccagctactctagaggctcaagtaggaggatcacct

SEQ ID NO: 33185 - DNA, 435 bp, Homo sapiens
  misc_feature (6)..(6): n is a, c, g, or t
  misc_feature (176)..(176): n is a, c, g, or t
gatttnacttgagagaaggtgagtacaagcaatttgcagttgttgtaatgacagattactgcgcaagtgtgaatccaaacagtatagcttttaaattttaaagcatttggtaaattatcgctgagtttttttctgttgccaatagcaaactgcttttccattaatggagaattcangcctttcaagcattttaaatatgacaatatttataaatgtatggtttggaggaatcgtttaaattctctttcctaattttctttcttttgaagatagattctttcaacaagtaatttgtagtaatgactgtgttgacttcaattttggagcgcagtagctatgttaaagatgaactatttggtctcattgaagccaacacagaacttgctgctgtgttttttcttcagtgataaataaaatacttacagaatttgaaaa

SEQ ID NO: 33186 - DNA, 290 bp, Homo sapiens
aattcaagcttctaacgatgtacggggacatgcctttcaagcattttaaatatgacaatatttataaatgtatggtttggaggaatcgtttaaattctctttcctaattttctttcttttgaagatagattctttcaacaagtaatttgtagtaatgactgtgttgacttcaattttggagcgcagtagctatgttaaagatgaactatttggtctcattgaagccaacacagaacttgctgctgtgttttttcttcagtgataaataaaatacttacagaatttgaaaa

SEQ ID NO: 33187 - DNA, 1510 bp, Homo sapiens
ttggatgtgatgacttatactaattgactgttgaatgtcaaaccaaacttaacattcttgtaatagaaaccagcagggtgtgtacacttttgtgtgtgtgtgcaggtttatacacataaacacaataatacttggacttatttatttaaaatttagatttattagagggagcatggccataaaataaaataaaataaaatttaggatttaagtcgagctcagtggctcacatctattatccccgcactttggaaggccaaggcagggtagattgtctaagctcaggaatttgagaccaacgtggtgaaactcggtctctacaaaaaccacaaaaattagccaggtatggtgtcacatgcctgttgtcccagctacttggagggctggggcaggagtattgcgtgagcccgggaggttaaggctgaagtgagtcatgttcacgccactgcactacagcttggataacaaagcgagactctgtctccaaaaataaaataagtaaataaataaataaataaaatttagatcaatttgctgttatatttttatataaactatgtttatgacataagtataaacaaaaaaataaaataagtaaataaataaataaaatttagattaatttgctgttatatttttatataagctatttattatgaatttgtttatttctcctttgagttttgttagtttttgttttatgcatttagaggttgtgttattaggctcatacccatttaaaattgacgttttctggtagagtgaacctttattatgtgaaatggctttctctaccactcacaatggtatttttttcactttcccccttatttttgaattttcaatgttcttataatgatgtcatgtctcttgaatagagttgttttaatcaagtctgtcaaattttgtcttttgtgtatttcgtgaatttacatttattgtaattactgatatagttgtgttcataaataccatcttactacttgtttccatttgtcttacccatttttgtttttattttttcttttctgttgctttctttctgattatttttttaattccgtttccccccctaccattggttctacttacacattcttttataatttctttagtggtttcctccacagattacaacttctgtacattattataatctaatacaaattttactttttattgtttcccagacaatgctatgatctcacaatactcaatctctatttacctccattctactcttgcatgtatattattattactcattttaatttcacatatattttacacctaacgagacattattattattgctatgtgcagtcaatattcatttgtattcacccacatattcactctgtttttttttattatttcctgcatttctgtgattctatcatagatcagttttcttctacctgaagaattccctttagtattttttgtgtatgcacatctgctggcagcaaattttctcaggtttttttgtgtttttttgtttgcttgtttt

SEQ ID NO: 33188 - DNA, 1713 bp, Homo sapiens
ttggatgtgatgacttatactaattgactgttgaatgtcaaaccaaacttaacattcttgtaatagaaaccagcagggtgtgtacacttttgtgtgtgtgtgcaggtttatacacataaacacaataatacttggacttatttatttaaaatttagatttattagagggagcatggccataaaataaaataaaataaaatttaggatttaagtcgagctcagtggctcacatctattatccccgcactttggaaggccaaggcagggtagattgtctaagctcaggaatttgagaccaacgtggtgaaactcggtctctacaaaaaccacaaaaattagccaggtatggtgtcacatgcctgttgtcccagctacttggagggctggggcaggagtattgcgtgagcccgggaggttaaggctgaagtgagtcatgttcacgccactgcactacagcttggataacaaagcgagactctgtctccaaaaataaaataagtaaataaataaataaataaaatttagatcaatttgctgttatatttttatataaactatgtttatgacataagtataaacaaaaaaataaaataagtaaataaataaataaaatttagattaatttgctgttatatttttatataagctatgtttatgacagactttcctataatattcttatcataatgttcttgcacttgaaagaatgtgcattctgcagttgtgtgcaggtgttatgtgtatttcaactgggtcaagtttgttaatcaggttggtcaaattatctacgtctttactgatatttttgtctgtttttctataaattactgagagaggataaagcctgccactgttattatgaatttgtttatttctcctttgagttttgttagtttttgttttatgcatttagaggttgtgttattaggctcatacccatttaaaattgacgttttctggtagagtgaacctttattatgtgaaatggctttctctaccactcacaatggtatttttttcactttcccccttatttttgaattttcaatgttcttataatgatgtcatgtctcttgaatagagttgttttaatcaagtctgtcaaattttgtcttttgtgtatttcgtgaatttacatttattgtaattactgatatagttgtgttcataaataccatcttactacttgtttccatttgtcttacccatttttgtttttattttttcttttctgttgctttctttctgattatttttttaattccgtttccccccctaccattggttctacttacacattcttttataatttctttagtggtttcctccacagattacaacttctgtacattattataatctaatacaaattttactttttattgtttcccagacaatgctatgatctcacaatactcaatctctatttacctccattctactcttgcatgtatattattattactcattttaatttcacatatattttacacctaacgagacattattattattgctatgtgcagtcaatattcatttgtattcacccacatattcactctgtttttttttattatttcctgcatttctgtgattctatcatagatcagttttcttctacctgaagaattccctttagtattttttgtgtatgcacatctgctggcagcaaattttctcaggtttttttgtgtttttttgtttgcttgtttt

SEQ ID NO: 33189 - DNA, 163 bp, Homo sapiens
ccactggggaaaaacgggctctgggtgaccccctcatgggaaagacggagcatagggaagcctatacatggattccttcagactgtgcctgtctttttccctcatgatccagatgtgtatccttactacaatgcaataaatcttcactgtgagtacaaccata

SEQ ID NO: 33190 - DNA, 175 bp, Homo sapiens
acaggctaagattctgggtgaggaggaatccctagacagagaggaaattttgctatttgttatcaggtaatagatcatgtttcacttggaaaaacagctgggaagatggaagtttattggaaagctggccagatctcctgagccaggggtatcaataaactctctcaagtagtga

SEQ ID NO: 33191 - DNA, 425 bp, Homo sapiens
accccatctcttaaacagaccaaccagccaaaaaatgtaggggtagggttagaaagctaagttgagaaaaatgattgatggtggtaattcagtgtgacagctcctgcaaacacatcatggagtgccacagagagctcaccatctccacaattttctattcgtttggtgacccttaaaggtatagcacattagaaaaagtgggctcacattaaaatacactgtgcatgtattgctgtgactgtgagatttttttttctgctttggagccaaatgggagtagcagctgcttggcccccttgtaacacatgtggagtttgtgtcggccatgggctcatctgccccagaattcggctgccacctaagtgcccttcacatagtcctgccagccctcattgctctgttaggatctgggagttaaaaaaaaa

SEQ ID NO: 33192 - DNA, 713 bp, Homo sapiens
tctacccccagccccagccttcttctggcactcagagaagtcagccaagcttcgattgtttgatggggaggcatggcctgacaactaatgactcagagctaccagtctctggcctctccaaaatgccaagaactcatcgatctgcagaccttgtaaccctcaaggaatcactataccctcaatggatatgaaaatagacaccactgtgattcaagaaggtgatctaagaaagaagcacagtgaaaatttataccagagatttcaacatgggagggtggaaatctagaggtagggagaggtgagtaaagcagtggaaacattagacccagttcacctgccttgaaatctcagctctctttcttactaaatcctacctactatgtgacctttttgttaggctgtttttgtgttactataaagaaatatctcaggctgggcatggtggctcatgcctgtaatcccagcactttgggaggcccaggcaggcagatcacctgaggttgggagtttgagaccagcctggccaacatggtgaaacggcgtttctattaaaaatacaaaaaattagccaggcgtggtggtggcggctgtaatcccagttactcgggaggctgaggtaggagagttgcttgaacccggcaggcagaggttgcaatgagccaagatcacggcattgcactccagcctgggccacaagagcagaattctgtcta

SEQ ID NO: 33193 - DNA, 323 bp, Homo sapiens
tcttttttttttttaaattgtggacttaaagaaaaatattttatttttaatgccttttcctgggataagcattaaagatgcccaaaaagaaaaaaaaaacaaaagaatgatagtgatggtaaggcaagattctagcaaagagagatgggagataaatggctgagagttcaggtgaatatttaatatattaaaaattgtattaaagtttttcaaggtattttaaaaataactattttgatactagaaaaaaagtccattttttaatttaaatatgagatctatgtacaattttaataaaatcctgtccatgaaacacgcatggc

SEQ ID NO: 33194 - DNA, 419 bp, Homo sapiens
aatttctatatttgtaatgttttataatatgtataatatattggtacactagtatataaaatttacaattcacaaataaatataaatattttggaggttgtttaggctacattttttaacaatgatgtgcctgaataaaaccattggtgactctcctagatttttacaaattagttaatacctttgcccagcaaattccccagccttccagttgtaatgccaagcttctttggggaagctcctctgggtctgtccctaattgtgctgtctggcccttgatttcatgcctggctttctccacaagactgggagggtccttgtttttcttaaaggctggcatatagtctaggcacacacattggactactgcaatatgaactgcatctactgcttgtccctgttctctcccccttccagaa

SEQ ID NO: 33195 - DNA, 498 bp, Homo sapiens
ccgggcgtggtggcagcactatgggaggccaaggcgggtgaatcatgaggtcaggagtttgagaccagcctgaccaacgcggtgaaaccccgtctctactaaaaatacgaaaaattagccgggcatggtggcacgcacctgtaatcccagctactcaggaggctgaggcaggagaatcgcttgaacccaggaggcagaggttgcagtgcaccaagatcgcaccattgcattccagcctgggtgacagagcgagactcttgtctcaaaaaaaaaaaaaaaaagaaacttgagaggtgagggtcacacaggttcagaaagatgagtctttgggggtcacagggcttcagagataatggcaccactgaaaggttacaaagaggacagagtagcagcattactggggagttgtcccagaaaatgaggtatttgtaggttagggagattgacagaaatagaatcatcgagagtataaaacgatttccaagagagaggaacact

SEQ ID NO: 33196 - DNA, 270 bp, Homo sapiens
  misc_feature (265)..(265): n is a, c, g, or t
gcatcagccactgcacccggccagaaagcttattttaaaaggtgtgtatagagccccttatgtttctgcttgattttttaaataacatatttatgtctatatattttaggatgtaatatctcactgtatgtgttgctttgcatcattgaacatttttggtaattattttctatatattttagatatttcattaaactaatacagaatttcatattcagggccactgcactcggcctaattttttttttttctgaagagatgaggncttgc

SEQ ID NO: 33197 - DNA, 432 bp, Homo sapiens
tcacttctaagatttggttacaaagagactgtggcttttatcttgggtgcttgccctctctacctttctctcagagcccctacactgttaagtagccttgtgggaaggcccaagagccagtgatgtctaggcctaacagctagtgacctgccagcagccaggtgagtgagtttggtggtggatccttgatagtcaagctttaatgattgcagccccagccaacaccttgactgcagccttgtgagagtccctgaaccagaagcacttagcttacccagctggatttctgatccacataaactgagataataaatgctgttttaagctactgtgattgaaaatgaattgttacatagaaatagataactaggccgggtgtggtggctcacatctgtaatcccagcacattgtgaggccgaggcaggcggatcg

SEQ ID NO: 33198 - DNA, 478 bp, Homo sapiens
aatctaaatataattaacattttctgtgccatagctagtttgttaacatttttaatgattaatattttaggtgtatgaaccatagtatatttaatcatttcattgtggttcgtttataagttttttttaagatttgtatttatgttcatgataagcacgtccattattcatgtggcggtgggatggaagtaaagcagtacctgttgtccccgtaagtttacctttccaagaatgaatctgtagctgtctttgatggcagtagcttgttgtgcagtagagctgaagaaaacaaggaatgaaagaagatagcctgtttccccatttaggcttgagaattcttttttaggtagtgcagagcatatgttcttgaccttcagtccaggagtgtctaaggatccacaaatacagtcatccgtctgtatccatggtttcgtatccttggattcaacagactgcaggtggaaaattactctaaagg

SEQ ID NO: 33199 - DNA, 226 bp, Homo sapiens
aattttgtctctgtgtcgaaatatttcaaacttcttcaccattactattgagccagtgttcacttaccattctgaaaatcctagggcccttaaggattgtgctaaatctactctgggtgtgccctataaatgcaacagcaaagcctggatgatagtacaactgtttacaacatggtttactgaatactttaagcccactattgagaccaacagctcagaaaaaaaa

SEQ ID NO: 33200 - DNA, 749 bp, Homo sapiens
attcatccccgtttcttcactgtaaaaataacacgttttttgtagatgacttggaaaatacagacagccatatgttagaagtaaacaaaaccactcctaacccgtctacttcttaaaagccggtacttaacatttgaagcgtatttcttttcatcgctttgttttaaggtttttgtggaatatttttcatcatttctatttagagggtccctttttcttcacttaacatcaataccctaagcatttcttcctgttgctaagttcacgtgcaccccttccctaactgcataatactgggtcatatgggggtatcataattgacataaccaatgcccaaatatgggaacatttaagattggctctctctcttcaatttttcattttaagactggcattaccatctactttccccgagcacggacttttgttcctgttccagattgtttctctagggatcaattcctagaagtggattgcttgattctcagggtgatacatatgccaaatagtataccagagtattgaaggtacttgtttctaggaatcccactttgacatatcgacgatgagaataattaatattcaaatagcctgacctatgtcaggcactgtgtaccacaaactagcttacaatggggctacactgttgtgccaccgggttttacatgtgaagaaaccatggtttgcagtgagccaagattgcgccattgcactccagcctgggcaacagagcaaaaacttcatccaaa

SEQ ID NO: 33201 - DNA, 619 bp, Homo sapiens
agaagctggcaaatgccagaaaaccgattctcccctaaaacatccagaaaggaatgcagccctgccaacatcttgattttagcccagtgacacccttgtaggactttggacctccagatctgtaagataatacatttgtgttgttttaagccatgaagtttatagtaatttgtttcagcagcaacagaaaacaaatacatttgtattgttatctccttccctgagttttggcagccagaacctgtctcagagatctattcctgttctcactgtggtcctcttcccttcacctagctcactccttcccctctaatattctattcctctacatctgcttgggaaagtataaacctcatattctaagtctttgctggctttggttatagaaaatacacagccgtgttgtctcattctattatctgtcagtagcagaaacctgaaattggtagcttcaacaaactagtgtttgcttttctcttgaataaaggaagtcaggaggtaaatatatgatcaccttttaattactttttaaaatatttcttaggttttgttaacaatgggaaactgcttacatttcttttgaaaattaaaatgaattataaagttaaaaagaaaaaaa

SEQ ID NO: 33202 - DNA, 3374 bp, Homo sapiens
gcgggacacagtctcttctcctctgctcttctttgggcagagggtctcaaagtttccgtctgctctgtgcagagggagtggagctccgagggcttgtggcttcgcagttcctcttctgtgaacagccgagatcacgcgctcctccccagccacccgttcctccccgcagtccttcccctccactcccttccccttctctgctcatgcagggagcccaggaagcctccgcctcagagatgctaccgctgctgctgcccctgctgtgggcaggggccctggctcaggagcggagattccagctggaggggccagagtcactgacggtgcaggagggtctgtgcgtcctcgtaccctgcagattgcccactacccttccagcctcgtactatggttatggctactggttcctggaaggggctgatgttccagtggccacaaacgacccagacgaagaagtgcaggaggagacccggggccgattccacctcctctgggatcccagaaggaagaactgctccctgagcatcagagatgcccggaggagggacaatgctgcatacttctttcggttgaagtccaaatggatgaaatacggttatacatcttccaagctctctgtgcgtgtgatggccctgacccacaggcccaacatctccatcccagggaccctggagtctggccatcccagcaatctgacctgctctgtgccctgggtctgtgagcaggggacgccccccatcttctcctggatgtcagctgcccccacctccctgggccccaggaccacccagtcctcggtgctcacaatcaccccacggccccaggaccacagcaccaacctcacctgtcaggtgacgttccctggagccggtgtgaccatggagagaaccatccagctcaatgtctcctatgctccacagaaagtggccatcagcatcttccaaggaaacagcgcagccttcaaaatcctgcaaaacacctcgtccctccctgtcctggagggccaggctctgcggctgctctgtgatgctgacggcaacccccctgcacacctgagctggttccagggcttccccgccctgaacgccacccccatctccaataccggggtcctggagctgcctcaagtagggtctgcagaagaaggagatttcacctgccgtgctcagcatcctctgggctccctgcaaatctctctgagtctctttgtgcattggaaaccagaaggcagggctggtggtgtcctgggagcagtctggggagctagcatcacaaccctggttttcctctgtgtttgcttcatcttcagagtgaagactagaaggaagaaagcagcccagccagtgcaaaacacggatgatgtgaaccccgtcatggtctcaggctccaggggtcatcagcaccagttccagacaggcatagtttcagaccaccctgctgaggctggccccatctcagaagatgagcaggagctccactacgctgtcctacacttccacaaggtgcaacctcaggaaccaaaggtcaccgacactgagtactcagaaatcaagatacacaagtgaggaattgtccaaagccataaccttgattggagagaacatggtacctctcagtgtattggttactagggctgccacagcaatgtaccacaaaccgagtgacataaacacagaactttattttcgtatagtttcagatgttagaggtctgagaacaaggtgttatcagggttggtcccttctaaggcctctcttgttggcttgtagatggctgtctcctccttgtgtcttcacatggtctttcctctgagtgtgtttgtgtcctaatcttctcttcttataaagacactagtcatattggattagggcctccccatgacctaatttaaataaattaactatttaaagaccctccaaatacagtaaccttctgagatattgagatttaggacttccaacatatgaattttagaagggaacaatttagcccataacactgtgtccaattcttttaaaattaatgtttttgttgtaaatggactatataaataccttcgtatatatggcagaccacaggacttctgtccaagagaactgagttcaactccatctatgccacctgggcaacagagcgagactccaactcagaaaaagcaaaacaaaacaaacaaacaagcaaaaaaccacaattagactgacagctgacttttttaggagcaatattggaaggctaaatgcaatagaaagatgtctttgatgccttaagagaaataaatgttgttttagaaagcctactcaatgaaaacacattttaagactgaaagtgaaatatagatattttaaggaaaaccaaaatatgtgagtgttaataaagaaaagatttctcaaataaattctaaaacatataattcaggtattaggaaagtgatcccagattagatttttgagatccaaaaaaaatgaaaacctaggaaagtagcaaatatgtgagcaaaatgaaacaaatacttgttgtaaaaatgatggtttgtagaggggtcaaacatcaaatgtaatattgaaataccaatattatatagcccagaaactataataacataaagttcagaagagtgtaaatagaatttatattacataaagtctttatatttttccagagaaaattaaatgttatgatgaatgttacatttggataatttattattgtaatctcgaggaaatttacttaaagaatcgaagccaagtttaccacctgtgaactagaggaagtataaaaggtgatagaaacattattcagtcaaaccagagaagacaagaaataagagattaaagaaaaaaaggatggatagaacatgtagaatacaagtataagattctgtatttagactcaaatacagtctaagaatcacattaagcacaagtgaattaaatgctacagttaaaataccagcatagtaagactgggggaaagtgtagctatacgttgtttataagagatctacataaaagataaatataggggaggttgtgtgtagaaggatgaaaaaagacataccatgaaaaccgtaaccaaaagaaactgatgtagtcagtcaagtttccactggaaaaaacaagtctgtaggatgtatgtattgaaagattcaactattcacaatagcaaagacatggaatcaacctaaatgcccatcaatgatagagtgggtaaagaaaatatggtacatatactcaatgaactactatgcagccataaaaaagaatgagatcatgtcctttgcagggacatgaatggagctggaggccattatccttagcaaactgacacaggaacagaaaaccacataccacatgttgacacttctaagagggagc

SEQ ID NO: 33203 - DNA, 3320 bp, Homo sapiens
gcgggacacagtctcttctcctctgctcttctttgggcagagggtctcaaagtttccgtctgctctgtgcagagggagtggagctccgagggcttgtggcttcgcagttcctcttctgtgaacagccgagatcacgcgctcctccccagccacccgttcctccccgcagtccttcccctccactcccttccccttctctgctcatgcagggagcccaggaagcctccgcctcagagatgctaccgctgctgctgcccctgctgtgggcaggggccctggctcaggagcggagattccagctggaggggccagagtcactgacggtgcaggagggtctgtgcgtcctcgtaccctgcagattgcccactacccttccagcctcgtactatggttatggctactggttcctggaaggggctgatgttccagtggccacaaacgacccagacgaagaagtgcaggaggagacccggggccgattccacctcctctgggatcccagaaggaagaactgctccctgagcatcagagatgcccggaggagggacaatgctgcatacttctttcggttgaagtccaaatggatgaaatacggttatacatcttccaagctctctgtgcgtgtgatggccctgacccacaggcccaacatctccatcccagggaccctggagtctggccatcccagcaatctgacctgctctgtgccctgggtctgtgagcaggggacgccccccatcttctcctggatgtcagctgcccccacctccctgggccccaggaccacccagtcctcggtgctcacaatcaccccacggccccaggaccacagcaccaacctcacctgtcaggtgacgttccctggagccggtgtgaccatggagagaaccatccagctcaatgtctcctatgctccacagaaagtggccatcagcatcttccaaggaaacagcgcagccttcaaaatcctgcaaaacacctcgtccctccctgtcctggagggccaggctctgcggctgctctgtgatgctgacggcaacccccctgcacacctgagctggttccagggcttccccgccctgaacgccacccccatctccaataccggggtcctggagctgcctcaagtagggtctgcagaagaaggagatttcacctgccgtgctcagcatcctctgggctccctgcaaatctctctgagtctctttgtgcattggaaaccagaaggcagggctggtggtgtcctgggagcagtctggggagctagcatcacaaccctggttttcctctgtgtttgcttcatcttcagagtgaagactagaaggaagaaagcagcccagccagtgcaaaacacggatgatgtgaaccccgtcatggtctcaggctccaggggtcatcagcaccagttccagacaggcatagtttcagaccaccctgctgaggctggccccatctcagaagatgagcaggagctccactacgctgtcctacacttccacaaggtgcaacctcaggaaccaaaggtcaccgacactgagtactcagaaatcaagatacacaagtgaggaattgtccaaagccataaccttgattggagagaacatggtacctctcagtgtattggttactagggctgccacagcaatgtaccacaaaccgagtgacataaacacagaactttattttcgtatagtttcagatgttagaggtctgagaacaaggtgttatcagggttggtcccttctaaggcctctcttgttggcttgtagatggctgtctcctccttgtgtcttcacatggtctttcctctgagtgtgtttgtgtcctaatcttctcttcttataaagacactagtcatattggattagggcctccccatgacctaatttaaataaattaactatttaaagaccctccaaatacagtaaccttctgagatattgagatttaggacttccaacatatgaattttagaagggaacaatttagcccataacactgtgtccaattcttttagaccacaggacttctgtccaagagaactgagttcaactccatctatgccacctgggcaacagagcgagactccaactcagaaaaagcaaaacaaaacaaacaaacaagcaaaaaaccacaattagactgacagctgacttttttaggagcaatattggaaggctaaatgcaatagaaagatgtctttgatgccttaagagaaataaatgttgttttagaaagcctactcaatgaaaacacattttaagactgaaagtgaaatatagatattttaaggaaaaccaaaatatgtgagtgttaataaagaaaagatttctcaaataaattctaaaacatataattcaggtattaggaaagtgatcccagattagatttttgagatccaaaaaaaatgaaaacctaggaaagtagcaaatatgtgagcaaaatgaaacaaatacttgttgtaaaaatgatggtttgtagaggggtcaaacatcaaatgtaatattgaaataccaatattatatagcccagaaactataataacataaagttcagaagagtgtaaatagaatttatattacataaagtctttatatttttccagagaaaattaaatgttatgatgaatgttacatttggataatttattattgtaatctcgaggaaatttacttaaagaatcgaagccaagtttaccacctgtgaactagaggaagtataaaaggtgatagaaacattattcagtcaaaccagagaagacaagaaataagagattaaagaaaaaaaggatggatagaacatgtagaatacaagtataagattctgtatttagactcaaatacagtctaagaatcacattaagcacaagtgaattaaatgctacagttaaaataccagcatagtaagactgggggaaagtgtagctatacgttgtttataagagatctacataaaagataaatataggggaggttgtgtgtagaaggatgaaaaaagacataccatgaaaaccgtaaccaaaagaaactgatgtagtcagtcaagtttccactggaaaaaacaagtctgtaggatgtatgtattgaaagattcaactattcacaatagcaaagacatggaatcaacctaaatgcccatcaatgatagagtgggtaaagaaaatatggtacatatactcaatgaactactatgcagccataaaaaagaatgagatcatgtcctttgcagggacatgaatggagctggaggccattatccttagcaaactgacacaggaacagaaaaccacataccacatgttgacacttctaagagggagc

SEQ ID NO: 33204 - DNA, 3198 bp, Homo sapiens
gcgggacacagtctcttctcctctgctcttctttgggcagagggtctcaaagtttccgtctgctctgtgcagagggagtggagctccgagggcttgtggcttcgcagttcctcttctgtgaacagccgagatcacgcgctcctccccagccacccgttcctccccgcagtccttcccctccactcccttccccttctctgctcatgcagggagcccaggaagcctccgcctcagagatgctaccgctgctgctgcccctgctgtgggcaggggccctggctcaggagcggagattccagctggaggggccagagtcactgacggtgcaggagggtctgtgcgtcctcgtaccctgcagattgcccactacccttccagcctcgtactatggttatggctactggttcctggaaggggctgatgttccagtggccacaaacgacccagacgaagaagtgcaggaggagacccggggccgattccacctcctctgggatcccagaaggaagaactgctccctgagcatcagagatgcccggaggagggacaatgctgcatacttctttcggttgaagtccaaatggatgaaatacggttatacatcttccaagctctctgtgcgtgtgatggccctgacccacaggcccaacatctccatcccagggaccctggagtctggccatcccagcaatctgacctgctctgtgccctgggtctgtgagcaggggacgccccccatcttctcctggatgtcagctgcccccacctccctgggccccaggaccacccagtcctcggtgctcacaatcaccccacggccccaggaccacagcaccaacctcacctgtcaggtgacgttccctggagccggtgtgaccatggagagaaccatccagctcaatgtctcctatgctccacagaaagtggccatcagcatcttccaaggaaacagcgcagccttcaaaatcctgcaaaacacctcgtccctccctgtcctggagggccaggctctgcggctgctctgtgatgctgacggcaacccccctgcacacctgagctggttccagggcttccccgccctgaacgccacccccatctccaataccggggtcctggagctgcctcaagtagggtctgcagaagaaggagatttcacctgccgtgctcagcatcctctgggctccctgcaaatctctctgagtctctttgtgcattggtcatcagcaccagttccagacaggcatagtttcagaccaccctgctgaggctggccccatctcagaagatgagcaggagctccactacgctgtcctacacttccacaaggtgcaacctcaggaaccaaaggtcaccgacactgagtactcagaaatcaagatacacaagtgaggaattgtccaaagccataaccttgattggagagaacatggtacctctcagtgtattggttactagggctgccacagcaatgtaccacaaaccgagtgacataaacacagaactttattttcgtatagtttcagatgttagaggtctgagaacaaggtgttatcagggttggtcccttctaaggcctctcttgttggcttgtagatggctgtctcctccttgtgtcttcacatggtctttcctctgagtgtgtttgtgtcctaatcttctcttcttataaagacactagtcatattggattagggcctccccatgacctaatttaaataaattaactatttaaagaccctccaaatacagtaaccttctgagatattgagatttaggacttccaacatatgaattttagaagggaacaatttagcccataacactgtgtccaattcttttaaaattaatgtttttgttgtaaatggactatataaataccttcgtatatatggcagaccacaggacttctgtccaagagaactgagttcaactccatctatgccacctgggcaacagagcgagactccaactcagaaaaagcaaaacaaaacaaacaaacaagcaaaaaaccacaattagactgacagctgacttttttaggagcaatattggaaggctaaatgcaatagaaagatgtctttgatgccttaagagaaataaatgttgttttagaaagcctactcaatgaaaacacattttaagactgaaagtgaaatatagatattttaaggaaaaccaaaatatgtgagtgttaataaagaaaagatttctcaaataaattctaaaacatataattcaggtattaggaaagtgatcccagattagatttttgagatccaaaaaaaatgaaaacctaggaaagtagcaaatatgtgagcaaaatgaaacaaatacttgttgtaaaaatgatggtttgtagaggggtcaaacatcaaatgtaatattgaaataccaatattatatagcccagaaactataataacataaagttcagaagagtgtaaatagaatttatattacataaagtctttatatttttccagagaaaattaaatgttatgatgaatgttacatttggataatttattattgtaatctcgaggaaatttacttaaagaatcgaagccaagtttaccacctgtgaactagaggaagtataaaaggtgatagaaacattattcagtcaaaccagagaagacaagaaataagagattaaagaaaaaaaggatggatagaacatgtagaatacaagtataagattctgtatttagactcaaatacagtctaagaatcacattaagcacaagtgaattaaatgctacagttaaaataccagcatagtaagactgggggaaagtgtagctatacgttgtttataagagatctacataaaagataaatataggggaggttgtgtgtagaaggatgaaaaaagacataccatgaaaaccgtaaccaaaagaaactgatgtagtcagtcaagtttccactggaaaaaacaagtctgtaggatgtatgtattgaaagattcaactattcacaatagcaaagacatggaatcaacctaaatgcccatcaatgatagagtgggtaaagaaaatatggtacatatactcaatgaactactatgcagccataaaaaagaatgagatcatgtcctttgcagggacatgaatggagctggaggccattatccttagcaaactgacacaggaacagaaaaccacataccacatgttgacacttctaagagggagc

SEQ ID NO: 33205 - DNA, 3042 bp, Homo sapiens
gcgggacacagtctcttctcctctgctcttctttgggcagagggtctcaaagtttccgtctgctctgtgcagagggagtggagctccgagggcttgtggcttcgcagttcctcttctgtgaacagccgagatcacgcgctcctccccagccacccgttcctccccgcagtccttcccctccactcccttccccttctctgctcatgcagggagcccaggaagcctccgcctcagagatgctaccgctgctgctgcccctgctgtgggcagcctcgtactatggttatggctactggttcctggaaggggctgatgttccagtggccacaaacgacccagacgaagaagtgcaggaggagacccggggccgattccacctcctctgggatcccagaaggaagaactgctccctgagcatcagagatgcccggaggagggacaatgctgcatacttctttcggttgaagtccaaatggatgaaatacggttatacatcttccaagctctctgtgcgtgtgatggccctgacccacaggcccaacatctccatcccagggaccctggagtctggccatcccagcaatctgacctgctctgtgccctgggtctgtgagcaggggacgccccccatcttctcctggatgtcagctgcccccacctccctgggccccaggaccacccagtcctcggtgctcacaatcaccccacggccccaggaccacagcaccaacctcacctgtcaggtgacgttccctggagccggtgtgaccatggagagaaccatccagctcaatgtctcctccttcaaaatcctgcaaaacacctcgtccctccctgtcctggagggccaggctctgcggctgctctgtgatgctgacggcaacccccctgcacacctgagctggttccagggcttccccgccctgaacgccacccccatctccaataccggggtcctggagctgcctcaagtagggtctgcagaagaaggagatttcacctgccgtgctcagcatcctctgggctccctgcaaatctctctgagtctctttgtgcattggtcatcagcaccagttccagacaggcatagtttcagaccaccctgctgaggctggccccatctcagaagatgagcaggagctccactacgctgtcctacacttccacaaggtgcaacctcaggaaccaaaggtcaccgacactgagtactcagaaatcaagatacacaagtgaggaattgtccaaagccataaccttgattggagagaacatggtacctctcagtgtattggttactagggctgccacagcaatgtaccacaaaccgagtgacataaacacagaactttattttcgtatagtttcagatgttagaggtctgagaacaaggtgttatcagggttggtcccttctaaggcctctcttgttggcttgtagatggctgtctcctccttgtgtcttcacatggtctttcctctgagtgtgtttgtgtcctaatcttctcttcttataaagacactagtcatattggattagggcctccccatgacctaatttaaataaattaactatttaaagaccctccaaatacagtaaccttctgagatattgagatttaggacttccaacatatgaattttagaagggaacaatttagcccataacactgtgtccaattcttttaaaattaatgtttttgttgtaaatggactatataaataccttcgtatatatggcagaccacaggacttctgtccaagagaactgagttcaactccatctatgccacctgggcaacagagcgagactccaactcagaaaaagcaaaacaaaacaaacaaacaagcaaaaaaccacaattagactgacagctgacttttttaggagcaatattggaaggctaaatgcaatagaaagatgtctttgatgccttaagagaaataaatgttgttttagaaagcctactcaatgaaaacacattttaagactgaaagtgaaatatagatattttaaggaaaaccaaaatatgtgagtgttaataaagaaaagatttctcaaataaattctaaaacatataattcaggtattaggaaagtgatcccagattagatttttgagatccaaaaaaaatgaaaacctaggaaagtagcaaatatgtgagcaaaatgaaacaaatacttgttgtaaaaatgatggtttgtagaggggtcaaacatcaaatgtaatattgaaataccaatattatatagcccagaaactataataacataaagttcagaagagtgtaaatagaatttatattacataaagtctttatatttttccagagaaaattaaatgttatgatgaatgttacatttggataatttattattgtaatctcgaggaaatttacttaaagaatcgaagccaagtttaccacctgtgaactagaggaagtataaaaggtgatagaaacattattcagtcaaaccagagaagacaagaaataagagattaaagaaaaaaaggatggatagaacatgtagaatacaagtataagattctgtatttagactcaaatacagtctaagaatcacattaagcacaagtgaattaaatgctacagttaaaataccagcatagtaagactgggggaaagtgtagctatacgttgtttataagagatctacataaaagataaatataggggaggttgtgtgtagaaggatgaaaaaagacataccatgaaaaccgtaaccaaaagaaactgatgtagtcagtcaagtttccactggaaaaaacaagtctgtaggatgtatgtattgaaagattcaactattcacaatagcaaagacatggaatcaacctaaatgcccatcaatgatagagtgggtaaagaaaatatggtacatatactcaatgaactactatgcagccataaaaaagaatgagatcatgtcctttgcagggacatgaatggagctggaggccattatccttagcaaactgacacaggaacagaaaaccacataccacatgttgacacttctaagagggagc

SEQ ID NO: 33206 - DNA, 3165 bp, Homo sapiens
gcgggacacagtctcttctcctctgctcttctttgggcagagggtctcaaagtttccgtctgctctgtgcagagggagtggagctccgagggcttgtggcttcgcagttcctcttctgtgaacagccgagatcacgcgctcctccccagccacccgttcctccccgcagtccttcccctccactcccttccccttctctgctcatgcagggagcccaggaagcctccgcctcagagatgctaccgctgctgctgcccctgctgtgggcaggggccctggctcaggagcggagattccagctggaggggccagagtcactgacggtgcaggagggtctgtgcgtcctcgtaccctgcagattgcccactacccttccagcctcgtactatggttatggctactggttcctggaaggggctgatgttccagtggccacaaacgacccagacgaagaagtgcaggaggagacccggggccgattccacctcctctgggatcccagaaggaagaactgctccctgagcatcagagatgcccggaggagggacaatgctgcatacttctttcggttgaagtccaaatggatgaaatacggttatacatcttccaagctctctgtgcgtgtgatggggaccctggagtctggccatcccagcaatctgacctgctctgtgccctgggtctgtgagcaggggacgccccccatcttctcctggatgtcagctgcccccacctccctgggccccaggaccacccagtcctcggtgctcacaatcaccccacggccccaggaccacagcaccaacctcacctgtcaggtgacgttccctggagccggtgtgaccatggagagaaccatccagctcaatgtctcctatgctccacagaaagtggccatcagcatcttccaaggaaacagcgcagccttcaaaatcctgcaaaacacctcgtccctccctgtcctggagggccaggctctgcggctgctctgtgatgctgacggcaacccccctgcacacctgagctggttccagggcttccccgccctgaacgccacccccatctccaataccggggtcctggagctgcctcaagtagggtctgcagaagaaggagatttcacctgccgtgctcagcatcctctgggctccctgcaaatctctctgagtctctttgtgcattggtcatcagcaccagttccagacaggcatagtttcagaccaccctgctgaggctggccccatctcagaagatgagcaggagctccactacgctgtcctacacttccacaaggtgcaacctcaggaaccaaaggtcaccgacactgagtactcagaaatcaagatacacaagtgaggaattgtccaaagccataaccttgattggagagaacatggtacctctcagtgtattggttactagggctgccacagcaatgtaccacaaaccgagtgacataaacacagaactttattttcgtatagtttcagatgttagaggtctgagaacaaggtgttatcagggttggtcccttctaaggcctctcttgttggcttgtagatggctgtctcctccttgtgtcttcacatggtctttcctctgagtgtgtttgtgtcctaatcttctcttcttataaagacactagtcatattggattagggcctccccatgacctaatttaaataaattaactatttaaagaccctccaaatacagtaaccttctgagatattgagatttaggacttccaacatatgaattttagaagggaacaatttagcccataacactgtgtccaattcttttaaaattaatgtttttgttgtaaatggactatataaataccttcgtatatatggcagaccacaggacttctgtccaagagaactgagttcaactccatctatgccacctgggcaacagagcgagactccaactcagaaaaagcaaaacaaaacaaacaaacaagcaaaaaaccacaattagactgacagctgacttttttaggagcaatattggaaggctaaatgcaatagaaagatgtctttgatgccttaagagaaataaatgttgttttagaaagcctactcaatgaaaacacattttaagactgaaagtgaaatatagatattttaaggaaaaccaaaatatgtgagtgttaataaagaaaagatttctcaaataaattctaaaacatataattcaggtattaggaaagtgatcccagattagatttttgagatccaaaaaaaatgaaaacctaggaaagtagcaaatatgtgagcaaaatgaaacaaatacttgttgtaaaaatgatggtttgtagaggggtcaaacatcaaatgtaatattgaaataccaatattatatagcccagaaactataataacataaagttcagaagagtgtaaatagaatttatattacataaagtctttatatttttccagagaaaattaaatgttatgatgaatgttacatttggataatttattattgtaatctcgaggaaatttacttaaagaatcgaagccaagtttaccacctgtgaactagaggaagtataaaaggtgatagaaacattattcagtcaaaccagagaagacaagaaataagagattaaagaaaaaaaggatggatagaacatgtagaatacaagtataagattctgtatttagactcaaatacagtctaagaatcacattaagcacaagtgaattaaatgctacagttaaaataccagcatagtaagactgggggaaagtgtagctatacgttgtttataagagatctacataaaagataaatataggggaggttgtgtgtagaaggatgaaaaaagacataccatgaaaaccgtaaccaaaagaaactgatgtagtcagtcaagtttccactggaaaaaacaagtctgtaggatgtatgtattgaaagattcaactattcacaatagcaaagacatggaatcaacctaaatgcccatcaatgatagagtgggtaaagaaaatatggtacatatactcaatgaactactatgcagccataaaaaagaatgagatcatgtcctttgcagggacatgaatggagctggaggccattatccttagcaaactgacacaggaacagaaaaccacataccacatgttgacacttctaagagggagc

SEQ ID NO: 33207 - DNA, 2216 bp, Homo sapiens
  misc_feature (23)..(24): n is a, c, g, or t
cttcccctccactcccttccccnnccctgcaaatctctctgagtctctttgtgcattggaaaccagaaggcagggctggtggtgtcctgggagcagtctggggagctagcatcacaaccctggttttcctctgtgtttgcttcatcttcagagtgaagactagaaggaagaaagcagcccagccagtgcaaaacacggatgatgtgaaccccgtcatggtctcaggctccaggggtcatcagcaccagttccagacaggcatagtttcagaccaccctgctgaggctggccccatctcagaagatgagcaggagctccactacgctgtcctacacttccacaaggtgcaacctcaggaaccaaaggtcaccgacactgagtactcagaaatcaagatacacaagtgaggaattgtccaaagccataaccttgattggagagaacatggtacctctcagtgtattggttactagggctgccacagcaatgtaccacaaaccgagtgacataaacacagaactttattttcgtatagtttcagatgttagaggtctgagaacaaggtgttatcagggttggtcccttctaaggcctctcttgttggcttgtagatggctgtctcctccttgtgtcttcacatggtctttcctctgagtgtgtttgtgtcctaatcttctcttcttataaagacactagtcatattggattagggcctccccatgacctaatttaaataaattaactatttaaagaccctccaaatacagtaaccttctgagatattgagatttaggacttccaacatatgaattttagaagggaacaatttagcccataacactgtgtccaattcttttaaaattaatgtttttgttgtaaatggactatataaataccttcgtatatatggcagaccacaggacttctgtccaagagaactgagttcaactccatctatgccacctgggcaacagagcgagactccaactcagaaaaagcaaaacaaaacaaacaaacaagcaaaaaaccacaattagactgacagctgacttttttaggagcaatattggaaggctaaatgcaatagaaagatgtctttgatgccttaagagaaataaatgttgttttagaaagcctactcaatgaaaacacattttaagactgaaagtgaaatatagatattttaaggaaaaccaaaatatgtgagtgttaataaagaaaagatttctcaaataaattctaaaacatataattcaggtattaggaaagtgatcccagattagatttttgagatccaaaaaaaatgaaaacctaggaaagtagcaaatatgtgagcaaaatgaaacaaatacttgttgtaaaaatgatggtttgtagaggggtcaaacatcaaatgtaatattgaaataccaatattatatagcccagaaactataataacataaagttcagaagagtgtaaatagaatttatattacataaagtctttatatttttccagagaaaattaaatgttatgatgaatgttacatttggataatttattattgtaatctcgaggaaatttacttaaagaatcgaagccaagtttaccacctgtgaactagaggaagtataaaaggtgatagaaacattattcagtcaaaccagagaagacaagaaataagagattaaagaaaaaaaggatggatagaacatgtagaatacaagtataagattctgtatttagactcaaatacagtctaagaatcacattaagcacaagtgaattaaatgctacagttaaaataccagcatagtaagactgggggaaagtgtagctatacgttgtttataagagatctacataaaagataaatataggggaggttgtgtgtagaaggatgaaaaaagacataccatgaaaaccgtaaccaaaagaaactgatgtagtcagtcaagtttccactggaaaaaacaagtctgtaggatgtatgtattgaaagattcaactattcacaatagcaaagacatggaatcaacctaaatgcccatcaatgatagagtgggtaaagaaaatatggtacatatactcaatgaactactatgcagccataaaaaagaatgagatcatgtcctttgcagggacatgaatggagctggaggccattatccttagcaaactgacacaggaacagaaaaccacataccacatgttgacacttctaagagggagc

SEQ ID NO: 33208 - DNA, 825 bp, Homo sapiens
tcttgatctcctgacctcgtgatctgccctcctcggcctcccaaagtgctgagattacaggcatgagccaccgcacccggctttgattagctgttttaacagacggtttctgctggcaatttcttctaaggctgaaaaggagtaggcccagaggccacagcaccaggtgtctgtgtcaccccctgttcagaactcttcacgactccccaaaataaggtttccatccatcatctttctgctcaaggctctctacatgatcttgtccatccagatttccccagatcaattcctcaccagtcaccaataccccatgtccatttccacagcttcctcttacaaatcccagtctccactattccagtgaaattgaagaaagcatttaatgaagaccaactattaaggaaaattcttaagagtagccatgaaaaataaaaagatagattacacttaaaagaccacagttagcagtggctcacgcctgtaatcccagcactttgggaggctgaggtgggtggatcactggaggtcaggagttcgagactggtctggccaacatggtgaaaccccatctctactaaaatacaaaaattagctcggtgtggtggcacttgcctgtaatcccaggtacttctgcaggttgaagcaggagaattgcttgaacctgggaggtggaggttgaagtgagctgagattgcatcactgcactccagcctgggcaacagagcgagactccaactcagaaaaagcaaaacaaaacaaacaaacaagcaaaaaaccacaattagactgacagctgacttttttaggagcaatattggaaggcta

SEQ ID NO: 33209 - DNA, 305 bp, Homo sapiens
actctaaccaacatctccttgtttcccctaccaccccttccccctactctctgataaccatcattctactctgattctgtgagtttgttttagattctacattaggaatcatgtgactttgtctgtctgtgcctggcttattccattcagcataacgtcctccagggaagcactttcttgtccacccccttcccctttttaaatagcagtctgttccatttggtggatgcagtatcttattactctaagaatatttctaatgttttcttttgtttcttgaattgtctgtgttgaatttttaaggc

SEQ ID NO: 33210 - DNA, 631 bp, Homo sapiens
aaacggatgaaagcgtcgaccccatcagcccttgcgctgggcccaggggaccctggcattcctggttcgagaccagggtgagcttcaggccgctaggggtacccaaaagcgggcagaaggcccatgaggggaaggtgacacacctggggcagagagaaaaaaaaacaacaaccgtgccgcggataagcggggcctgggtcccccacagaagaaactgtcttcccatcagcacttgcactgcgccccggggacactggtatccctggctcgagcccagcatgctcctcggcctgctaggggtaccccaagacagacagaaggcccatgagggaaaggtgagacacctggggcagagaagaaaataaaaaactgcgccgcccagaagtggggcctgggtcccccatggacgaacgtccctacccataagccctgcactgggccccggataccctagcatccctggctcaaaacaagggtgcgcctcgggccggctaggggtacatcaaggcgggcagaaagcccatgacgggaaagagaggcacctggggaaaaggaaaaaaaaaaaaaaagtcgacgcggccgcgaatttagtagtagtagtcgaaccggaatttcggaccgggacctgcag

SEQ ID NO: 33211 - DNA, 580 bp, Homo sapiens
agttcgacggagactctctgccccaggtgagcttcaggccgctaggggtacccaaaagcgggcagaaggcccatgaggggaaggtgacacacctggggcagagagaaaaaaaaacaacaaccgtgccgcggataagcggggcctgggtcccccacagaagaaactgtcttcccatcagcacttgcactgcgccccggggacactggtatccctggctcgagcccagcatgctcctcggcctgctaggggtaccccaagacagacagaaggcccatgagggaaaggtgagacacctggggcagagaagaaaataaaaaactgcgccgcccagaagtggggcctgggtcccccatggacgaacgtccctacccataagccctgcactgggccccggataccctagcatccctggctcaaaacaagggtgcgcctcgggccggctaggggtacatcaaggcgggcagaaagcccatgacgggaaagagaggcacctggggaaaaggaaaaaaaaaaaaaaagtcgacgcggccgcgaatttagtagtagtagtcgaaccggaatttcggaccgggacctgcag

SEQ ID NO: 33212 - DNA, 339 bp, Homo sapiens
ctaatgtgattaagaacctcctgaacatcttgtcttaatctagacgaacctgaggataacacagtaatcaggtctgctgaaacaggttatcctatatagctgtgtatttgcaaacttaggtcctgagttaggcttgatttgcccttagagctcgtttctattccagggaacatggggcattatgtcttagttgtaaaaatggttattatattaacaagacctctagatcttacggaagccaccttcttctctcagattattcatctccatttcttggtcttttgacattgattctaataaatttggggctcaaaacagctgcaaaagatgtatctgtta

SEQ ID NO: 33213 - DNA, 519 bp, Homo sapiens
gcatggtaactcatgcctataatcccaggactttgggaggctgaggcagcaggaatgcttgatcccaagagttcaagaccagcctgggcaacataacataaccccaactctactcaaaaaaaaaaaaaaaaatagcagagtggcagagtgtggtggcacacatctgtagtcccagctacccagaaggctaaggtgggaggatcacttgagcctgggaggtcaaggttgcagtgagctgtgactgcatcactgcacttcgacctcagggacagagcaagaccctcaaaaaataaaaattaaaaacatgtagcatcagttttggaactgggtactacacagaagcaggaaaaattatagaaagataatctggggaaagaacagtttattgtggtgaaataattggtaacatttttgcctgagattacttgaaagatggaaatgaacttatagatctggctaagaagatttctagacaggatgctgaaaatataatctggtttctacctatgataaaggcat

SEQ ID NO: 33214 - DNA, 336 bp, Homo sapiens
ggagttctggggcttttgttggtttaaaaccattttcagcctaggactaatcagatcctggaattgaaataattcattctccttgtcctaaacttttcttctggcttcagaagatatgatgtacaagtaatacagcgggaattggtggcgataagccatggttattaccttgactacaaacacgcctgctaagtgctaacactgaatcgtcactatctcaacaggattctttcccaaaagggaagaaaggtgtggcaaatataaatatttctaatttaattttctaagtcctcactctggcataacagaaaaatatacaaaatattgcaaagcaga

SEQ ID NO: 33215 - DNA, 309 bp, Homo sapiens
caactattttaaccagttattcctttacaagccttgataatcgcccgcactcgtgtgtgtttgagagtgtgtgtgtgtgtgtgtgtgtgtgtgagagagagagagaggatgttttctgagtgatcggaaactccttattgataaagcctttgagtcattttataaaaagccattgtgttgtttttttttaaaaaagtcttaatgatccttacatgagaactttattctttttatgtgctaattatttttccatatgatgagcatgcatttttttctaataaacgctcagcgatttgccctaggactaaa

SEQ ID NO: 33216 - DNA, 562 bp, Homo sapiens
gacaatgttgagagaatgagaaaacaagctacagactgggagaaaatatttgcaaaagactaataaaagactgttattcagaatatacaaaaaactcttgaaattcaacaagaaaatgaacaacttgattaaaaattgggaaaaagttctcacctcaacaaatacttcaccaaaagagatacactgactgcatgattgcaaataagcatatgaaaagatgctcaacatcatgcatcatgtgtcagtagggaattgcaaattaaaacgagatattgctacatgcctattagaatggccaaaatctaaaacactggcaataccaaatgatggagagaatgcagagcaagaagaactctcattcgctgctattgagaatgcataattggaagacagtttggcagtttcttataaaatgaaacaaactcttaccatacaatccagcaaaaacattctttgatatttacccaaagaggtgaaaacttacacccatacaaaaatgtcaacatcgatgttttagcagttttattcataactgctgaaacttggaaccaaccagtatgtc

SEQ ID NO: 33217 - DNA, 260 bp, Homo sapiens
tggggacggggtttcaccatgttgcccaggctggctttggactcctgggctcaagtgatcggcccgacacggcctctcaaagtgctgagatcacaagggtgagccaccacgcctggcccggggctagattttattacagaagcaccaggtcttcagaagcttcaaagaagatattgtacactaaacaattggttaagatagtaaattttatgttctacttttttaccaaaattaaacagctttaaaaattatcttaaaaa

SEQ ID NO: 33218 - DNA, 650 bp, Homo sapiens
acacataagctttggcaggtaagtaacatgatcatcactcgacagacatgctgccttaggcccaagtcacctggccaaggtccagcactcattgagcaccatgattctccatgttggacctctgcctcaaggattcatgaagaaacagagaaagtaaggggctgataaatgttcttgtgtactaaaattgcacatctggaaactgactctgaaagcggtgccatacctagaacataattagtgcaggtcaaaagcaaacccatcatcctgcgtgttgttccctctggcgcttcttcctgctccctggagccatgttggcattaaacaagacagcatgagtgggtatgtttaacacctcttgcagtattttggggttttcccctggggcctcccagaatctctgtgtgtgagagcaagccagggatgcttttgtgaaggtggcaaccccaactctaaggccagccgaaagagtactctctgtgcctctcaaattaccccagcttcctggccgtctgactcagccctgttgggcgtcagtctcatggaaagacacagtaatgggtggagacctacccattctttttgtttgtttgttctttgttttgagatggaatctagctctgtcgccaggctggagtgcagtggtgcga

SEQ ID NO: 33219 - DNA, 658 bp, Homo sapiens
aatcagttccaaaaaataagctcattaaaaggtgggggcgggggcacttaccctagatgccaggggattcttagaaccctagggaacctagggaaggaagtgctttgggccactcaggggctatggcagtaacaggaaagcccaagaacactcccaggcagagattctctctctctttctttctttcttccttcctttcttcctttctccttttctctctctctctctttctctcttttctgtctctctcttgtttctctgtctctctctctctctctgtgtctctctctctctttcttgttttttctcctgggggaaacgggagataagtggcctcttgggtcagattcactctgagcagcacattcattctttcattctctctttgctgactgtctttttcctatagactgagagagcacttagaggtagcttgcagcctccaccaaactagaccctcttcatctcaatttctcgttctaagaagaacacattgactgtctcagtttgtgtcgtgtgtccagctttgacaaagatgggagtaagtagtttgtagccccatagtacaagtatgacttggcatggagttgagaattacttagtgcttagaaaaaagggtcaacataggctagggagctcctgtaggataaagatatct

SEQ ID NO: 33220 - DNA, 453 bp, Homo sapiens
aatatcctgcctgcccatctgctgatatttgcagcaatcaaaagcagcaagaacagcagtcctctgccttatttccactttccaaattgtccatgagtgcacctaattggtggtacctaattcccatccagaactctagctgccatggagggaagcattttgtgcaatatggcgcaaattatgggtgcgttagtccccgccttaaccacggaggagacgttccaagacctccagtggatgcctgaaacctcggctagtaccgaactctgtatgtactatgtttttcttatgcttgcatacctttggtaaagtttaatttataagttaggtacactaagagattaacagtgttaactaataataaaattgaacagttaaaacaatatactgtcataaaagtaatgtgaatggactcaccacctctcccaaattatcttattttcaggtaactga

SEQ ID NO: 33221 - DNA, 385 bp, Homo sapiens
tgtaatctcagctacttgggaggctgaggcaggacaattgcttgaacctgggaggtggaggttgcagtgagccaagttcacgccactgcactccagcctgggcaacagagcgagactccgtctccaaaaggaaaaaaaaaaaaaagttaaatctcaagcttgcagggaggaaagcaatctaaaggacaatacctcaaaacaggtcaggaattgttctacagagggatgtgaatatgaatatgacgctaaaaataaaaggatgggacaaatgatttaaatatcctcccacatgccacaaaacgcagccaactgtcccctacccatccttgcatacacctggagtcttcttctctagactagaacagcacagcccaataaaatttct

SEQ ID NO: 33222 - DNA, 380 bp, Homo sapiens
caagaaagcactctactatcagatcaatcaaagattctgtgagtgaatttattggtttgcatggtgaagcaagcttagcatcaattaaaaggtaaataatttcttttctgaatggtaaagacaatcaaaatattactttctggaaaactccaataaccaaattctcaatgattagtgtatgtgagcaggaaaacatttttacagttgtagtatggggaaatataaatccaattttaagagagaaaattatgactgggtgtggaagggacagtatagtcagataccattgtcatggtggtttttactgggaacttcatgaaagacttttgtagcaaaccactgcagtattgcaaagcctccagaacatttggaacttgtct

SEQ ID NO: 33223 - DNA, 217 bp, Homo sapiens
gtctatatcttcacatcaaacctagacagaagcattctcagaaagttttctgcgatgactgcattcaactcacagagttgaacaatccttttgatggagcagttttgaaaccctctttctttggaatctgcaaggggatatgtggacctctttgaagatttcactggaaacgggatcatcttcacataagaactaaacagaagcattctcggaaact

SEQ ID NO: 33224 - DNA, 591 bp, Homo sapiens
catttaggtgaggaaactaagaatcagaggtcttaaaaccaactagagagaagctataactaagtttaatctgatttcaaaccctccgcttttcccaccacaccaagcaatgccatgttctacctaggtttcctgtagagggagtactaacagcaataatggtggaagttaaacagggttcatttgctgaagaagactcacaggaccccaagtgagagtgatcacaaatctgcagtttattgcagtaaaacagtacactatcacagcagcactgaagtaagggtgtcattacagccacaggctgcctgtctgggaaggccaggtccaacctcctatttcctgtctatataagggccatgagaggacatactctcccttgaatcaggaactactgatgtgtgcacagaacactttggaataagagagcccaaagtgtaatctcaactgggtttttaaaaatattttgttctttggccaggcacagttgctcccaaccataatcctaacactgggaggccaagacaggaggattgcttgagtttaggagtttgagaccagcctgagcaataaatatagtaagacctcatctct

SEQ ID NO: 33225 - DNA, 117 bp, Homo sapiens
cacaaaaaggaccagggcggaaattgttctatctggactttagctcttggtggaggagacatatcaagtgttcttaagtcaactgtaatactttttttgtattatgaattcacacta

SEQ ID NO: 33226 - DNA, 382 bp, Homo sapiens
tggaccaccatgccagttttcccaggacagagggatatccgtatgtgggacttttagtgccaaaagcaggaaagtccggggcaaaccaggacaagttagttaccctacccatgaccattatacaagttaatgaacactgtgcccttagggttcatctaagactcaaccctttgggttcatctaattatttttcaaccttttgttcattatcatattttgagactttttttcccttaattgtctactccccagtggaatgtttttttgagagggagtctcactctgtcgcccaggctggagtgcagtggtgtgatctctgctcactgtggcctctgcctcctgggttcaagtgattcttgtgcttcagcctcctgagtaactg

SEQ ID NO: 33227 - DNA, 3096 bp, Homo sapiens
  misc_feature (1382)..(1382): n is a, c, g, or t
  misc_feature (1642)..(1642): n is a, c, g, or t
ctcggccgccgtaggccggcttggaggctgggggagggcccagaagtggaataattcaggaaagtgcaggttctgggaagtctcggtgggttccccgcaaaatcaggcttgagtgcagtggcgcaatcgtggctcactgcagcctccatctcccggggctcaggtgattttcccacctcagctttcccgagtagctgggactacagagatggcatctcactatgttgcccaggctgatcttgaactcctgacctcaagtgatcctctctccttggcctcctaaagtgctgggattccaggtgtgagccacttcacccagccacatttatccatcttgtaaaatattgctttgttttttggtgcatttcaaagaatcactgaccctggaggatgtggctgtggagttcacttgggaggagtggcagctcctcggccctgctcagaaggacctgtaccgagacgtgatgttggagaactatagcaacctcgtgtcagtggggtatcaagccagcaaaccagatgcactcttcaagttggaacaaggagagccatggacagtagaaaatgaaatccacagccaaatctgtccagaaatcaagaaagttgacaatcatctacagatgcactcacaaaagcaaagatgtctgaagagagtggaacaatgccataaacataatgcatttggaaacatcattcatcagaggaaaagtgattttcctttaaggcaaaatcatgatacatttgacttacatgggaaaatactgaaatcaaatttaagtttagtcaaccagaacaaaaggtatgaaatcaagaattctgtgggggttaatggagatgggaaatccttccttcatgccaagcatgaacaatttcataatgaaatgaacttccccgaaggtggaaattctgtgaatacaaattcacaattcattaagcatcagcgaactcaaaacatagataaaccccatgtatgcactgagtgtgggaaggctttcctcaagaagtctcgcctcatctatcatcagagagttcacactggggagaaacctcatggatgcagtatatgtgggaaagccttctccagaaagtccgggctcactgaacaccagagaaaccacacaggagagaaaccctatgaatgcactgaatgtgacaaagcattccgctggaaatcacagctcaatgcacaccagaaaattcatacaggagagaagtcatatatatgcagtgattgtggaaaaggcttcatcaagaagtctcggctcattaatcatcagagagttcatacaggagagaaaccacatggatgcagcctgtgtgggaaggccttctccaaaaggtccaggctcactgaacaccagagaactcatacaggagagaanccctatgaatgcactgaatgtgacaaagcattccgctggaaatcacagctcaatgcacatcagaaagctcacacaggagagaagtcatatatatgccgtgattgtggaaaaggcttcattcagaagggaaatctcattgtacatcagcgaattcatactggagaaaaaccctatatatgcaatgaatgtggaaaaggcttcatccaaaagggcaacctccttattcatcgacgtactcacactggagagaaaccctatgnatgcaatgaatgtgggaaaggcttcagccagaagacatgtttaatatcccatcagagatttcacacaggaaagacaccctttgtatgtactgagtgtggaaaatcctgctcacacaagtcaggtctcattaaccaccagagaattcacacaggagagaaaccctatacatgcagtgactgtgggaaagctttcagagataaatcatgtctcaacagacatcggagaactcatacaggggagagaccgtatggatgctctgattgtgggaaagctttctcccacttgtcatgccttgtttatcataagggaatgctgcatgcaagagagaaatgtgtaggttcagtcaaattggaaaatccttgctcagagagtcatagcttatcacatacacgtgatctcatacaggataaagactctgttaacatggtgactctgcagatgccttctgtggcagctcagacctcattaactaacagtgcgttccaagcagagagcaaagtagccattgtgagccagcctgttgccagaagttcagtctcagcagatagtagaatttgcacagaataaaaaccatatgaatgcagtgaatgtggtagtgctttcagtgatcaattacatcatatgtcacaaaaaacacagaggaacaaactgatatattcaaggtggaaagcccttgaataaaaccttatggctaataagcatatactcagagaaaaatagtatgaagtggagactgggaaattcttttatgggaagatagatcttctcatcagtgaccatagatcacatcttcagtgagcttatagttggtagaaatataatgatcatggaaaagtccttgttcagaaacagtacgccagtaggtatcagggggtttacacaggagagaaacttttggaagacctttgaaggctatgaatgtggcagggttgctagtggtacattctgccttatcctcagagggaatcatatagaaataaaactatgaaaatgtaactagaacatcttcatcaaaatatgaaagaacacacgaagcaaataagccctgtgaaaaggagtattttagagatttcgatcagaaatctaacatcattatatggcagataatatacaggatgtgtattttaggacaatataccttgaatcactagttgatatgtcaatgactaattaaaaggggttgtcagtgttacacatcattggttaaatttatagcacaatgtacctcttcccccttttttgataagagtcttctattcccaaccaagatcattatatgattagctcttgtgtttctttgattccaaatttcttcacttgttatttcagactactgaagctcttcaaaaggaaaaatgtatttaatttaataatgtaacacaacaagtttggatgtgtttaactttataaataatcaccccagaggaatgaagttcaaaacttgtgaataacc

SEQ ID NO: 33228 - DNA, 490 bp, Homo sapiens
tgtgggcgtccgtttagtgcggagccgtggagtttgtgggggaagcgggagcaagtgggagtcggggtattggggttggggcgtctccggagtcagccctgagggatcccagtggtcggtggtcagagtctgtccagagcaacacttggaagtccgtgatcagggtttggtgcctttgcgggtcactctgtagggctcggtgattgaggactggagtgaggagtggtttttgtcaaggaaaactgtgtctgcttcggattcggggttttattttttatttttgagacagggtctcgctctgtcacacaggcttgagtgcagtggcgcaatcgtggctcactgcagcctccatctcccggggctcaggtgattttcccacctcagctttcccgagtagctgggactacaggtgagcgccaccacgctatctatctatctatctatctatctaatctgtctaatctaatctatctatctatctatctatcta

SEQ ID NO: 33229 - DNA, 626 bp, Homo sapiens
ttcctatgaggatcccccctctagcacttccttactgagactattacaaatagatagagatatgagggtgtcctccctaattcattctatgaagccagtatcaccctaataccctataccagaatgaatataaccaagaaaaaaaagggagtcaaaactaccgaccattttccctgacgaacggaaatttaaaattcctcagccgggcccgaattaacgcatgtcaggtggagacagggtttcactctattaggctggtctggaactcccgacctcaggtgatccacgtgcctttgtctcccaaagtgctgggattacaggcatgagtgacggtgcccagccattcgtgacatgtttatacaaatataactttagcaaatatttagcataactatcaaaattacaaatcatattaaatttgtataaatgtatgcaatttttggaacacgcatatcaacaacatacccataaatataactgagatgagatctaatgtcacctcacttgacagtgccctcccatgcagtatcgccacatttgacaatgcctgcccatttaatctaccaaataaatcgaatcacttaatacctctacaagatgagagatacattctttagactccccaa

SEQ ID NO: 33230 - DNA, 288 bp, Homo sapiens
tcaatttatttatttatttatttttgctccctttctctacctctatttctgggactccaactagatgtatattagacatcttgctactgtcccacatgtaaatgagtctcttcatttttcattctttatctctcttgtcttcagattgtataatttctattagtctgtctccaagttcactaactcttctgttattccaatctgtttttaagcccatctatttttttattttctatttgaggtaccctatttttatttgagtaccatatttttcaattctagaattct

SEQ ID NO: 33231 - DNA, 340 bp, Homo sapiens
ctgcattgtccctgttcccatgttctcaaccccttatgggatgctgatgatttcttcctgattctttatcattctaccttcccgaactgatatataatatctccacgttcccagctagagaacagttgatcttctaattctgtatcccagttcatttgctaactccattctaccacaggtagcctgcctaagcctatgagcactttgagttccaaaagccataggtttagtgtatgaattattcaagttttggcagaatttttaaaatttctagagtcaagcattacggtgtaaattcaacatgatggaaatttggttgatggctttgaaggtgatgaga

SEQ ID NO: 33232 - DNA, 2408 bp, Homo sapiens
gagggaatcagaattgtgtttcaagagcgtcactatacggttaggatggaagacagattagaggaaatgcgagtggataaggcaagatgcatttggaagacagtcaagagtttaaccagaaagagaagacatgtcagtaattgccatcatgggaagcagtgagaagcaccagaattgagaaaccaagtactttaagagttagaggagggagacacaccctgtctagctgaggttcatggaagagttggtattcaactgggagggattttatcagtagaggagctgagattgagaatggggttgaggaagagataagtcaggagcaaaaatacggaagtgagggagcctgtgactgaagagcaacatgtagatcaatttgatgaaagcactaggtaggggccagcaaatactggtttgcttctgttttccagagaacctcgaggagacaaggtagaaaaccaatcccaaatgaacaggagtactactgagacctgtactgaataagacaagagaaactcagtgagctaaactagggtataagccacttgcaggagcagagcagggtcaggcattggtctgacttgctgtgaagactttaagctgtgaactcataggacttggattccacttgtcagggagtttgattggttcagaatctggggcaggatggaacctgcaggaaaaagctgactggccccgtgtgagacaggtgacactggaggaatgaagaataggcaccctcagaggtttaggctggaggcttggtgagaatatcaaccctgacccatagagctactgaaatgtatgatactacagtgagcgccaaggataccttcccagccaaacatgccaaggaatagtctggggatggctagtgaaccaagcttcacaggtagccccagttcttcatgagagacacacttgagttgctggcaataatattcttactgtccaaggttaagtggccctatgtctcacaaggccccattcagggcttatcaagctttttgaatattccatcaagttagtctgaaactctagagtatttactttatatgttctgaacttaacagggcacattctgtctctaatatcttggttctgagtacccatcctcactaggacactagtgccatcttgctagctggtccatgagttacataatgatggagcatctcatatgtgtagttctgtaacagtgaccaagcagtggacattcctatccattcaaggctgaacatgtgatggagcaaggcatgtctgcacagggcctagcatgaaggggttgaacccttataacttggaaactaactgaatgggagaaatgagatggaataaggcactgacgttggtgcaatttctgattatattttgttgccatttaacttgtttttagtgtatgccacaccctgtggtaactcgtttcatctgcacagtgacccttgaaatgcccacagtaaagacgagaaaactgaactccttagaattgacgtatcttgcccaaggtcatacaatgagtgaatggggcaacctggacatggacttcagtcttcctgagctcagagctgaccaaagactctgtctaaacttccaagacccttttctcccattggttgatgcacatggtattgaaaaatgtcgagcattctctttctctgttgaaaagttctgcctcccattagttatgaagggaatcctacagaaaggggtgagtcccttaaattcttcaattgattatgggaggttagcaaaaaaaagagagtttatgaacccatgaaaccttaggttctatctatcagctgtgtcttactgaaatcacctcttgaaccaggacccttcagacatagcaattcatgtcctcagtctctggacacaatggaatcctcattataaggccttccacacaaagataataatagtggtgcctctcccatgtgtgttcacatttttgagaaaaaatattcttgcagctatcaaagcacctgctaatcaaagatttcgtattccctgtaatttgtttttaatcttgtaaagccgactactttcaaataggactcagagtgtcaaaggctgaaattcatttccttgaacttcatttaaactgggccacagaatcattctgagagaatcatttaaattaatatgtggcattacggtgttaaaaagaaaaaaattttgtcctaattcccaatttcagagtttctccagacctccaatctgggctctgaccccataattgtgtgcagctgagctgctgacaagtccacacatattctgaagtcacattttctggctctggggctccaaggactcacaaagaggaggaatttttttttttttaatccctgcttgttccgtcaactagttcaccggttaaaccctgattgaatgtagaaattttagaaatg

SEQ ID NO: 33233 - DNA, 790 bp, Homo sapiens
acaggtactgagccgtgtgtatccttcaggtccaagcagcttctaaactgtgtctatctctgttcaggtccctggaactctcctgggcagcaagctcacaagagaccgacctctgtggccttcgaagcgggttgctgttagacacaccttttagaagctacattcatagtatctcaaaagacagacataaggggtactcggtatggccaccactcactcccacaacacagccaccatttcccacccagaatttcctgtgaaatgtgctcattttaaaacagcacacatcctgagaattgcaaagttgggcatagagatcaatacaaattagacttctttttagatacgctctacgctctgcagagccctctggggtctccaagggctgggacctgctggataaaactggatgaaactaagttgctgcttctttggtgcccttgaatggactttcttggctgcagtgacgttaggtccgcttcctagccgcgtgctgctctgccatcggggatgctaaagtcggggagggccaggaagcctttctttgtttggaagtttttgtttctccttcgcctgctaggttgggataatccgttgggaagtctctgagcgtctttaaacataaaatctagtttcaaaggtttaaattcccaagttgccccctaagttacatgttgcttaggcttggttgctatctgtatggtataaataattccatttagaaattaagaaattatgggctgcatttttgatgccagtggctctgtagtatcccccaaccaccaaaaaa

SEQ ID NO: 33234 - DNA, 3659 bp, Homo sapiens
ggagcccctcagcggcggcggggtctgtgagttggtcgcggggtcttggcggggaatggaggtagaataaacgtgggacccggagtgcaccaaggtgagaaaaaaaaaattactaaaaatgacaagtagaagacttgaggagtccatgggggctgttcagatgggattggtcaatatgttcaaaggatttcaaagcaaggttttgccacccctgagtccaaaggtggttacagaagaagaagtaaaccgaatgcttacaccctcagagttcctgaaggaaatgtccctgaccaccgagcagagactggcaaaaacacgtttgatgtgccgaccacagatcatcgaactcttagatatgggggaaacaacacatcagaagttttcaggaattgacctggatcaggcattattccagccctttccatcagaaattatatttcagaactacactccctgtgaagtctatgaagttccactgattttgaggaacaatgacaaaattccaaggttggtgaaagttgtggaagaaagttcgccttactttaaagtaatcagccccaaagatattggccacaaagtggctcctggagtgccttccatattccgaatcctctttactccagaggagaacaaggattacgcccatacgttgacctgtgttactgaaagagaaaagtttattgtacccatcaaagctagaggggcacgagccattctcgattttcctgacaagctgaatttttccacttgtcctgtcaaatacagcacccagaagattctgctggtacgaaacattggcaacaaaaatgctgtatttcacatcaaaacttgtaggcctttctctatagaaccagctattggaactcttaatgtgggagagtccatgcaactggaagtggagtttgagccacagagtgtgggcgatcacagtggaagacttatcgtgtgttatgacacaggtgaaaaggtgtttgtatctctctatggagctgccatagacatgaatataaggctggataagaattccttgaccatcgagaaaacctacatatctctggccaatcagcgaactataaccattcacaatcgcagtaatatcattgcccatttcctgtggaaggtatttgctacccagcaagaagaggacagagaaaaatatagggcctgtgatgatctgatcaaagaggagaaggacgagactgatgagttttttgaagagtgcattactgatcctttactccgagaacatctttctgttctatcccgaacctttgcgaatcagaggaggctggtgcagggagacagcaagctgttcttcaataacgttttcactgtggagcccctggaaggtgatgtctggcccaactcatcagctgaaatcaccgtgtactttaacccactagaagccaagctctatcaacagaccatttactgcgacattttaggccgagaaatccgtctgcccctccgaatcaaaggggaaggcatgggacctacgattcacttcaactttgaattgctggatattgggaaagttttcactggatctgcacattgttatgaggcgatactgtacaacaaaggcagcatcgatgctctcttcaacatgacccctccaacttcagctttgggggcctgctttgttttcagtcccaaggaaggcatcattgaaccaagtggagtccaagctatccagatctccttcagctctaccatcctgggaaactttgaagaagagttcctggtcaatgtcaatgggtcacctgagcctgtgaaactgaccattagaggctgtgtcattggacctaccttccattttaatgttccagctctgcactttggtgatgtttcctttgggtttcctcataccttgatatgttccctcaataatacctctttgatccccatgacttacaaactgcgtatccctggggatggccttggccataaaagcatttcatattgtgagcagcatgtggactacaaaagaccatcttggaccaaggaagaaatatcctcaatgaaaccaaaagaattcaccatctctcctgactgtggcaccattcgcccccagggatttgctgctatcagggtgacattatgctccaacactgtgcagaaatacgagctggcactcgtggtggacgtggagggcatcggagaagaggtgctggcgctcttaattacagcaaggtgtgttgtacctgccctccacctggtcaatacagaggtggactttgggcactgcttcctgaagtacccgtatgagaaaacactccagcttgccaatcaagatgacctcccaggattctatgaggtccagcctcaggtgtgtgaggaggtgcctactgtgctgttttccagccccacccccagcggggtcatctccccaagcagcaccatccacataccactggtcctggagacccaggtcactggagaacacagatccacggtttacatctcaatctttgggagccaggacccccctttggtatgtcacttaaagagcgctggagaaggcccagttatctacgtccatcccaatcaagtggacttcgggaatatctacgtcctaaaagactcttccaggattctcaacctatgcaaccagtccttcattcccgcatttttccaggcacacatggcacacaaaaaatccctttggacgattgaacccaatgaaggcatggttcctccagaaactgatgttcaactggcactgaccgccaacctgaatgacacactgacattcaaggactgtgttattttggacattgaaaatagcagtacctatcggattcctgttcaggcttccggaactggttccactattgtttcagataagccctttgctccagaactcaatttgggggcacattttagcctggatacccactattaccactttaagttgatcaacaagggacgtcggatccaacagttgttctggatgaatgatagcttccgaccccaggccaagctgagtaagaagggccgggttaagaagggacatgctcatgtccaaccccagcccagtggctctcaggagcccagggatccacagagccccgtgtttcatctccaccccgccagcatggagctgtacccaggccaggcaattgatgtgatactcgaaggctattctgctactcccagggtaaggggatagcacatttggaagctattgttttttcctaaataaatctctactgtatctatttcttaggaaagtcccttgacatttatctgaggaaggatatggtttctcaaggattgtgtacaatcctgagttaccatagtagcatccgttgctttcggggtgcagctctgctcagtcttcaatttgtttctgtagctactgtgaacccaatcttaaaggaggttctcatgcccagggtccacagtgaccagccagcaagtctctggtagaaaaacacccagtttttagccaaagcaaattctcctattaacacttagcaggatgaatttaatattcattcaaaaagggtgtttatatcgacactctgggctgcctctcctattcaggtattgggacatccctgttcctttctttccagcctgactgcaactcacatttcaaaacatcttctttttatgcattaataaaagagccacatttatcttcaaaaaaaaaa

SEQ ID NO: 33235 - DNA, 363 bp, Homo sapiens
cagatagtgaaagagaagctggtgtgccacgccatcatcggggcacagaaggggaagagcttggtgatggctgtgaacatcacctgtgagttcgtcgcacctctcatccagctctccaccaagcagctcatctaccgactggagaagaaacctaacagtatcctgaaacctgattaccagcccttggccgtaaagaacatttccaccctgcccgtgaacttgttgctgtcaacatctggacccttctttatatgtgagactgataaatccctgctgccggcaactcctgagcctattaaactggaaattgatgaagaaaaaaacctgctgatcaagtttgacccttcctacagaaacgatctg

SEQ ID NO: 33236 - DNA, 428 bp, Homo sapiens
cagcaaatgttcaggaatcctatgtgagggacaaacattcagagcctcggagcagtgttctggaatcctatgtgaaggaccaactcagtgtgctggcgctcttaattacagcaaggtattgctccccagcttgctcttctcctgagtcgcccccgagcctccagtaatgggctgcctcccagaaggcagctggcctgccaacccaagcacactgagtttgtcctgccttcctgggaagggaagttgaatctgacattcaaatgacaaagcagcaaatgtttctaaagcacctttggtggagataagaagaagtgtgtgtgttttgtagagtttaggcagagaatcctaagaatagtgaagaaacgggtcagaccctctctaacgggtttgactttcaaagtatgtaaccagaaaggttttagcaggaa

SEQ ID NO: 33237 - DNA, 3607 bp, Homo sapiens
agctcgggcggcgcatggagagtgcgggcggcttcaagctgggtgagaaaaaaaaaattactaaaaatgacaagtagaagacttgaggagtccatgggggctgttcagatgggattggtcaatatgttcaaaggatttcaaagcaaggttttgccacccctgagtccaaaggtggttacagaagaagaagtaaaccgaatgcttacaccctcagagttcctgaaggaaatgtccctgaccaccgagcagagactggcaaaaacacgtttgatgtgccgaccacagatcatcgaactcttagatatgggggaaacaacacatcagaagttttcaggaattgacctggatcaggcattattccagccctttccatcagaaattatatttcagaactacactccctgtgaagtctatgaagttccactgattttgaggaacaatgacaaaattccaaggttggtgaaagttgtggaagaaagttcgccttactttaaagtaatcagccccaaagatattggccacaaagtggctcctggagtgccttccatattccgaatcctctttactccagaggagaacaaggattacgcccatacgttgacctgtgttactgaaagagaaaagtttattgtacccatcaaagctagaggggcacgagccattctcgattttcctgacaagctgaatttttccacttgtcctgtcaaatacagcacccagaagattctgctggtacgaaacattggcaacaaaaatgctgtatttcacatcaaaacttgtaggcctttctctatagaaccagctattggaactcttaatgtgggagagtccatgcaactggaagtggagtttgagccacagagtgtgggcgatcacagtggaagacttatcgtgtgttatgacacaggtgaaaaggtgtttgtatctctctatggagctgccatagacatgaatataaggctggataagaattccttgaccatcgagaaaacctacatatctctggccaatcagcgaactataaccattcacaatcgcagtaatatcattgcccatttcctgtggaaggtatttgctacccagcaagaagaggacagagaaaaatatagggcctgtgatgatctgatcaaagaggagaaggacgagactgatgagttttttgaagagtgcattactgatcctttactccgagaacatctttctgttctatcccgaacctttgcgaatcagaggaggctggtgcagggagacagcaagctgttcttcaataacgttttcactgtggagcccctggaaggtgatgtctggcccaactcatcagctgaaatcaccgtgtactttaacccactagaagccaagctctatcaacagaccatttactgcgacattttaggccgagaaatccgtctgcccctccgaatcaaaggggaaggcatgggacctacgattcacttcaactttgaattgctggatattgggaaagttttcactggatctgcacattgttatgaggcgatactgtacaacaaaggcagcatcgatgctctcttcaacatgacccctccaacttcagctttgggggcctgctttgttttcagtcccaaggaaggcatcattgaaccaagtggagtccaagctatccagatctccttcagctctaccatcctgggaaactttgaagaagagttcctggtcaatgtcaatgggtcacctgagcctgtgaaactgaccattagaggctgtgtcattggacctaccttccattttaatgttccagctctgcactttggtgatgtttcctttgggtttcctcataccttgatatgttccctcaataatacctctttgatccccatgacttacaaactgcgtatccctggggatggccttggccataaaagcatttcatattgtgagcagcatgtggactacaaaagaccatcttggaccaaggaagaaatatcctcaatgaaaccaaaagaattcaccatctctcctgactgtggcaccattcgcccccagggatttgctgctatcagggtgacattatgctccaacactgtgcagaaatacgagctggcactcgtggtggacgtggagggcatcggagaagaggtgctggcgctcttaattacagcaaggtgtgttgtacctgccctccacctggtcaatacagaggtggactttgggcactgcttcctgaagtacccgtatgagaaaacactccagcttgccaatcaagatgacctcccaggattctatgaggtccagcctcaggtgtgtgaggaggtgcctactgtgctgttttccagccccacccccagcggggtcatctccccaagcagcaccatccacataccactggtcctggagacccaggtcactggagaacacagatccacggtttacatctcaatctttgggagccaggacccccctttggtatgtcacttaaagagcgctggagaaggcccagttatctacgtccatcccaatcaagtggacttcgggaatatctacgtcctaaaagactcttccaggattctcaacctatgcaaccagtccttcattcccgcatttttccaggcacacatggcacacaaaaaatccctttggacgattgaacccaatgaaggcatggttcctccagaaactgatgttcaactggcactgaccgccaacctgaatgacacactgacattcaaggactgtgttattttggacattgaaaatagcagtacctatcggattcctgttcaggcttccggaactggttccactattgtttcagataagccctttgctccagaactcaatttgggggcacattttagcctggatacccactattaccactttaagttgatcaacaagggacgtcggatccaacagttgttctggatgaatgatagcttccgaccccaggccaagctgagtaagaagggccgggttaagaagggacatgctcatgtccaaccccagcccagtggctctcaggagcccagggatccacagagccccgtgtttcatctccaccccgccagcatggagctgtacccaggccaggcaattgatgtgatactcgaaggctattctgctactcccagggtaaggggatagcacatttggaagctattgttttttcctaaataaatctctactgtatctatttcttaggaaagtcccttgacatttatctgaggaaggatatggtttctcaaggattgtgtacaatcctgagttaccatagtagcatccgttgctttcggggtgcagctctgctcagtcttcaatttgtttctgtagctactgtgaacccaatcttaaaggaggttctcatgcccagggtccacagtgaccagccagcaagtctctggtagaaaaacacccagtttttagccaaagcaaattctcctattaacacttagcaggatgaatttaatattcattcaaaaagggtgtttatatcgacactctgggctgcctctcctattcaggtattgggacatccctgttcctttctttccagcctgactgcaactcacatttcaaaacatcttctttttatgcattaataaaagagccacatttatcttcaaaaaaaaaa

SEQ ID NO: 33238 - DNA, 3732 bp, Homo sapiens
agctcgggcggcgcatggagagtgcgggcggcttcaagctgggtgagaaaaaaaaaattactaaaaatgacaagtagaagacttgaggagtccatgggggctgttcagatgggattggtcaatatgttcaaaggatttcaaagcaaggttttgccacccctgagtccaaaggtggttacagaagaagaagtaaaccgaatgcttacaccctcagagttcctgaaggaaatgtccctgaccaccgagcagagactggcaaaaacacgtttgatgtgccgaccacagatcatcgaactcttagatatgggggaaacaacacatcagaagttttcaggaattgacctggatcaggcattattccagccctttccatcagaaattatatttcagaactacactccctgtgaagtctatgaagttccactgattttgaggaacaatgacaaattgagaagactgaagttcagacctgaccaaggtcacacgtctagtaagtagttgatggatttcagtctgtgtttaactctgctttttcacatgcacgatgttcatcatcatgtgtttccctgcagattccaaggttggtgaaagttgtggaagaaagttcgccttactttaaagtaatcagccccaaagatattggccacaaagtggctcctggagtgccttccatattccgaatcctctttactccagaggagaacaaggattacgcccatacgttgacctgtgttactgaaagagaaaagtttattgtacccatcaaagctagaggggcacgagccattctcgattttcctgacaagctgaatttttccacttgtcctgtcaaatacagcacccagaagattctgctggtacgaaacattggcaacaaaaatgctgtatttcacatcaaaacttgtaggcctttctctatagaaccagctattggaactcttaatgtgggagagtccatgcaactggaagtggagtttgagccacagagtgtgggcgatcacagtggaagacttatcgtgtgttatgacacaggtgaaaaggtgtttgtatctctctatggagctgccatagacatgaatataaggctggataagaattccttgaccatcgagaaaacctacatatctctggccaatcagcgaactataaccattcacaatcgcagtaatatcattgcccatttcctgtggaaggtatttgctacccagcaagaagaggacagagaaaaatatagggcctgtgatgatctgatcaaagaggagaaggacgagactgatgagttttttgaagagtgcattactgatcctttactccgagaacatctttctgttctatcccgaacctttgcgaatcagaggaggctggtgcagggagacagcaagctgttcttcaataacgttttcactgtggagcccctggaaggtgatgtctggcccaactcatcagctgaaatcaccgtgtactttaacccactagaagccaagctctatcaacagaccatttactgcgacattttaggccgagaaatccgtctgcccctccgaatcaaaggggaaggcatgggacctacgattcacttcaactttgaattgctggatattgggaaagttttcactggatctgcacattgttatgaggcgatactgtacaacaaaggcagcatcgatgctctcttcaacatgacccctccaacttcagctttgggggcctgctttgttttcagtcccaaggaaggcatcattgaaccaagtggagtccaagctatccagatctccttcagctctaccatcctgggaaactttgaagaagagttcctggtcaatgtcaatgggtcacctgagcctgtgaaactgaccattagaggctgtgtcattggacctaccttccattttaatgttccagctctgcactttggtgatgtttcctttgggtttcctcataccttgatatgttccctcaataatacctctttgatccccatgacttacaaactgcgtatccctggggatggccttggccataaaagcatttcatattgtgagcagcatgtggactacaaaagaccatcttggaccaaggaagaaatatcctcaatgaaaccaaaagaattcaccatctctcctgactgtggcaccattcgcccccagggatttgctgctatcagggtgacattatgctccaacactgtgcagaaatacgagctggcactcgtggtggacgtggagggcatcggagaagaggtgctggcgctcttaattacagcaaggtgtgttgtacctgccctccacctggtcaatacagaggtggactttgggcactgcttcctgaagtacccgtatgagaaaacactccagcttgccaatcaagatgacctcccaggattctatgaggtccagcctcaggtgtgtgaggaggtgcctactgtgctgttttccagccccacccccagcggggtcatctccccaagcagcaccatccacataccactggtcctggagacccaggtcactggagaacacagatccacggtttacatctcaatctttgggagccaggacccccctttggtatgtcacttaaagagcgctggagaaggcccagttatctacgtccatcccaatcaagtggacttcgggaatatctacgtcctaaaagactcttccaggattctcaacctatgcaaccagtccttcattcccgcatttttccaggcacacatggcacacaaaaaatccctttggacgattgaacccaatgaaggcatggttcctccagaaactgatgttcaactggcactgaccgccaacctgaatgacacactgacattcaaggactgtgttattttggacattgaaaatagcagtacctatcggattcctgttcaggcttccggaactggttccactattgtttcagataagccctttgctccagaactcaatttgggggcacattttagcctggatacccactattaccactttaagttgatcaacaagggacgtcggatccaacagttgttctggatgaatgatagcttccgaccccaggccaagctgagtaagaagggccgggttaagaagggacatgctcatgtccaaccccagcccagtggctctcaggagcccagggatccacagagccccgtgtttcatctccaccccgccagcatggagctgtacccaggccaggcaattgatgtgatactcgaaggctattctgctactcccagggtaaggggatagcacatttggaagctattgttttttcctaaataaatctctactgtatctatttcttaggaaagtcccttgacatttatctgaggaaggatatggtttctcaaggattgtgtacaatcctgagttaccatagtagcatccgttgctttcggggtgcagctctgctcagtcttcaatttgtttctgtagctactgtgaacccaatcttaaaggaggttctcatgcccagggtccacagtgaccagccagcaagtctctggtagaaaaacacccagtttttagccaaagcaaattctcctattaacacttagcaggatgaatttaatattcattcaaaaagggtgtttatatcgacactctgggctgcctctcctattcaggtattgggacatccctgttcctttctttccagcctgactgcaactcacatttcaaaacatcttctttttatgcattaataaaagagccacatttatcttcaaaaaaaaaa

SEQ ID NO: 33239 - DNA, 3408 bp, Homo sapiens
agctcgggcggcgcatggagagtgcgggcggcttcaagctgggtgagaaaaaaaaaattactaaaaatgacaagtagaagacttgaggagtccatgggggctgttcagatgggattggtcaatatgttcaaaggatttcaaagcaaggttttgccacccctgagtccaaaggtggttacagaagaagaagtaaaccgaatgcttacaccctcagagttcctgaaggaaatgtccctgaccaccgagcagagactggcaaaaacacgtttgatgtgccgaccacagatcatcgaactcttagatatgggggaaacaacacatcagaagttttcaggaattgacctggatcaggcattattccagccctttccatcagaaattatatttcagaactacactccctgtgaagtctatgaagttccactgattttgaggaacaatgacaaaattccaaggttggtgaaagttgtggaagaaagttcgccttactttaaagtaatcagccccaaagatattggccacaaagtggctcctggagtgccttccatattccgaatcctctttactccagaggagaacaagggcctttctctatagaaccagctattggaactcttaatgtgggagagtccatgcaactggaagtggagtttgagccacagagtgtgggcgatcacagtggaagacttatcgtgtgttatgacacaggtgaaaaggtgtttgtatctctctatggagctgccatagacatgaatataaggctggataagaattccttgaccatcgagaaaacctacatatctctggccaatcagcgaactataaccattcacaatcgcagtaatatcattgcccatttcctgtggaaggtatttgctacccagcaagaagaggacagagaaaaatatagggcctgtgatgatctgatcaaagaggagaaggacgagactgatgagttttttgaagagtgcattactgatcctttactccgagaacatctttctgttctatcccgaacctttgcgaatcagaggaggctggtgcagggagacagcaagctgttcttcaataacgttttcactgtggagcccctggaaggtgatgtctggcccaactcatcagctgaaatcaccgtgtactttaacccactagaagccaagctctatcaacagaccatttactgcgacattttaggccgagaaatccgtctgcccctccgaatcaaaggggaaggcatgggacctacgattcacttcaactttgaattgctggatattgggaaagttttcactggatctgcacattgttatgaggcgatactgtacaacaaaggcagcatcgatgctctcttcaacatgacccctccaacttcagctttgggggcctgctttgttttcagtcccaaggaaggcatcattgaaccaagtggagtccaagctatccagatctccttcagctctaccatcctgggaaactttgaagaagagttcctggtcaatgtcaatgggtcacctgagcctgtgaaactgaccattagaggctgtgtcattggacctaccttccattttaatgttccagctctgcactttggtgatgtttcctttgggtttcctcataccttgatatgttccctcaataatacctctttgatccccatgacttacaaactgcgtatccctggggatggccttggccataaaagcatttcatattgtgagcagcatgtggactacaaaagaccatcttggaccaaggaagaaatatcctcaatgaaaccaaaagaattcaccatctctcctgactgtggcaccattcgcccccagggatttgctgctatcagggtgacattatgctccaacactgtgcagaaatacgagctggcactcgtggtggacgtggagggcatcggagaagaggtgctggcgctcttaattacagcaaggtgtgttgtacctgccctccacctggtcaatacagaggtggactttgggcactgcttcctgaagtacccgtatgagaaaacactccagcttgccaatcaagatgacctcccaggattctatgaggtccagcctcaggtgtgtgaggaggtgcctactgtgctgttttccagccccacccccagcggggtcatctccccaagcagcaccatccacataccactggtcctggagacccaggtcactggagaacacagatccacggtttacatctcaatctttgggagccaggacccccctttggtatgtcacttaaagagcgctggagaaggcccagttatctacgtccatcccaatcaagtggacttcgggaatatctacgtcctaaaagactcttccaggattctcaacctatgcaaccagtccttcattcccgcatttttccaggcacacatggcacacaaaaaatccctttggacgattgaacccaatgaaggcatggttcctccagaaactgatgttcaactggcactgaccgccaacctgaatgacacactgacattcaaggactgtgttattttggacattgaaaatagcagtacctatcggattcctgttcaggcttccggaactggttccactattgtttcagataagccctttgctccagaactcaatttgggggcacattttagcctggatacccactattaccactttaagttgatcaacaagggacgtcggatccaacagttgttctggatgaatgatagcttccgaccccaggccaagctgagtaagaagggccgggttaagaagggacatgctcatgtccaaccccagcccagtggctctcaggagcccagggatccacagagccccgtgtttcatctccaccccgccagcatggagctgtacccaggccaggcaattgatgtgatactcgaaggctattctgctactcccagggtaaggggatagcacatttggaagctattgttttttcctaaataaatctctactgtatctatttcttaggaaagtcccttgacatttatctgaggaaggatatggtttctcaaggattgtgtacaatcctgagttaccatagtagcatccgttgctttcggggtgcagctctgctcagtcttcaatttgtttctgtagctactgtgaacccaatcttaaaggaggttctcatgcccagggtccacagtgaccagccagcaagtctctggtagaaaaacacccagtttttagccaaagcaaattctcctattaacacttagcaggatgaatttaatattcattcaaaaagggtgtttatatcgacactctgggctgcctctcctattcaggtattgggacatccctgttcctttctttccagcctgactgcaactcacatttcaaaacatcttctttttatgcattaataaaagagccacatttatcttcaaaaaaaaaa

SEQ ID NO: 33240 - DNA, 1568 bp, Homo sapiens
aagatccatagagccaagaggtccctgccccgggacactgttgctgtgacttgaatttcaggctaggagtgggcccccaagatgaggctcatctttaacaaggtgtgttgtacctgccctccacctggtcaatacagaggtggactttgggcactgcttcctgaagtacccgtatgagaaaacactccagcttgccaatcaagatgacctcccaggattctatgaggtccagcctcaggtgtgtgaggaggtgcctactgtgctgttttccagccccacccccagcggggtcatctccccaagcagcaccatccacataccactggtcctggagacccaggtcactggagaacacagatccacggtttacatctcaatctttgggagccaggacccccctttggtatgtcacttaaagagcgctggagaaggcccagttatctacgtccatcccaatcaagtggacttcgggaatatctacgtcctaaaagactcttccaggattctcaacctatgcaaccagtccttcattcccgcatttttccaggcacacatggcacacaaaaaatccctttggacgattgaacccaatgaaggcatggttcctccagaaactgatgttcaactggcactgaccgccaacctgaatgacacactgacattcaaggactgtgttattttggacattgaaaatagcagtacctatcggattcctgttcaggcttccggaactggttccactattgtttcagataagccctttgctccagaactcaatttgggggcacattttagcctggatacccactattaccactttaagttgatcaacaagggacgtcggatccaacagttgttctggatgaatgatagcttccgaccccaggccaagctgagtaagaagggccgggttaagaagggacatgctcatgtccaaccccagcccagtggctctcaggagcccagggatccacagagccccgtgtttcatctccaccccgccagcatggagctgtacccaggccaggcaattgatgtgatactcgaaggctattctgctactcccagggtaaggggatagcacatttggaagctattgttttttcctaaataaatctctactgtatctatttcttaggaaagtcccttgacatttatctgaggaaggatatggtttctcaaggattgtgtacaatcctgagttaccatagtagcatccgttgctttcggggtgcagctctgctcagtcttcaatttgtttctgtagctactgtgaacccaatcttaaaggaggttctcatgcccagggtccacagtgaccagccagcaagtctctggtagaaaaacacccagtttttagccaaagcaaattctcctattaacacttagcaggatgaatttaatattcattcaaaaagggtgtttatatcgacactctgggctgcctctcctattcaggtattgggacatccctgttcctttctttccagcctgactgcaactcacatttcaaaacatcttctttttatgcattaataaaagagccacatttatcttcaaaaaaaaaa

SEQ ID NO: 33241 - DNA, 1732 bp, Homo sapiens
agctcgggcggcgcatggagagtgcgggcggcttcaagctgggtgagaaaaaaaaaattactaaaaatgacaagtagaagacttgaggagtccatgggggctgttcagatgggattggtcaatatgttcaaaggatttcaaagcaaggttttgccacccctgagtccaaaggtggttacagaagaagaagtaaaccgaatgcttacaccctcagagttcctgaaggaaatgtccctgaccaccgagcagagactggcaaaaacacgtttgatgtgccgaccacagatcatcgaactcttagatatgggggaaacaacacatcagaagttttcaggaattgacctggatcaggcattattccagccctttccatcagaaattatatttcagaactacactccctgtgaagtctatgaagttccactgattttgaggaacaatgacaaaattccaaggttggtgaaagttgtggaagaaagttcgccttactttaaagtaatcagccccaaagatattggccacaaagtggctcctggagtgccttccatattccgaatcctctttactccagaggagaacaaggattacgcccatacgttgacctgtgttactgaaagagaaaagtttattgtacccatcaaagctagaggggcacgagccattctcgattttcctgacaagctgaatttttccacttgtcctgtcaaatacagcacccagaagattctgctggtacgaaacattggcaacaaaaatgctgtatttcacatcaaaacttgtaggcctttctctatagaaccagctattggaactcttaatgtgggagagtccatgcaactggaagtggagtttgagccacagagtgtgggcgatcacagtggaagacttatcgtgtgttatgacacaggtgaaaaggtgtttgtatctctctatggagctgccatagacatgaatataaggctggataagaattccttgaccatcgagaaaacctacatatctctggccaatcagcgaactataaccattcacaatcgcagtaatatcattgcccatttcctgtggaaggtatttgctacccagcaagaagaggacagagaaaaatataggtggatggctccatttgttccaggccaagtgtggacatgggagtatttcctctagctctcaagaccatggctcttagtttttaatctcctcagcattcagttggcacctcttgtgggtgctgaagggagcagattacaggccttgagtacttgaagatgagggactattactcattcaaccctgctgcactggagacacacatcttccccattgactgttaaaggtgttggtagctactagaccatttgtaaaatgggttaagcccatggttttactgaagagagggctggcctgctgttatgctgtctgatgaaaggtctcctcatctataaaagagaaccacctctgagtgcaagaaaccatgactatcaacaggacgagatggcaaaacactaggactgagatctatggaagcccttgttggagccaggccacatgaagttgtggctatacacctcctccttagactctcagtcctggctccaattctccatcagaggaagaatccagtaccctctctcctccctttgccttctactggctgttaccgatttggagtttcaacagcatgggagaagaccagcgttttcgaatttgttttgttctctttgttttctggtac

SEQ ID NO: 33242 - DNA, 2454 bp, Homo sapiens
agctcgggcggcgcatggagagtgcgggcggcttcaagctgggtgagaaaaaaaaaattactaaaaatgacaagtagaagacttgaggagtccatgggggctgttcagatgggattggtcaatatgttcaaaggatttcaaagcaaggttttgccacccctgagtccaaaggtggttacagaagaagaagtaaaccgaatgcttacaccctcagagttcctgaaggaaatgtccctgaccaccgagcagagactggcaaaaacacgtttgatgtgccgaccacagatcatcgaactcttagatatgggggaaacaacacatcagaagttttcaggaattgacctggatcaggcattattccagccctttccatcagaaattatatttcagaactacactccctgtgaagtctatgaagttccactgattttgaggaacaatgacaaaattccaaggttggtgaaagttgtggaagaaagttcgccttactttaaagtaatcagccccaaagatattggccacaaagtggctcctggagtgccttccatattccgaatcctctttactccagaggagaacaaggattacgcccatacgttgacctgtgttactgaaagagaaaagtttattgtacccatcaaagctagaggggcacgagccattctcgattttcctgacaagctgaatttttccacttgtcctgtcaaatacagcacccagaagattctgctggtacgaaacattggcaacaaaaatgctgtatttcacatcaaaacttgtaggcctttctctatagaaccagctattggaactcttaatgtgggagagtccatgcaactggaagtggagtttgagccacagagtgtgggcgatcacagtggaagacttatcgtgtgttatgacacaggtgaaaaggtgtttgtatctctctatggagctgccatagacatgaatataaggctggataagaattccttgaccatcgagaaaacctacatatctctggccaatcagcgaactataaccattcacaatcgcagtaatatcattgcccatttcctgtggaaggtatttgctacccagcaagaagaggacagagaaaaatatagggcctgtgatgatctgatcaaagaggagaaggacgagactgatgagttttttgaagagtgcattactgatcctttactccgagaacatctttctgttctatcccgaacctttgcgaatcagaggaggctggtgcagggagacagcaagctgttcttcaataacgttttcactgtggagcccctggaaggtgatgtctggcccaactcatcagctgaaatcaccgtgtactttaacccactagaagccaagctctatcaacagaccatttactgcgacattttaggccgagaaatccgtctgcccctccgaatcaaaggggaaggcatgggacctacgattcacttcaactttgaattgctggatattgggaaagttttcactggatctgcacattgttatgaggcgatactgtacaacaaaggcagcatcgatgctctcttcaacatgacccctccaacttcagctttgggggcctgctttgttttcagtcccaaggaaggcatcattgaaccaagtggagtccaagctatccagatctccttcagctctaccatcctgggaaactttgaagaagagttcctggtcaatgtcaatgggtcacctgagcctgtgaaactgaccattagaggctgtgtcattggacctaccttccattttaatgttccagctctgcactttggtgatgtttcctttgggtttcctcataccttgatatgttccctcaataatacctctttgatccccatgacttacaaactgcgtatccctggggatggccttggccataaaagcatttcatattgtgagcagcatgtggactacaaaagaccatcttggaccaaggaagaaatatcctcaatgaaaccaaaagaattcaccatctctcctgactgtggcaccattcgcccccagggatttgctgctatcagggtgacattatgctccaacactgtgcagaaatacgagctggcactcgtggtggacgtggagggcatcggagaagaggtgctggcgctcttaattacagcaaggtattgctccccagcttgctcttctcctgagtcgcccccgagcctccagtaatgggctgcctcccagaaggcagctggcctgccaacccaagcacactgagtttgtcctgccttcctgggaagggaagttgaatctgacattcaaatgacaaagcagcaaatgtttctaaagcacctttggtggagataagaagaagtgtgtgtgttttgtagagtttaggcagagaatcctaagaatagtgaagaaacgggtcagaccctctctaacgggtttgactttcaaagtatgtaaccagaaaggttttagcaggaa

SEQ ID NO: 33243 - DNA, 443 bp, Homo sapiens
cttctttatatgtgagactgataaatccctgctgccggcaactcctgaggtaccttaatagggggctgttctggcaagctgtctggggtggggtggggtgtgataaaggaagagaagagtaatgatacaccacccaacttcagctcagaaagatgtaaaggatccaggaagcaaacagggaagactacagaaaatttaaaatgagtggtaaatcagatggagaaactgaggcccagtattttgcccaaggtctcacagctagtaagtggcagaaccaggatttggacctaactactctggctccagagcctttaatcttaggaattaatatcccttgtatacgaaacatttcttcaagtcttttttgagaaaaaattcaaatatggtgttttttagaaaataatgtagtctaattccatttttgtaaaatcctattattcctc

SEQ ID NO: 33244 - DNA, 377 bp, Homo sapiens
gggaagctgtccaaagagaacaccatccctgccctatagcaagcttcttctctacccagggtgggcccccagttcaatgtggcatggcagaacaggccagggagactggaggacctgggaaagtgttgtggaaggggtggattttagctgaggcttcacctcatggatgtggaggtcaggagccttcagggtgcaagtgggggccctgcacaaaggcttttagacaagagcagtcagggcagcactgagtatacctgtatagggccgagggtggaggatggtgggaatcacagaggggacagggagagcaggctggcaccccagcttccaggggcctcccaacaccgtgacccctaggcttcttcagccctccccga

SEQ ID NO: 33245 - DNA, 311 bp, Homo sapiens
attgagtacttaaccaaataagatatacagatagcaaataagcacatgaaaagatgctcaacctcattagtcattagggaaatacaaattaaaaccataacgaagtaccactacatacctattagactggctttagaagaaaaacggacaataccaagcgctgacaaagatgttggacagctgagatgctcctcatactttgctggcgggaatgcaaaatgtttgagtcactttgggagagcttggcattttcttattaaggtaaacatacccttacctatgacccagtaatcctactcctaggtctttac

SEQ ID NO: 33246 - DNA, 473 bp, Homo sapiens
agaaccctttgcctaccagcccccagcatgctgtgacgatcctgccccagtattggacacctgaggaggcgttccctctcctattcctccaactggctcttgtcctgctctcatcccaccttttctttgaagtctcctgccactctatcccactgtcaccttgcccttcttcacctcctgtatcttcctgtctatgttactacctaggcagagctctctagcttctgaaggttcatggatcatagaatcccagggccaagagggccctggacatcctatgtgtttcaaaggtcttccaagctcagagggagaagttgagttccctacgtgatacttcagggccataggtggtagaactgggaagcggttcaggatgtgactccaaacgagaatggcatgagacgcttaggcttctacagctccttcctcactctacgcagccaggtgattgtctgctctgccagggcactggg

SEQ ID NO: 33247 - DNA, 463 bp, Homo sapiens
ctaaaggagtagagtttagctgctcttgacacacaaaaagggggctagctgtgtaaattgatagatatgttaatttgctttacgacagaaaagcattttatgatatatatgtatctcataatataatgctgtaaatcttaaatatgcacaataaaatattttttaaaaaacccaacaaaaaagttgaaagttaaagaatggcaaagtatataccatgtaaatactagtccaaaaagtttgtgtaaccactctaatatcagactctaaagcttgaaacatttatagagataaagaagaacatttcataatgataaataagacaactgaatagaaagatgtcacatttccaaaaatgtatgcatctaataacatagctttcaaaatatttaaaacaagaactgacagaactaaaagacaaattcaaaatcacagaaactttaggatatttatctcaatacacgat

SEQ ID NO: 33248 - DNA, 524 bp, Homo sapiens
aacctatcattgatttatagttcattgcagttgttttgaagatgttcagagcactagcctactcatctgggaattagtaactgtgaactcgaaataacggaataattggacattcaggagctctgaattctaagtccagccatagttcttggtgggctcatccttaacaagccatcatttttctctgtgtctgatattcttccctgtaaaatgtatatgatctttcaggttttcactgcaaaagtctgtaagaacatattgcaagacagtgtgtgaatatgagaaaacgacccttaaccccaatagctaaagggaggattaggaactctgtaaatagagattgctaaatatttggaatcaactacagtctgctgccattgggtttgactggtaatgaccagtcccctacccagaggccctacaagagtggaatgctgaggtggagagggtcctcatcctgcttcctccttgtgacactctgaaccagtcagttgcccaagtaccatcagtgtctcctaatgaag

SEQ ID NO: 33249 - DNA, 1503 bp, Homo sapiens
actaagcctatagttacatttagaagatttagtaccaaaatcaaacttttagtaacaaacaggaatcttgtcaacacaatgtaggccagggattttgtaaaggtttctcaaagacccaaataagggagaaaaaaattttagttgggctgtttaacttgggaaacactgtcatcagcttgagggtcctcagccagcatgtgattattttgatgacaggactcaggctaccctttaaggcacattttttactcagcattaaacactagctacagtcgtgaagcagagctcccattgcagctacatacttgagatgtactcttggtttcagaatcgtaactaagaggtaaggcattggagaaggacaatgtaaaagacagaggtttagaacaaagtttatggtgtgaatgaggctttcaaaatcagtatctgggtaaattgatactaaagacactgaagaaacactcatccacataagatggaaaggatgtctgtccatctaacaagctcaggggtttctgagtctcagaatgacatcccatttcaaaaagaagaaaagagatattgaaatcattctgcctgtttgagagatgactggttatttacagcacaaaaaaaggcttagaatgaaaactagaagaggccttttgtttttcactcccagtgaggagagtagaaatcttaagatgctctactgggctacctgtagcactgactggagtttgctgcctacagagttttgaatgtactagtccttagtttccatagaactgaatgcacctctttagtaagttgctgatttatggtgctaaagaaaatgattattcccatttttttcttcttccccaagccccttaagcatttaagaaaatttaaaataaaagcgttagaggccctttttatgaatgtaacctaagtttctgtttgacatatgacactgcaacttaaaaatgttaggaaattatttgcctttttttttcttttagagttaagctttataaataatctgtagaatcaattgaagtttaaagcttaaggatcactcttaagacgtctacaaaatcttgtatatttttaagtgtgccaatttgtaacatattttgtaagtgtatatttttcttagaaaagtgctgtgaagtgtctgtatgtgagagttttcctttttctgcaccactaggtgctaataaaaggatatttacttcaaagtttctggttttagaaaccacaatacaaagaaaaaaaatacacttttgttggaaattttgtaacacaaaacatgttgtgaaagagtgtagtgatcttgtgcaaaaaaaatgaacatttgtgagcttcttgctgttttatagattttcttgtaaattattcttgtaacacttctggttttgttgttcttgttgcgaaggtttcaaatatttgtgactgaatgtacggtgaaactgtcataatgttacctagctgagttttgttattgtttatgaaataaataaaaagaaaagtttaaaatac

SEQ ID NO: 33250 - DNA, 505 bp, Homo sapiens
ttaaacctttctcccacaaatgaagtttatgtaagttatatcttattaaggctgtttaaaataataaagtttagaccaataacaaaactaagagtaatttgaggatggtagttaacttagtttcacatatttaagacttcccttacattactctctgtgtggaaattcctaaggggttactaacttccaaaacatatctgatgaccatctgattacagagttaaactttgtgctaatgtgctaaccattgctcggatctaagtaagtgtcatagtacagcagctgatagtgtggcacctgaacattacatcttcaagagaagaaaactgtatattgattgattgtgatatttattgggtcataatgtatttaaattttctttaatgcatatgttagtgattgtttactgtgataaagtgcaaagaggtcttcaagagtgatcctgcagaggaagaattacctcatgtcactggtcacttctcaattaaaagttccattagcaaat

SEQ ID NO: 33251 - DNA, 407 bp, Homo sapiens
ttaaatttgaaaatgcttttattcttttgtgagaatcagattaactctgatgcaaatttgcttttatgaaaatttaaaatatggtccaatccactggcaaatgcatctgtaatacagatatgataggatgcaagttccacccccagggacagcaattatatgcacttagcttaggtggttggtatatttgcttcctttcttcccacttagttttttgccttaaaagctttcttgtgcgcgcctctcatcgcaaactgcccttgaatcctgcctttgatgtgagaacaggactaactgggcgttaaatcggcattttctacatcaggtctccagcctgctcttgacctgactccaacacacaaagcagcgggcattttgttgtctggtcattttctgtaagtgttacc

SEQ ID NO: 33252 - DNA, 294 bp, Homo sapiens
gttttggctgtagctttcacttgtctgggtgacttttcacctgctgcctagggaattgttttgtgtttagtagattaatagatgggcagctctttggggtccttccatcttctccatgcttcagacctttacaccttcctctagtccttcgtgagtactaagggactaactttgaattcagctactcaggaggctgagacaggagaatttcgtgaacccaggaggcggaggttgcagtgagccgagacagcaccactgcactccagcctgggcgacagtgagactcttgtctca

SEQ ID NO: 33253 - DNA, 1372 bp, Homo sapiens
  misc_feature (23)..(23): n is a, c, g, or t
tctacccttccagccctgttccncgctcccatggggtatcgatgtgaagtgaccagcatgtcactggccaggatcctgagcctgctggcggccagcggtcccacgtgggaccaggtgcccccgttccagtggagcacctcgcccttcagcggcctgctgcacatgggccagccagacctctggaagttcgcgcctgtcaaggtttcatgggactgaagttctgtccctgctctgctgctttcgcccctgctgaccctcgtcagggtcacccccgtcccaaggccaccggacttctaactccagcccctcctgggggcttcgttctctgatctggggtctgagtcatctcctcctagagtgggtcacgaacctgatggggctcagaactgaccccctctctcccccgaggtgggtgggcaccgtggcgtctcttctgccctgccctaaatctcccactctctgtttctgtctgtttcctactgctgctctctcaacctcattcccacctctggggccccttcctcgtgcttctccttcctgagggtttgggaaggtcctggggcagactctggggctcccatggggtggaaggagcctgttccagcacccttctcccagctgcattcccacgggtggccctggagctggtgagctttgtctgggcgttgtcttcggctggcattgctcctcccagctctggcccctctgctccctcaggaagcagtcccctcgtctccctttctgggcagcttccttgaggacagaaacttgaaaacaaacacaaaccaaagtttctggccatctgtggctggagggttctgaatgtcctctctccatgtcaggcagagggtcagcccccatgcttctgcctcaggccccaccccaccccaccccaggcctgcccctcacctcagggccatacccacagcgccctgatggaggaaccagaccgcaggctgtgccaccattaaacaagagcggctgtggccccatgctgtgcttcttggggtggcagggaaggtggggtcagcgctttttctcctctcaggtttgggttctgcgccatcccccatgcagcctcctgtgcagccctctgtctgtccttctgtccattcattcatctgccaacatactcacccatcatccatctgcacagccttccacccacccatccgtcttccatcatccatccatccatctacctatccatttatcatccatccactcacccatccaaccacccatccaaccattcagccatctccatctgtccattttctttcttcttcttttttttttgtttttgttttttctgagtgggagtttcactccagcctgggagagagagtgagactctctgtctcaaaaaaaa

SEQ ID NO: 33254 - DNA, 1499 bp, Homo sapiens
accccgcgtcgcgaactggaaaatatgcatagcggtgcattcgggcaaccctgccacccccagtagcagggccaccagccatttaaaggcagactgaatcagggtgtgctaacttatacctgcaatcccagtgcttgagcagggggaccgaggtggggggggtatcgatgtgaaggtgaccagcatgtcactggccaggatcctgagcctgctggcggccagcggtcccacgtgggaccaggtgcccccgttccagtggagcacctcgcccttcagcggcctgctgcacatgggccagccagacctctggaagttcgcgcctgtcaaggtttcatgggactgaagttctgtccctgctctgctgctttcgcccctgctgaccctcgtcagggtcacccccgtcccaaggccaccggacttctaactccagcccctcctgggggcttcgttctctgatctggggtctgagtcatctcctcctagagtgggtcacgaacctgatggggctcagaactgaccccctctctcccccgaggtgggtgggcaccgtggcgtctcttctgccctgccctaaatctcccactctctgtttctgtctgtttcctactgctgctctctcaacctcattcccacctctggggccccttcctcgtgcttctccttcctgagggtttgggaaggtcctggggcagactctggggctcccatggggtggaaggagcctgttccagcacccttctcccagctgcattcccacgggtggccctggagctggtgagctttgtctgggcgttgtcttcggctggcattgctcctcccagctctggcccctctgctccctcaggaagcagtcccctcgtctccctttctgggcagcttccttgaggacagaaacttgaaaacaaacacaaaccaaagtttctggccatctgtggctggagggttctgaatgtcctctctccatgtcaggcagagggtcagcccccatgcttctgcctcaggccccaccccaccccaccccaggcctgcccctcacctcagggccatacccacagcgccctgatggaggaaccagaccgcaggctgtgccaccattaaacaagagcggctgtggccccatgctgtgcttcttggggtggcagggaaggtggggtcagcgctttttctcctctcaggtttgggttctgcgccatcccccatgcagcctcctgtgcagccctctgtctgtccttctgtccattcattcatctgccaacatactcacccatcatccatctgcacagccttccacccacccatccgtcttccatcatccatccatccatctacctatccatttatcatccatccactcacccatccaaccacccatccaaccattcagccatctccatctgtccattttctttcttcttcttttttttttgtttttgttttttctgagtgggagtttcactccagcctgggagagagagtgagactctctgtctcaaaaaaaa

SEQ ID NO: 33255 - DNA, 695 bp, Homo sapiens
accccgcgtcgcgaactggaaaatatgcatagcggtgcattcgggcaaccctgccacccccagtagcagggccaccagccatttaaaggcagactgaatcagggtgtgctaacttatacctgcaatcccagtgcttgagcagggggaccgaggtggggggggtatcgatgtgaaggtgaccagcatgtcactggccaggatcctgagcctgctggcggccagcggtcccacgtgggaccaggtgcccccgttccagtggagcacctcgcccttcagcggcctgctgcacatgggccagccagacctctggaagttcgcgcctgtcaaggtttcatgggactgaagttctgtccctgctctgctgctttcgcccctgctgaccctcgtcagggtcacccccgtcccaaggccaccggacttctaactccagcccctcctgggggcttcgttctctgatctggggtctgagtcatctcctcctagagtgggtcacgaacctgatggggctcagaactgaccccctctctcccccgaggtgggtgggcaccgtggcgtctcttctgccctgccctaaatctcccactctctgtttctgtctgtttcctactgctgctctctcaacctcattcccacctctggggccattaccacgagctagctctcggtcgttttacactcaggaatcagctatccca

SEQ ID NO: 33256 - DNA, 541 bp, Homo sapiens
tttctgaggcttgaaaccaagagagtttagaagccaacctgtaattaaatagccatgtggaaaaccatgctggaaaaggcaaccccatgggggagttcaaactgaaaggaaaaacagtgaaggtataagatgtgagccttcttgtatcccttctgtggaatgtcacatcacagtagaggaggattccagctgaagagtgggtcatttgtgtgcaggcccctggaatggggcagcaatgtttgcttgcttttctggagtttcagggaagccaaagttcaaaagccaaggactttccatgattaaagttccattctcaagaaagcaccactatgcattaatgtcaataagtcaccatgacaaaccagtaaaatagggcaaatataatcttacttttcatatattagtgatgttaaaaaaatggcccattggctcatgcctgccatcccagcactttgggaggccaagatgacaattacttgaacccaggagtttgagaacagcctgggcaacatagaccctgtctctgcaaaaaaaaaattaa

SEQ ID NO: 33257 - DNA, 530 bp, Homo sapiens
ttataaaaaaaatggtaaagcagcctattgggattcgctgcttcccttccccgtgagtcctcccagtccagacatgtcctcagagctgccacttcctgatgtactcccttgcagtgcttagctccccacagtggagcttggagggtgctgtcttaacatctctccttcccatgatagggatctgcccatttcaggggattcttcctgctgccttcaaactgagcctcatttttggaggtggtagggatgaaggagaggggatggaggggttgtaagagctgaggagtgtgaggacttgtgatggagtttcagagttggggtgagaagggtagcccatgaagagggccagaagagggactatagacagcatcataaagaaatttaaatttctttatatttggtaaaagtatttagtgttataaatcattatgaatgaatgtactaaaagaaagaatataataaaagatcttacttttatttatcatgaaggggaaacaaagttgcttgtgtccaaagtaacattattgcac

SEQ ID NO: 33258 - DNA, 1825 bp, Homo sapiens
cccgcgctgacggtgtccctggggctctgcgctcgtccggccggccccggcctcgccgccccgcgcagtacccagcccggccccgccgacccgcctctactgccggctccgcgcccttccccgagggctggatgatgggctgtttcgccctgcaaacggtggacaccgagctgaccgcggactcggtggagtggtgcccgctgcaaggctgcaggcacctgctggcgtgcgggacctaccagctgcggcggccggaggaccggcctgccggcccccagaacaagggtggaatggaagttaaggagcctcaggtccgtttaggccgtctcttcctgtacagtttcaatgacaacaactctattcaccctctggtcgaggtccaaagaaaagatacttctgcaatcctggacatgaaatggtgtcacatcccggtggctggacatgccctcttgggcttggcagatgccagtggatccatacaactgctccgcctggtggaatctgagaagagccacgtgctggagccattgtccagccttgccctggaggagcagtgtctggctttgtccctagattggtccactgggaaaactggaagggccggggaccagcccttgaagatcatcagcagtgactccacagggcagctccacctcctgatggtgaatgagacgaggcccaggctgcagaaagtggcctcatggcaggcacatcaattcgaggcctggattgctgctttcaattactggcatccagaaattgtgtattcagggggcgacgatggccttctgaggggctgggacaccagggtacccggcaaatttctcttcaccagcaaaagacacaccatgggtgtgtgcagcatccagagcagccctcatcgggagcacatcctggccacgggaagctatgatgaacacatcctactgtgggacacacgaaacatgaagcagccgttggcagatacgcctgtgcagggtggggtatggagaatcaagtggcaccctttccaccaccacctgctcctggccgcctgcatgcacagtggctttaagatcctcaactgccaaaaggcaatggaggagaggcaggaggcgacggtcctgacatctcacacattgcccgactcgctggtgtatggagccgactggtcctggctgctcttccgttctctgcagcgggccccctcgtggtcctttcctagcaacctaggaaccaagacggcagacctgaagggtgcaagcgagttgccaacaccctgtcatgaatgcagagaggataacgatggggagggccatgccagaccccagagtggaatgaagccactcacagagggcatgaggaagaatggcacctggctgcaggctacagcagccaccacacgtgactgtggcgtgaacccagaagaagcagactcagccttcagcctcctggccacctgctccttctatgaccatgcgctccacctctgggagtgggaggggaactgagcttgaaatcatgaagccccttcccacaaggaaaccaggagggagactgcgagtgagtgcccgggaccacctcatcagagatgcttactgcagccctgcaggtgcctgtgcactgatggaatccacagtgtagtcagaaaagctgttgacttctcttaaatcagcttccctgctgggcccctgaaagtggactgggtgattctgtctggcagagagtggggaaaagacgcggtttccagcttgcagatttgttaagtttctcaggcagattttgactttcagcctttcatacttgtttaagcaactatttgtattaaatgaagttttttgaaaaa

SEQ ID NO: 33259 - DNA, 889 bp, Homo sapiens
cccgcgctgacggtgtccctggggctctgcgctcgtccggccggccccggcctcgccgccccgcgcagtacccagcccggccccgccgacccgcctctactgccggctccgcgcccttccccgagggctggatgatgggctgtttcgccctgcaaacggtggacaccgagctgaccgcggactcggtggagtggtgcccgctgcaaggctgcaggcacctgctggcgtgcgggacctaccagctgcggcggccggaggaccggcctgccggcccccagaacaagatatacaaccacttcctgttgtgtcacacttgcctgcagtaacatgctgtaaggtttgtggcataggagcagtgggccataccatataatcaaggtgtcacatcccggtggctggacatgccctcttgggcttggcagatgccagtggatccatacaactgctccgcctggtggaatctgagaagagccacgtgctggagccattgtccagccttgccctggaggagcagtgtctggctttgtccctagattggtccactgggaaaactggaagggccggggaccagcccttgaagatcatcagcagtgactccacagggcagctccacctcctgatggtgaatgagacgaggcccaggctgcagaaagtggcctcatggcaggcacatcaattcgaggcctggattgctgctttcaattactggcatccagaaattgtgtattcagggggcgacgatggccttctgaggggctgggacaccagggtacccggcaaatttctcttcaccagcaaaagacacaccatggcgtgtgtcagcatcgcacgagcagccacatgcatgcgagagcacactcctcggacctcgagaagatactcgactgac

SEQ ID NO: 33260 - DNA, 368 bp, Homo sapiens
actactactaaattggcggccgcgtccccttcccacaaggaaaccaggagggagactgcgagtgagtgcccgggaccacctcatcagagatgcttactgcagccctgcaggtgcctgtgcactgatggaatccacagtgtagtcagaaaagctgttgacttctcttaaatcagcttccctgctgggcccctgaaagtggactgggtgattctgtctggcagagagtggggaaaagacgcggtttccagcttgcagatttgttaagtttctcaggcagattttgactttcagcctttcatacttgtttaagcaactatttgtattaaatgaagttttttgaaaaaaaaaaagtcgacgcggccgcgaat

SEQ ID NO: 33261 - DNA, 3042 bp, Homo sapiens
cccgcgctgacggtgtccctggggctctgcgctcgtccggccggccccggcctcgccgccccgcgcagtacccagcccggccccgccgacccgcctctactgccggctccgcgcccttccccgagggctggatgatgggctgtttcgccctgcaaacggtggacaccgagctgaccgcggactcggtggagtggtgcccgctgcaaggctgcaggcacctgctggcgtgcgggacctaccagctgcggcggccggaggaccggcctgccggcccccagaacaagggtggaatggaagttaaggagcctcaggtccgtttaggccgtctcttcctgtacagtttcaatgacaacaactctattcaccctctggtcgaggtccaaagaaaagatacttctgcaatcctggacatgaaatggtgtcacatcccggtggctggacatgccctcttgggcttggcagatgccagtggatccatacaactgctccgcctggtggaatctgagaagagccacgtgctggagccattgtccagccttgccctggaggagcagtgtctggctttgtccctagattggtccactgggaaaactggaagggccggggaccagcccttgaagatcatcagcagtgactccacagggcagctccacctcctgatggtgaatgagacgaggcccaggctgcagaaagtggcctcatggcaggcacatcaattcgaggcctggattgctgctttcaattactggcatccagaaattgtgtattcagggggcgacgatggccttctgaggggctgggacaccagggtacccggcaaatttctcttcaccagcaaaagacacaccatgggtgtgtgcagcatccagagcagccctcatcgggagcacatcctggccacgggaagctatgatgaacacatcctactgtgggacacacgaaacatgaagcagccgttggcagatacgcctgtgcagggtggggtatggagaatcaagtggcaccctttccaccaccacctgctcctggccgcctgcatgcacagtggctttaagatcctcaactgccaaaaggcaatgggctgtggctctctgagggcttagactctgccttattaccttttcctaagctgtagaagaggtcctgctggcccgagtggacgtgttgagcgattgctggatgaaagactagcggaggtcctgcctgccctgtgacgctacctcccaagggacagtaacggcctccccaggggcttcctcccgagggtcgccccacacatgctgctcgaggggcccctgtggctgtctctgaacattcagcatctcactcctcctcggagccacctctgcccagttgaagccctgggcccagggttgggcctccccggcccaggcccatacaacctcggcacgttttgtaatccagtgcggtcctgttctgccctcagcccttcttccatcagcactcattctggttctgattccggtcactgctggcatcaatccctgtacttcagaggtagcgatggcagccctttcagagcccaagtggccacccagccttgcagcccctggctcaccttccacttgctctctgcaactgcccctgccagccctggccttgcctcctggactccagatcgcctcgggtttggccacgcctcgtcattccctctgttgctgtgtgctctgggaggcagttgtggcctctttccagttgccgtagcaacttctataaagaaactgctcacttaaccttgtcagtggctcctttccaagccagaatccagactctgaaacagggcgtgccggaccctgcatgcttgggacgctccagcccactgtcactcactgacagtgccatggctgcctgtttgtggttccccgtgcgagccttggactttctcacctctgctgtacacatgctgcctgttcctcagacatccccttccttcccagctggctaaaactcctttgttctttggttttaagtgttaactgaggtctttccccctctctggcttttgccgtattcttcaccatcaagtgaggttctgtagccccgcttgatgcttctcttggaggcacacaggcgtgtgcactgcaagatgacggtctgtttcttctccaacatatgcccaggtcttgctggttcctttgcatgacacaacggctcctcaggaaacacttgctgacctgtgaggggctgttcttggagtctccctgtcaggtgtgacaggttggggagaggctctgggtgatgttgtgtttcctgggttctcccatctctcactccagaggagaggcaggaggcgacggtcctgacatctcacacattgcccgactcgctggtgtatggagccgactggtcctggctgctcttccgttctctgcagcgggccccctcgtggtcctttcctagcaacctaggaaccaagacggcagacctgaagggtgcaagcgagttgccaacaccctgtcatgaatgcagagaggataacgatggggagggccatgccagaccccagagtggaatgaagccactcacagagggcatgaggaagaatggcacctggctgcaggctacagcagccaccacacgtgactgtggcgtgaacccagaagaagcagactcagccttcagcctcctggccacctgctccttctatgaccatgcgctccacctctgggagtgggaggggaactgagcttgaaatcatgaagccccttcccacaaggaaaccaggagggagactgcgagtgagtgcccgggaccacctcatcagagatgcttactgcagccctgcaggtgcctgtgcactgatggaatccacagtgtagtcagaaaagctgttgacttctcttaaatcagcttccctgctgggcccctgaaagtggactgggtgattctgtctggcagagagtggggaaaagacgcggtttccagcttgcagatttgttaagtttctcaggcagattttgactttcagcctttcatacttgtttaagcaactatttgtattaaatgaagttttttgaaaaa

SEQ ID NO: 33262 - DNA, 4310 bp, Homo sapiens
cccgcgctgacggtgtccctggggctctgcgctcgtccggccggccccggcctcgccgccccgcgcagtacccagcccggccccgccgacccgcctctactgccggctccgcgcccttccccgagggctggatgatgggctgtttcgccctgcaaacggtggacaccgagctgaccgcggactcggtggagtggtgcccgctgcaaggctgcaggcacctgctggcgtgcgggacctaccagctgcggcggccggaggaccggcctgccggcccccagaacaagggtggaatggaagttaaggagcctcaggtccgtttaggccgtctcttcctgtacagtttcaatgacaacaactctattcaccctctggtcgaggtccaaagaaaagatacttctgcaatcctggacatgaaatgatatacaaccacttcctgttgtgtcacacttgcctgcagtaacatgctgtaaggtttgtggcataggagcagtgggccataccatataatcaaggtgtcacatcccggtggctggacatgccctcttgggcttggcagatgccagtggatccatacaactgctccgcctggtggaatctgaggtcagtgacttgcacttgttctgtggggcagaagggacctgaatagagagggttggggaggaggctgtgctgatacagacatttttctaaaacgatctctcttcaatggtgagctatatataaacgttctaagataatgtggagtctatttttaagttgtattgcgttctacatccaactccaagaggaagtcacctcatgtgtcaccagcagaagggctgaagtgacaggatgttcattgacctgtcagtggatctgaaagttctctaaggagagcctgggcaagcattcttaggttgatgctggggcccagagtagcagtgagcatcctgtgtgaagatggcatttctcactgattattggaaaagcacgtgagtcctgtgtgaatttttccgagtttctcacagtgctctggagccatgcattaacaaagtgacttcatctgatagctgtcggggaggagaacggggatgtcccgtagtggggtgatgtaaacagcctgtgtaggaaaaggccttgcttaaggcagcttagagcagttgccctgtcttagaaaggagggaaagagcagccacaggaaagctgtgggcccaagggaggagtgcatgaacccaggaaagggctttggtacagcagcctgctgggagcagggatggagttaagcactggccaggctgtttaggaaatgaaatttatatagatctgcataaagagcaaccacgttctcatggctgctcgcggcttctgaagtggaaaccagaggagtttccccattgtctctgtctcgggaggcgagtgttccagtggccctggaggcctggggtgggaaactgtgtgtgccactgtggtctggagcctgcacaggcatctcgacagcatctaggagcgcaaggatggcaagggggtgtgaaagggagggagaccatgccccaagatcaagcctgtgggaaagttgtcctgcaagtgtgaggagtgtgagctccagtgtccccaggtcttctcggggcccctagcaggggtttcagtgttaggtggaggtgtgactcagtgactgatgtacttcattcgcataggttgtaaatgagggaacgatgacttccctgcaggagaggaaaagtcttttgggggttctggggcggctacttccctttgatggagtttcttcttctccagtaagagccacgtgctggagccattgtccagccttgccctggaggagcagtgtctggctttgtccctagattggtccactgggaaaactggaagggccggggaccagcccttgaagatcatcagcagtgactccacagggcagctccacctcctgatggtgaatgagacgaggcccaggctgcagaaagtggcctcatggcaggcacatcaattcgaggcctggattgctgctttcaattactggcatccagaaattgtgtattcagggggcgacgatggccttctgaggggctgggacaccagggtacccggcaaatttctcttcaccagcaaaagacacaccatgggtgtgtgcagcatccagagcagccctcatcgggagcacatcctggccacgggaagctatgatgaacacatcctactgtgggacacacgaaacatgaagcagccgttggcagatacgcctgtgcagggtggggtatggagaatcaagtggcaccctttccaccaccacctgctcctggccgcctgcatgcacagtggctttaagatcctcaactgccaaaaggcaatgggctgtggctctctgagggcttagactctgccttattaccttttcctaagctgtagaagaggtcctgctggcccgagtggacgtgttgagcgattgctggatgaaagactagcggaggtcctgcctgccctgtgacgctacctcccaagggacagtaacggcctccccaggggcttcctcccgagggtcgccccacacatgctgctcgaggggcccctgtggctgtctctgaacattcagcatctcactcctcctcggagccacctctgcccagttgaagccctgggcccagggttgggcctccccggcccaggcccatacaacctcggcacgttttgtaatccagtgcggtcctgttctgccctcagcccttcttccatcagcactcattctggttctgattccggtcactgctggcatcaatccctgtacttcagaggtagcgatggcagccctttcagagcccaagtggccacccagccttgcagcccctggctcaccttccacttgctctctgcaactgcccctgccagccctggccttgcctcctggactccagatcgcctcgggtttggccacgcctcgtcattccctctgttgctgtgtgctctgggaggcagttgtggcctctttccagttgccgtagcaacttctataaagaaactgctcacttaaccttgtcagtggctcctttccaagccagaatccagactctgaaacagggcgtgccggaccctgcatgcttgggacgctccagcccactgtcactcactgacagtgccatggctgcctgtttgtggttccccgtgcgagccttggactttctcacctctgctgtacacatgctgcctgttcctcagacatccccttccttcccagctggctaaaactcctttgttctttggttttaagtgttaactgaggtctttccccctctctggcttttgccgtattcttcaccatcaagtgaggttctgtagccccgcttgatgcttctcttggaggcacacaggcgtgtgcactgcaagatgacggtctgtttcttctccaacatatgcccaggtcttgctggttcctttgcatgacacaacggctcctcaggaaacacttgctgacctgtgaggggctgttcttggagtctccctgtcaggtgtgacaggttggggagaggctctgggtgatgttgtgtttcctgggttctcccatctctcactccagaggagaggcaggaggcgacggtcctgacatctcacacattgcccgactcgctggtgtatggagccgactggtcctggctgctcttccgttctctgcagcgggccccctcgtggtcctttcctagcaacctaggaaccaagacggcagacctgaagggtgcaagcgagttgccaacaccctgtcatgaatgcagagaggataacgatggggagggccatgccagaccccagagtggaatgaagccactcacagagggcatgaggaagaatggcacctggctgcaggctacagcagccaccacacgtgactgtggcgtgaacccagaagaagcagactcagccttcagcctcctggccacctgctccttctatgaccatgcgctccacctctgggagtgggaggggaactgagcttgaaatcatgaagccccttcccacaaggaaaccaggagggagactgcgagtgagtgcccgggaccacctcatcagagatgcttactgcagccctgcaggtgcctgtgcactgatggaatccacagtgtagtcagaaaagctgttgacttctcttaaatcagcttccctgctgggcccctgaaagtggactgggtgattctgtctggcagagagtggggaaaagacgcggtttccagcttgcagatttgttaagtttctcaggcagattttgactttcagcctttcatacttgtttaagcaactatttgtattaaatgaagttttttgaaaaa

SEQ ID NO: 33263 - DNA, 3507 bp, Homo sapiens
cccgcgctgacggtgtccctggggctctgcgctcgtccggccggccccggcctcgccgccccgcgcagtacccagcccggccccgccgacccgcctctactgccggctccgcgcccttccccgagggctggatgatgggctgtttcgccctgcaaacggtggacaccgagctgaccgcggactcggtggagtggtgcccgctgcaaggctgcaggcacctgctggcgtgcgggacctaccagctgcggcggccggaggaccggcctgccggcccccagaacaagggtggaatggaagttaaggagcctcaggtccgtttaggccgtctcttcctgtacagtttcaatgacaacaactctattcaccctctggtcgaggtccaaagaaaagatacttctgcaatcctggacatgaaatgatatacaaccacttcctgttgtgtcacacttgcctgcagtaacatgctgtaaggtttgtggcataggagcagtgggccataccatataatcaaggtgtcacatcccggtggctggacatgccctcttgggcttggcagatgccagtggatccatacaactgctccgcctggtggaatctgaggtcagtgacttgcacttgttctgtggggcagaagggacctgaatagagagggttggggaggaggctgtgctgatacagacatttttctaaaacgatctctcttcaatggtgagctatatataaacgttctaagataatgtggagtctatttttaagttgtattgcgttctacatccaactccaagaggaagtcacctcatgtgtcaccagcagaagggctgaagtgacaggatgttcattgacctgtcagtggatctgaaagttctctaaggagagcctgggcaagcattcttaggttgatgctggggcccagagtagcagtgagcatcctgtgtgaagatggcatttctcactgattattggaaaagcacaagagccacgtgctggagccattgtccagccttgccctggaggagcagtgtctggctttgtccctagattggtccactgggaaaactggaagggccggggaccagcccttgaagatcatcagcagtgactccacagggcagctccacctcctgatggtgaatgagacgaggcccaggctgcagaaagtggcctcatggcaggcacatcaattcgaggcctggattgctgctttcaattactggcatccagaaattgtgtattcagggggcgacgatggccttctgaggggctgggacaccagggtacccggcaaatttctcttcaccagcaaaagacacaccatgggtgtgtgcagcatccagagcagccctcatcgggagcacatcctggccacgggaagctatgatgaacacatcctactgtgggacacacgaaacatgaagcagccgttggcagatacgcctgtgcagggtggggtatggagaatcaagtggcaccctttccaccaccacctgctcctggccgcctgcatgcacagtggctttaagatcctcaactgccaaaaggcaatgggctgtggctctctgagggcttagactctgccttattaccttttcctaagctgtagaagaggtcctgctggcccgagtggacgtgttgagcgattgctggatgaaagactagcggaggtcctgcctgccctgtgacgctacctcccaagggacagtaacggcctccccaggggcttcctcccgagggtcgccccacacatgctgctcgaggggcccctgtggctgtctctgaacattcagcatctcactcctcctcggagccacctctgcccagttgaagccctgggcccagggttgggcctccccggcccaggcccatacaacctcggcacgttttgtaatccagtgcggtcctgttctgccctcagcccttcttccatcagcactcattctggttctgattccggtcactgctggcatcaatccctgtacttcagaggtagcgatggcagccctttcagagcccaagtggccacccagccttgcagcccctggctcaccttccacttgctctctgcaactgcccctgccagccctggccttgcctcctggactccagatcgcctcgggtttggccacgcctcgtcattccctctgttgctgtgtgctctgggaggcagttgtggcctctttccagttgccgtagcaacttctataaagaaactgctcacttaaccttgtcagtggctcctttccaagccagaatccagactctgaaacagggcgtgccggaccctgcatgcttgggacgctccagcccactgtcactcactgacagtgccatggctgcctgtttgtggttccccgtgcgagccttggactttctcacctctgctgtacacatgctgcctgttcctcagacatccccttccttcccagctggctaaaactcctttgttctttggttttaagtgttaactgaggtctttccccctctctggcttttgccgtattcttcaccatcaagtgaggttctgtagccccgcttgatgcttctcttggaggcacacaggcgtgtgcactgcaagatgacggtctgtttcttctccaacatatgcccaggtcttgctggttcctttgcatgacacaacggctcctcaggaaacacttgctgacctgtgaggggctgttcttggagtctccctgtcaggtgtgacaggttggggagaggctctgggtgatgttgtgtttcctgggttctcccatctctcactccagaggagaggcaggaggcgacggtcctgacatctcacacattgcccgactcgctggtgtatggagccgactggtcctggctgctcttccgttctctgcagcgggccccctcgtggtcctttcctagcaacctaggaaccaagacggcagacctgaagggtgcaagcgagttgccaacaccctgtcatgaatgcagagaggataacgatggggagggccatgccagaccccagagtggaatgaagccactcacagagggcatgaggaagaatggcacctggctgcaggctacagcagccaccacacgtgactgtggcgtgaacccagaagaagcagactcagccttcagcctcctggccacctgctccttctatgaccatgcgctccacctctgggagtgggaggggaactgagcttgaaatcatgaagccccttcccacaaggaaaccaggagggagactgcgagtgagtgcccgggaccacctcatcagagatgcttactgcagccctgcaggtgcctgtgcactgatggaatccacagtgtagtcagaaaagctgttgacttctcttaaatcagcttccctgctgggcccctgaaagtggactgggtgattctgtctggcagagagtggggaaaagacgcggtttccagcttgcagatttgttaagtttctcaggcagattttgactttcagcctttcatacttgtttaagcaactatttgtattaaatgaagttttttgaaaaa

SEQ ID NO: 33264 - DNA, 1691 bp, Homo sapiens
cccgcgctgacggtgtccctggggctctgcgctcgtccggccggccccggcctcgccgccccgcgcagtacccagcccggccccgccgacccgcctctactgccggctccgcgcccttccccgagggctggatgatgggctgtttcgccctgcaaacggtggacaccgagctgaccgcggactcggtggagtggtgcccgctgcaaggctgcaggcacctgctggcgtgcgggacctaccagctgcggcggccggaggaccggcctgccggcccccagaacaaggtgtcacatcccggtggctggacatgccctcttgggcttggcagatgccagtggatccatacaactgctccgcctggtggaatctgagaagagccacgtgctggagccattgtccagccttgccctggaggagcagtgtctggctttgtccctagattggtccactgggaaaactggaagggccggggaccagcccttgaagatcatcagcagtgactccacagggcagctccacctcctgatggtgaatgagacgaggcccaggctgcagaaagtggcctcatggcaggcacatcaattcgaggcctggattgctgctttcaattactggcatccagaaattgtgtattcagggggcgacgatggccttctgaggggctgggacaccagggtacccggcaaatttctcttcaccagcaaaagacacaccatgggtgtgtgcagcatccagagcagccctcatcgggagcacatcctggccacgggaagctatgatgaacacatcctactgtgggacacacgaaacatgaagcagccgttggcagatacgcctgtgcagggtggggtatggagaatcaagtggcaccctttccaccaccacctgctcctggccgcctgcatgcacagtggctttaagatcctcaactgccaaaaggcaatggaggagaggcaggaggcgacggtcctgacatctcacacattgcccgactcgctggtgtatggagccgactggtcctggctgctcttccgttctctgcagcgggccccctcgtggtcctttcctagcaacctaggaaccaagacggcagacctgaagggtgcaagcgagttgccaacaccctgtcatgaatgcagagaggataacgatggggagggccatgccagaccccagagtggaatgaagccactcacagagggcatgaggaagaatggcacctggctgcaggctacagcagccaccacacgtgactgtggcgtgaacccagaagaagcagactcagccttcagcctcctggccacctgctccttctatgaccatgcgctccacctctgggagtgggaggggaactgagcttgaaatcatgaagccccttcccacaaggaaaccaggagggagactgcgagtgagtgcccgggaccacctcatcagagatgcttactgcagccctgcaggtgcctgtgcactgatggaatccacagtgtagtcagaaaagctgttgacttctcttaaatcagcttccctgctgggcccctgaaagtggactgggtgattctgtctggcagagagtggggaaaagacgcggtttccagcttgcagatttgttaagtttctcaggcagattttgactttcagcctttcatacttgtttaagcaactatttgtattaaatgaagttttttgaaaaa

SEQ ID NO: 33265 - DNA, 1785 bp, Homo sapiens
cccgcgctgacggtgtccctggggctctgcgctcgtccggccggccccggcctcgccgccccgcgcagtacccagcccggccccgccgacccgcctctactgccggctccgcgcccttccccgagggctggatgatgggctgtttcgccctgcaaacggtggacaccgagctgaccgcggactcggtggagtggtgcccgctgcaaggctgcaggcacctgctggcgtgcgggacctaccagctgcggcggccggaggaccggcctgccggcccccagaacaagatatacaaccacttcctgttgtgtcacacttgcctgcagtaacatgctgtaaggtttgtggcataggagcagtgggccataccatataatcaaggtgtcacatcccggtggctggacatgccctcttgggcttggcagatgccagtggatccatacaactgctccgcctggtggaatctgagaagagccacgtgctggagccattgtccagccttgccctggaggagcagtgtctggctttgtccctagattggtccactgggaaaactggaagggccggggaccagcccttgaagatcatcagcagtgactccacagggcagctccacctcctgatggtgaatgagacgaggcccaggctgcagaaagtggcctcatggcaggcacatcaattcgaggcctggattgctgctttcaattactggcatccagaaattgtgtattcagggggcgacgatggccttctgaggggctgggacaccagggtacccggcaaatttctcttcaccagcaaaagacacaccatgggtgtgtgcagcatccagagcagccctcatcgggagcacatcctggccacgggaagctatgatgaacacatcctactgtgggacacacgaaacatgaagcagccgttggcagatacgcctgtgcagggtggggtatggagaatcaagtggcaccctttccaccaccacctgctcctggccgcctgcatgcacagtggctttaagatcctcaactgccaaaaggcaatggaggagaggcaggaggcgacggtcctgacatctcacacattgcccgactcgctggtgtatggagccgactggtcctggctgctcttccgttctctgcagcgggccccctcgtggtcctttcctagcaacctaggaaccaagacggcagacctgaagggtgcaagcgagttgccaacaccctgtcatgaatgcagagaggataacgatggggagggccatgccagaccccagagtggaatgaagccactcacagagggcatgaggaagaatggcacctggctgcaggctacagcagccaccacacgtgactgtggcgtgaacccagaagaagcagactcagccttcagcctcctggccacctgctccttctatgaccatgcgctccacctctgggagtgggaggggaactgagcttgaaatcatgaagccccttcccacaaggaaaccaggagggagactgcgagtgagtgcccgggaccacctcatcagagatgcttactgcagccctgcaggtgcctgtgcactgatggaatccacagtgtagtcagaaaagctgttgacttctcttaaatcagcttccctgctgggcccctgaaagtggactgggtgattctgtctggcagagagtggggaaaagacgcggtttccagcttgcagatttgttaagtttctcaggcagattttgactttcagcctttcatacttgtttaagcaactatttgtattaaatgaagttttttgaaaaa

SEQ ID NO: 33266 - DNA, 3279 bp, Homo sapiens
cccgcgctgacggtgtccctggggctctgcgctcgtccggccggccccggcctcgccgccccgcgcagtacccagcccggccccgccgacccgcctctactgccggctccgcgcccttccccgagggctggatgatgggctgtttcgccctgcaaacggtggacaccgagctgaccgcggactcggtggagtggtgcccgctgcaaggctgcaggcacctgctggcgtgcgggacctaccagctgcggcggccggaggaccggcctgccggcccccagaacaaggtgtcacatcccggtggctggacatgccctcttgggcttggcagatgccagtggatccatacaactgctccgcctggtggaatctgaggtcagtgacttgcacttgttctgtggggcagaagggacctgaatagagagggttggggaggaggctgtgctgatacagacatttttctaaaacgatctctcttcaatggtgagctatatataaacgttctaagataatgtggagtctatttttaagttgtattgcgttctacatccaactccaagaggaagtcacctcatgtgtcaccagcagaagggctgaagtgacaggatgttcattgacctgtcagtggatctgaaagttctctaaggagagcctgggcaagcattcttaggttgatgctggggcccagagtagcagtgagcatcctgtgtgaagatggcatttctcactgattattggaaaagcacaagagccacgtgctggagccattgtccagccttgccctggaggagcagtgtctggctttgtccctagattggtccactgggaaaactggaagggccggggaccagcccttgaagatcatcagcagtgactccacagggcagctccacctcctgatggtgaatgagacgaggcccaggctgcagaaagtggcctcatggcaggcacatcaattcgaggcctggattgctgctttcaattactggcatccagaaattgtgtattcagggggcgacgatggccttctgaggggctgggacaccagggtacccggcaaatttctcttcaccagcaaaagacacaccatgggtgtgtgcagcatccagagcagccctcatcgggagcacatcctggccacgggaagctatgatgaacacatcctactgtgggacacacgaaacatgaagcagccgttggcagatacgcctgtgcagggtggggtatggagaatcaagtggcaccctttccaccaccacctgctcctggccgcctgcatgcacagtggctttaagatcctcaactgccaaaaggcaatgggctgtggctctctgagggcttagactctgccttattaccttttcctaagctgtagaagaggtcctgctggcccgagtggacgtgttgagcgattgctggatgaaagactagcggaggtcctgcctgccctgtgacgctacctcccaagggacagtaacggcctccccaggggcttcctcccgagggtcgccccacacatgctgctcgaggggcccctgtggctgtctctgaacattcagcatctcactcctcctcggagccacctctgcccagttgaagccctgggcccagggttgggcctccccggcccaggcccatacaacctcggcacgttttgtaatccagtgcggtcctgttctgccctcagcccttcttccatcagcactcattctggttctgattccggtcactgctggcatcaatccctgtacttcagaggtagcgatggcagccctttcagagcccaagtggccacccagccttgcagcccctggctcaccttccacttgctctctgcaactgcccctgccagccctggccttgcctcctggactccagatcgcctcgggtttggccacgcctcgtcattccctctgttgctgtgtgctctgggaggcagttgtggcctctttccagttgccgtagcaacttctataaagaaactgctcacttaaccttgtcagtggctcctttccaagccagaatccagactctgaaacagggcgtgccggaccctgcatgcttgggacgctccagcccactgtcactcactgacagtgccatggctgcctgtttgtggttccccgtgcgagccttggactttctcacctctgctgtacacatgctgcctgttcctcagacatccccttccttcccagctggctaaaactcctttgttctttggttttaagtgttaactgaggtctttccccctctctggcttttgccgtattcttcaccatcaagtgaggttctgtagccccgcttgatgcttctcttggaggcacacaggcgtgtgcactgcaagatgacggtctgtttcttctccaacatatgcccaggtcttgctggttcctttgcatgacacaacggctcctcaggaaacacttgctgacctgtgaggggctgttcttggagtctccctgtcaggtgtgacaggttggggagaggctctgggtgatgttgtgtttcctgggttctcccatctctcactccagaggagaggcaggaggcgacggtcctgacatctcacacattgcccgactcgctggtgtatggagccgactggtcctggctgctcttccgttctctgcagcgggccccctcgtggtcctttcctagcaacctaggaaccaagacggcagacctgaagggtgcaagcgagttgccaacaccctgtcatgaatgcagagaggataacgatggggagggccatgccagaccccagagtggaatgaagccactcacagagggcatgaggaagaatggcacctggctgcaggctacagcagccaccacacgtgactgtggcgtgaacccagaagaagcagactcagccttcagcctcctggccacctgctccttctatgaccatgcgctccacctctgggagtgggaggggaactgagcttgaaatcatgaagccccttcccacaaggaaaccaggagggagactgcgagtgagtgcccgggaccacctcatcagagatgcttactgcagccctgcaggtgcctgtgcactgatggaatccacagtgtagtcagaaaagctgttgacttctcttaaatcagcttccctgctgggcccctgaaagtggactgggtgattctgtctggcagagagtggggaaaagacgcggtttccagcttgcagatttgttaagtttctcaggcagattttgactttcagcctttcatacttgtttaagcaactatttgtattaaatgaagttttttgaaaaa

SEQ ID NO: 33267 - DNA, 2456 bp, Homo sapiens
  misc_feature (28)..(28): n is a, c, g, or t
ataggcagagaggatcgactatgcaggncaggagttggaaaccaatgcagcgtcaaaatagtgggcctctgttctccatatggagcagaggcccaggctgcagaaagtggcctcatggcaggcacatcaattcgaggcctggattgctgctttcaattactggcatccagaaattgtgtattcagggggcgacgatggccttctgaggggctgggacaccagggtacccggcaaatttctcttcaccagcaaaagacacaccatgggtgtgtgcagcatccagagcagccctcatcgggagcacatcctggccacgggaagctatgatgaacacatcctactgtgggacacacgaaacatgaagcagccgttggcagatacgcctgtgcagggtggggtatggagaatcaagtggcaccctttccaccaccacctgctcctggccgcctgcatgcacagtggctttaagatcctcaactgccaaaaggcaatgggctgtggctctctgagggcttagactctgccttattaccttttcctaagctgtagaagaggtcctgctggcccgagtggacgtgttgagcgattgctggatgaaagactagcggaggtcctgcctgccctgtgacgctacctcccaagggacagtaacggcctccccaggggcttcctcccgagggtcgccccacacatgctgctcgaggggcccctgtggctgtctctgaacattcagcatctcactcctcctcggagccacctctgcccagttgaagccctgggcccagggttgggcctccccggcccaggcccatacaacctcggcacgttttgtaatccagtgcggtcctgttctgccctcagcccttcttccatcagcactcattctggttctgattccggtcactgctggcatcaatccctgtacttcagaggtagcgatggcagccctttcagagcccaagtggccacccagccttgcagcccctggctcaccttccacttgctctctgcaactgcccctgccagccctggccttgcctcctggactccagatcgcctcgggtttggccacgcctcgtcattccctctgttgctgtgtgctctgggaggcagttgtggcctctttccagttgccgtagcaacttctataaagaaactgctcacttaaccttgtcagtggctcctttccaagccagaatccagactctgaaacagggcgtgccggaccctgcatgcttgggacgctccagcccactgtcactcactgacagtgccatggctgcctgtttgtggttccccgtgcgagccttggactttctcacctctgctgtacacatgctgcctgttcctcagacatccccttccttcccagctggctaaaactcctttgttctttggttttaagtgttaactgaggtctttccccctctctggcttttgccgtattcttcaccatcaagtgaggttctgtagccccgcttgatgcttctcttggaggcacacaggcgtgtgcactgcaagatgacggtctgtttcttctccaacatatgcccaggtcttgctggttcctttgcatgacacaacggctcctcaggaaacacttgctgacctgtgaggggctgttcttggagtctccctgtcaggtgtgacaggttggggagaggctctgggtgatgttgtgtttcctgggttctcccatctctcactccagaggagaggcaggaggcgacggtcctgacatctcacacattgcccgactcgctggtgtatggagccgactggtcctggctgctcttccgttctctgcagcgggccccctcgtggtcctttcctagcaacctaggaaccaagacggcagacctgaagggtgcaagcgagttgccaacaccctgtcatgaatgcagagaggataacgatggggagggccatgccagaccccagagtggaatgaagccactcacagagggcatgaggaagaatggcacctggctgcaggctacagcagccaccacacgtgactgtggcgtgaacccagaagaagcagactcagccttcagcctcctggccacctgctccttctatgaccatgcgctccacctctgggagtgggaggggaactgagcttgaaatcatgaagccccttcccacaaggaaaccaggagggagactgcgagtgagtgcccgggaccacctcatcagagatgcttactgcagccctgcaggtgcctgtgcactgatggaatccacagtgtagtcagaaaagctgttgacttctcttaaatcagcttccctgctgggcccctgaaagtggactgggtgattctgtctggcagagagtggggaaaagacgcggtttccagcttgcagatttgttaagtttctcaggcagattttgactttcagcctttcatacttgtttaagcaactatttgtattaaatgaagttttttgaaaaa

SEQ ID NO: 33268 - DNA, 2328 bp, Homo sapiens
tgatagcagcagctgctgcgtgatcgactctgaggaccccgttggcgtgagagcaccaggcacatcaattcgaggcctggattgctgctttcaattactggcatccagaaattgtgtattcagggggcgacgatggccttctgaggggctgggacaccagggtacccggcaaatttctcttcaccagcaaaagctatgatgaacacatcctactgtgggacacacgaaacatgaagcagccgttggcagatacgcctgtgcagggtggggtatggagaatcaagtggcaccctttccaccaccacctgctcctggccgcctgcatgcacagtggctttaagatcctcaactgccaaaaggcaatgggctgtggctctctgagggcttagactctgccttattaccttttcctaagctgtagaagaggtcctgctggcccgagtggacgtgttgagcgattgctggatgaaagactagcggaggtcctgcctgccctgtgacgctacctcccaagggacagtaacggcctccccaggggcttcctcccgagggtcgccccacacatgctgctcgaggggcccctgtggctgtctctgaacattcagcatctcactcctcctcggagccacctctgcccagttgaagccctgggcccagggttgggcctccccggcccaggcccatacaacctcggcacgttttgtaatccagtgcggtcctgttctgccctcagcccttcttccatcagcactcattctggttctgattccggtcactgctggcatcaatccctgtacttcagaggtagcgatggcagccctttcagagcccaagtggccacccagccttgcagcccctggctcaccttccacttgctctctgcaactgcccctgccagccctggccttgcctcctggactccagatcgcctcgggtttggccacgcctcgtcattccctctgttgctgtgtgctctgggaggcagttgtggcctctttccagttgccgtagcaacttctataaagaaactgctcacttaaccttgtcagtggctcctttccaagccagaatccagactctgaaacagggcgtgccggaccctgcatgcttgggacgctccagcccactgtcactcactgacagtgccatggctgcctgtttgtggttccccgtgcgagccttggactttctcacctctgctgtacacatgctgcctgttcctcagacatccccttccttcccagctggctaaaactcctttgttctttggttttaagtgttaactgaggtctttccccctctctggcttttgccgtattcttcaccatcaagtgaggttctgtagccccgcttgatgcttctcttggaggcacacaggcgtgtgcactgcaagatgacggtctgtttcttctccaacatatgcccaggtcttgctggttcctttgcatgacacaacggctcctcaggaaacacttgctgacctgtgaggggctgttcttggagtctccctgtcaggtgtgacaggttggggagaggctctgggtgatgttgtgtttcctgggttctcccatctctcactccagaggagaggcaggaggcgacggtcctgacatctcacacattgcccgactcgctggtgtatggagccgactggtcctggctgctcttccgttctctgcagcgggccccctcgtggtcctttcctagcaacctaggaaccaagacggcagacctgaagggtgcaagcgagttgccaacaccctgtcatgaatgcagagaggataacgatggggagggccatgccagaccccagagtggaatgaagccactcacagagggcatgaggaagaatggcacctggctgcaggctacagcagccaccacacgtgactgtggcgtgaacccagaagaagcagactcagccttcagcctcctggccacctgctccttctatgaccatgcgctccacctctgggagtgggaggggaactgagcttgaaatcatgaagccccttcccacaaggaaaccaggagggagactgcgagtgagtgcccgggaccacctcatcagagatgcttactgcagccctgcaggtgcctgtgcactgatggaatccacagtgtagtcagaaaagctgttgacttctcttaaatcagcttccctgctgggcccctgaaagtggactgggtgattctgtctggcagagagtggggaaaagacgcggtttccagcttgcagatttgttaagtttctcaggcagattttgactttcagcctttcatacttgtttaagcaactatttgtattaaatgaagttttttgaaaaa

SEQ ID NO: 33269 - DNA, 2561 bp, Homo sapiens
ctcacagacagtcacccaggggagcttcctcacagacagtcacccaggggagcttcctcacagacagagtcatccaggggagcttcctcacagacagagtcacccaggggagcttcctcacagacagagtcacccaggggagcttcctcacagacagtcaccccggggagcttcctcacagacagtcacccaggggagcttcctcacagacagagtcaccccggggagcttcctcacagacagtcaccccggggagcttcctcacagacatcaacggcctaactgagaacactcatttcctgtcattagtggtgttgatgcttctctttctccacacagggggcgacgatggccttctgaggggctgggacaccagggtacccggcaaatttctcttcaccagcaaaagacacaccatgggtgtgtgcagcatccagagcagccctcatcgggagcacatcctggccacgggaagctatgatgaacacatcctactgtgggacacacgaaacatgaagcagccgttggcagatacgcctgtgcagggtggggtatggagaatcaagtggcaccctttccaccaccacctgctcctggccgcctgcatgcacagtggctttaagatcctcaactgccaaaaggcaatggctgtagaagaggtcctgctggcccgagtggacgtgttgagcgattgctggatgaaagactagcggaggtcctgcctgccctgtgacgctacctcccaagggacagtaacggcctccccaggggcttcctcccgagggtcgccccacacatgctgctcgaggggcccctgtggctgtctctgaacattcagcatctcactcctcctcggagccacctctgcccagttgaagccctgggcccagggttgggcctccccggcccaggcccatacaacctcggcacgttttgtaatccagtgcggtcctgttctgccctcagcccttcttccatcagcactcattctggttctgattccggtcactgctggcatcaatccctgtacttcagaggtagcgatggcagccctttcagagcccaagtggccacccagccttgcagcccctggctcaccttccacttgctctctgcaactgcccctgccagccctggccttgcctcctggactccagatcgcctcgggtttggccacgcctcgtcattccctctgttgctgtgtgctctgggaggcagttgtggcctctttccagttgccgtagcaacttctataaagaaactgctcacttaaccttgtcagtggctcctttccaagccagaatccagactctgaaacagggcgtgccggaccctgcatgcttgggacgctccagcccactgtcactcactgacagtgccatggctgcctgtttgtggttccccgtgcgagccttggactttctcacctctgctgtacacatgctgcctgttcctcagacatccccttccttcccagctggctaaaactcctttgttctttggttttaagtgttaactgaggtctttccccctctctggcttttgccgtattcttcaccatcaagtgaggttctgtagccccgcttgatgcttctcttggaggcacacaggcgtgtgcactgcaagatgacggtctgtttcttctccaacatatgcccaggtcttgctggttcctttgcatgacacaacggctcctcaggaaacacttgctgacctgtgaggggctgttcttggagtctccctgtcaggtgtgacaggttggggagaggctctgggtgatgttgtgtttcctgggttctcccatctctcactccagaggagaggcaggaggcgacggtcctgacatctcacacattgcccgactcgctggtgtatggagccgactggtcctggctgctcttccgttctctgcagcgggccccctcgtggtcctttcctagcaacctaggaaccaagacggcagacctgaagggtgcaagcgagttgccaacaccctgtcatgaatgcagagaggataacgatggggagggccatgccagaccccagagtggaatgaagccactcacagagggcatgaggaagaatggcacctggctgcaggctacagcagccaccacacgtgactgtggcgtgaacccagaagaagcagactcagccttcagcctcctggccacctgctccttctatgaccatgcgctccacctctgggagtgggaggggaactgagcttgaaatcatgaagccccttcccacaaggaaaccaggagggagactgcgagtgagtgcccgggaccacctcatcagagatgcttactgcagccctgcaggtgcctgtgcactgatggaatccacagtgtagtcagaaaagctgttgacttctcttaaatcagcttccctgctgggcccctgaaagtggactgggtgattctgtctggcagagagtggggaaaagacgcggtttccagcttgcagatttgttaagtttctcaggcagattttgactttcagcctttcatacttgtttaagcaactatttgtattaaatgaagttttttgaaaaa

SEQ ID NO: 33270 - DNA, 1847 bp, Homo sapiens
cccgcgctgacggtgtccctggggctctgcgctcgtccggccggccccggcctcgccgccccgcgcagtacccagcccggccccgccgacccgcctctactgccggctccgcgcccttccccgagggctggatgatgggctgtttcgccctgcaaacggtggacaccgagctgaccgcggactcggtggagtggtgcccgctgcaaggctgcaggcacctgctggcgtgcgggacctaccagctgcggcggccggaggaccggcctgccggcccccagaacaagggtggaatggaagttaaggagcctcaggtccgtttaggccgtctcttcctgtacagtttcaatgacaacaactctattcaccctctggtcgaggtccaaagaaaagatacttctgcaatcctggacatgaaatggtgtcacatcccggtggctggacatgccctcttgggcttggcagatgccagtggatccatacaactgctccgcctggtggaatctgagaagagccacgtgctggagccattgtccagccttgccctggaggagcagtgtctggctttgtccctagattggtccactgggaaaactggaagggccggggaccagcccttgaagatcatcagcagtgactccacagggcagctccacctcctgatggtgaatgagacgaggcccaggctgcagaaagtggcctcatggcaggcacatcaattcgaggcctggattgctgctttcaattactggcatccagaaattgtgtattcagggggcgacgatggccttctgaggggctgggacaccagggtacccggcaaatttctcttcaccagcaaaagacacaccatgggtgtgtgcagcatccagagcagccctcatcgggagcacatcctggccacgggaagctatgatgaacacatcctactgtgggacacacgaaacatgaagcagccgttggcagatacgcctgtgcagggtggggtatggagaatcaagtggcaccctttccaccaccacctgctcctggccgcctgcatgcacagtggctttaagatcctcaactgccaaaaggcaatggaggagaggcaggaggcgacggtcctgacatctcacacattgcccgactcgctggtgtatggagccgactggtcctggctgctcttccgttctctgcagcgggccccctcgtggtcctttcctagcaacctaggaaccaagacggcagacctgaagggtgcaagcgagttgccaacaccctgtcatgaatgcagagaggataacgatggggagggccatgccagaccccagagtggaatgaagccactcacagagggcatgaggaagaatggcacctggctgcaggctacagcagccaccacacgtgactgtggcgtgaacccagaagaagcagactcagccttcagcctcctggccacctgctccttctatgaccatgcgctccacctctgggagtgggaggggaactgagcttgaaatcatgaagccccttcccacaaggaaaccaggagggagactgcgagtgagtgcccgggaccacctcatcagagatgcttactgcagccctgcaggtgcctgtgcactgatggaatccacagtgtagtcagaaaagctgttgacttctcttaaatcagcttccctgctgggcccctgaaagtggactgggtgattctgtctggcagagagtggggaaaagacgcggtttccagcttgcagatttgttaagtttctcaggcagattttgactttcagcctttcatacttgtttaagcaactatttgtattaaatgaagttttttgaaaaaaaaaaagtcggacgcggccgga

SEQ ID NO: 33271 - DNA, 2283 bp, Homo sapiens
cccgcgctgacggtgtccctggggctctgcgctcgtccggccggccccggcctcgccgccccgcgcagtacccagcccggccccgccgacccgcctctactgccggctccgcgcccttccccgagggctggatgatgggctgtttcgccctgcaaacggtggacaccgagctgaccgcggactcggtggagtggtgcccgctgcaaggctgcaggcacctgctggcgtgcgggacctaccagctgcggcggccggaggaccggcctgccggcccccagaacaagggtggaatggaagttaaggagcctcaggtccgtttaggccgtctcttcctgtacagtttcaatgacaacaactctattcaccctctggtcgaggtccaaagaaaagatacttctgcaatcctggacatgaaatggtgtcacatcccggtggctggacatgccctcttgggcttggcagatgccagtggatccatacaactgctccgcctggtggaatctgagaagagccacgtgctggagccattgtccagccttgccctggaggagcagtgtctggctttgtccctagattggtccactgggaaaactggaagggccggggaccagcccttgaagatcatcagcagtgactccacagggcagctccacctcctgatggtgaatgagacgaggcccaggctgcagaaagtggcctcatggcaggcacatcaattcgaggcctggattgctgctttcaattactggcatccagaaattgtgtattcagggggcgacgatggccttctgaggggctgggacaccagggtacccggcaaatttctcttcaccagcaaaagacacaccatgggtgtgtgcagcatccagagcagccctcatcgggagcacatcctggccacgggaagctatgatgaacacatcctactgtgggacacacgaaacatgaagcagccgttggcagatacgcctgtgcagggtggggtatggagaatcaagtggcaccctttccaccaccacctgctcctggccgcctgcatgcacagtggctttaagatcctcaactgccaaaaggcaatggaggagaggcaggaggcgacggtcctgacatctcacacattgcccgactcgctggtgtatggagccgactggtcctggctgctcttccgttctctgcagcgggccccctcgtggtcctttcctagcaacctaggaaccaagacggcagacctgaagggtgcaagcgagttgccaacaccctgtcatgaatgcagagaggataacgatggggagggccatgccagaccccagagtggaatgaagccactcacagagggcatgaggaagaatggcacctggctgcaggctacagcagccaccacacgtgactgtggcgtgaacccagaagaagcagactcagccttcagcctcctggccacctgctccttctatgaccatgcgctccacctctgggagtgggaggggaactgagcttgaaatcatgaagccccttcccacaaggaaaccaggagggagactgcgagtgagtgcccgggaccacctcatcagagatgcttactgcagccctgcaggtgcctgtgcactgatggaatccacagtgtagtcagaaaagctgttgacttctcttaaatcagcttccctgctgggcccctgaaagtggactgggtgattctgtctggcagagagtggggaaaagacgcggtttccagcttgcagatttgttaagtttctcaggcagattttgactttcagcctttcatacttgtttaagcaactatttgtattaaatgaagttttttgaaaaacacgagtttataacatgtttaaaatgaacattttatgcctcatcatggcaccagaaatgcttgtatagattgagcacagccagtccaaaaatccaaatcccaaaacttttggaaaatcccgcagctgaactcatgtgacgggttgcatatattattaaaactactgagcacagtcacagtggcctgtaatcccagcactttggaaggggctgaggcaggaggattgcttgaggcctggagttcaagaccagcctgggcaacatagcaaaacccagtctctataaaaagtaaaacaaaaattagccaggtgtggtgcatgtgcctatggtcccagccacttgggaggctgaggcaggaggattgttgagcccaggaggtcgaggctgcaatgagccaggggcaacagagcaagactcttatctctaaaaattaaataataaaaaattgtataaacaata

SEQ ID NO: 33272 - DNA, 603 bp, Homo sapiens
agctcggtaccccggatacaccagcgattcgggcaatgtgtgagatgtcagggaggataacgatggggagggccatgccagaccccagagtggaatgaagccactcacagagggcatgaggaagaatggcacctggctgcaggctacagcagccaccacacgtgactgtggcgtgaacccagaagaagcagactcagccttcagcctcctggccacctgctccttctatgaccatgcgctccacctctgggagtgggaggggaactgagcttgaaatcatgaagccccttcccacaaggaaaccaggagggagactgcgagtgagtgcccgggaccacctcatcagagatgcttactgcagccctgcaggtgcctgtgcactgatggaatccacagtgtagtcagaaaagctgttgacttctcttaaatcagcttccctgctgggcccctgaaagtggactgggtgattctgtctggcagagagtggggaaaagacgcggtttccagcttgcagatttgttaagtttctcaggcagattttgactttcagcctttcatacttgtttaagcaactatttgtattaaatgaagttttttgaaaaa

SEQ ID NO: 33273 - DNA, 1694 bp, Homo sapiens
  misc_feature (1553)..(1553): n is a, c, g, or t
  misc_feature (1559)..(1559): n is a, c, g, or t
  misc_feature (1568)..(1568): n is a, c, g, or t
  misc_feature (1575)..(1575): n is a, c, g, or t
  misc_feature (1594)..(1594): n is a, c, g, or t
  misc_feature (1607)..(1607): n is a, c, g, or t
  misc_feature (1609)..(1609): n is a, c, g, or t
  misc_feature (1619)..(1619): n is a, c, g, or t
  misc_feature (1627)..(1627): n is a, c, g, or t
  misc_feature (1685)..(1685): n is a, c, g, or t
cccgcgctgacggtgtccctggggctctgcgctcgtccggccggccccggcctcgccgccccgcgcagtacccagcccggccccgccgacccgcctctactgccggctccgcgcccttccccgagggctggatgatgggctgtttcgccctgcaaacggtggacaccgagctgaccgcggactcggtggagtggtgcccgctgcaaggctgcaggcacctgctggcgtgcgggacctaccagctgcggcggccggaggaccggcctgccggcccccagaacaagggtggaatggaagttaaggagcctcaggtccgtttaggccgtctcttcctgtacagtttcaatgacaacaactctattcaccctctggtcgaggtccaaagaaaagatacttctgcaatcctggacatgaaatggtgtcacatcccggtggctggacatgccctcttgggcttggcagatgccagtggatccatacaactgctccgcctggtggaatctgagaagagccacgtgctggagccattgtccagccttgccctggaggagcagtgtctggctttgtccctagattggtccactgggaaaactggaagggccggggaccagcccttgaagatcatcagcagtgactccacagggcagctccacctcctgatggtgaatgagacgaggcccaggctgcagaaagtggcctcatggcaggcacatcaattcgaggcctggattgctgctttcaattactggcatccagaaattgtgtattcagggggcgacgatggccttctgaggggctgggacaccagggtacccggcaaatttctcttcaccagcaaaagacacaccatgggtgtgtgcagcatccagagcagccctcatcgggagcacatcctggccacgggaagctatgatgaacacatcctactgtgggacacacgaaacatgaagcagccgttggcagatacgcctgtgcagggtggggtatggagaatcaagtggcaccctttccaccaccacctgctcctggccgcctgcatgcacagtggctttaagatcctcaactgccaaaaggcaatggaggagaggcaggaggcgacggtcctgacatctcacacattgcccgactcgctggtgtatggagccgactggtcctggctgctcttccgttctctgcagcgggccccctcgtggtcctttcctagcaacctaggaaccaagacggcagacctgaagggtgcaagcgagttgccaacaccctgtcatgaatgcagagaggataacgatggggagggccatgccagaccccagagtggaatgaagccactcacagagggcatgaggaagaatggcacctggctgcaggctacagcagccaccacacgtgactgtggcgtgaacccagaagaagcagactcagccttcagcctcctggccacctgctccttctatgaccatgcgctccacctctgggagtgggaggggaactgagcttgaaatcatgaagccccttcccacaaggaaaccacgacccacacccccactcagcccccnccaccnccccaccanacacgcntactgcacccccccacgcncctctccactgancnaacccacagnctacccanaaaagctccccacccctcctaaaccaccttccctgctgcccccctgaaactccactgncccatcctc

SEQ ID NO: 33274 - DNA, 2720 bp, Homo sapiens
cccgcgctgacggtgtccctggggctctgcgctcgtccggccggccccggcctcgccgccccgcgcagtacccagcccggccccgccgacccgcctctactgccggctccgcgcccttccccgagggctggatgatgggctgtttcgccctgcaaacggtggacaccgagctgaccgcggactcggtggagtggtgcccgctgcaaggctgcaggcacctgctggcgtgcgggacctaccagctgcggcggccggaggaccggcctgccggcccccagaacaagggtggaatggaagttaaggagcctcaggtccgtttaggccgtctcttcctgtacagtttcaatgacaacaactctattcaccctctggtcgaggtccaaagaaaagatacttctgcaatcctggacatgaaatggtgtcacatcccggtggctggacatgccctcttgggcttggcagatgccagtggatccatacaactgctccgcctggtggaatctgagaagagccacgtgctggagccattgtccagccttgccctggaggagcagtgtctggctttgtccctagattggtccactgggaaaactggaagggccggggaccagcccttgaagatcatcagcagtgactccacagggcagctccacctcctgatggtgaatgagacgaggcccaggctgcagaaagtggcctcatggcaggcacatcaattcgaggcctggattgctgctttcaattactggcatccagaaattgtgtattcagggggcgacgatggccttctgaggggctgggacaccagggtacccggcaaatttctcttcaccagcaaaagacacaccatgggtgtgtgcagcatccagagcagccctcatcgggagcacatcctggccacgggaagctatgatgaacacatcctactgtgggacacacgaaacatgaagcagccgttggcagatacgcctgtgcagggtggggtatggagaatcaagtggcaccctttccaccaccacctgctcctggccgcctgcatgcacagtggctttaagatcctcaactgccaaaaggcaatgggctgtggctctctgagggcttagactctgccttattaccttttcctaagctgtagaagaggtcctgctggcccgagtggacgtgttgagcgattgctggatgaaagactagcggaggtcctgcctgccctgtgacgctacctcccaagggacagtaacggcctccccaggggcttcctcccgagggtcgccccacacatgctgctcgaggggcccctgtggctgtctctgaacattcagcatctcactcctcctcggagccacctctgcccagttgaagccctgggcccagggttgggcctccccggcccaggcccatacaacctcggcacgttttgtaatccagtgcggtcctgttctgccctcagcccttcttccatcagcactcattctggttctgattccggtcactgctggcatcaatccctgtacttcagaggtagcgatggcagccctttcagagcccaagtggccacccagccttgcagcccctggctcaccttccacttgctctctgcaactgcccctgccagccctggccttgcctcctggactccagatcgcctcgggtttggccacgcctcgtcattccctctgttgctgtgtgctctgggaggcagttgtggcctctttccagttgccgtagcaacttctataaagaaactgctcacttaaccttgtcagtggctcctttccaagccagaatccagactctgaaacagggcgtgccggaccctgcatgcttgggacgctccagcccactgtcactcactgacagtgccatggctgcctgtttgtggttccccgtgcgagccttggactttctcacctctgctgtacacatgctgcctgttcctcagacatccccttccttcccagctggctaaaactcctttgttctttggttttaagtgttaactgaggtctttccccctctctggcttttgccgtattcttcaccatcaagtgaggttctgtagccccgcttgatgcttctcttggaggcacacaggcgtgtgcactgcaagatgacggtctgtttcttctccaacatatgcccaggtcttgctggttcctttgcatgacacaacggctcctcaggaaacacttgctgacctgtgaggggctgttcttggagtctccctgtcaggtgtgacaggttggggagaggctctgggtgatgttgtgtttcctgggttctcccatctctcactccagaggagaggcaggaggcgacggtcctgacatctcacacattgcccgactcgctggtgtatggagccgactggtcctggctgctcttccgttctctgcagcgggccccctcgtggtcctttcctagcaacctaggaaccaagacggcagacctgaagggtgcaagcgagttgccaacaccctgtcatgaatgcagagaggataacgatggggagggccatgccagaccccagagtggaatgaagccactcacagagggcatgaggaagaatggcacctggctgcaggctacagcagccaccacacgtgactgtggcgtgaacccagaagaagcagactcagccttcagcctcctgcctctcctccattgccttttggcagttgaggatcttaaagccactgtgcatgcaggcggcagatgaggtg

SEQ ID NO: 33275 - DNA, 1420 bp, Homo sapiens
cccgcgctgacggtgtccctggggctctgcgctcgtccggccggccccggcctcgccgccccgcgcagtacccagcccggccccgccgacccgcctctactgccggctccgcgcccttccccgagggctggatgatgggctgtttcgccctgcaaacggtggacaccgagctgaccgcggactcggtggagtggtgcccgctgcaaggctgcaggcacctgctggcgtgcgggacctaccagctgcggcggccggaggaccggcctgccggcccccagaacaagggtggaatggaagttaaggagcctcaggtccgtttaggccgtctcttcctgtacagtttcaatgacaacaactctattcaccctctggtcgaggtccaaagaaaagatacttctgcaatcctggacatgaaatggtgtcacatcccggtggctggacatgccctcttgggcttggcagatgccagtggatccatacaactgctccgcctggtggaatctgagaagagccacgtgctggagccattgtccagccttgccctggaggagcagtgtctggctttgtccctagattggtccactgggaaaactggaagggccggggaccagcccttgaagatcatcagcagtgactccacagggcagctccacctcctgatggtgaatgagacgaggcccaggctgcagaaagtggcctcatggcaggcacatcaattcgaggcctggattgctgctttcaattactggcatccagaaattgtgtattcagggggcgacgatggccttctgaggggctgggacaccagggtacccggcaaatttctcttcaccagcaaaagacacaccatgggtgtgtgcagcatccagagcagccctcatcgggagcacatcctggccacgggaagctatgatgaacacatcctactgtgggacacacgaaacatgaagcagccgttggcagatacgcctgtgcagggtggggtatggagaatcaagtggcaccctttccaccaccacctgctcctggccacctgctccttctatgaccatgcgctccacctctgggagtgggaggggaactgagcttgaaatcatgaagccccttcccacaaggaaaccaggagggagactgcgagtgagtgcccgggaccacctcatcagagatgcttactgcagccctgcaggtgcctgtgcactgatggaatccacagtgtagtcagaaaagctgttgacttctcttaaatcagcttccctgctgggcccctgaaagtggactgggtgattctgtctggcagagagtggggaaaagacgcggtttccagcttgcagatttgttaagtttctcaggcagattttgactttcagcctttcatacttgtttaagcaactatttgtattaaatgaagttttttgaaaaa

SEQ ID NO: 33276 - DNA, 1115 bp, Homo sapiens
cccgcgctgacggtgtccctggggctctgcgctcgtccggccggccccggcctcgccgccccgcgcagtacccagcccggccccgccgacccgcctctactgccggctccgcgcccttccccgagggctggatgatgggctgtttcgccctgcaaacggtggacaccgagctgaccgcggactcggtggagtggtgcccgctgcaaggctgcaggcacctgctggcgtgcgggacctaccagctgcggcggccggaggaccggcctgccggcccccagaacaagggtggaatggaagttaaggagcctcaggtccgtttaggccgtctcttcctgtacagtttcaatgacaacaactctattcaccctctggtcgaggtccaaagaaaagatacttctgcaatcctggacatgaaatggtgtcacatcccggtggctggacatgccctcttgggcttggcagatgccagtggatccatacaactgctccgcctggtggaatctgagaagagccacgtgctggagccattgtccagccttgccctggaggagcagtgtctggctttgtccctagattggtccactgggaaaactggaagggccggggaccagcccttgaagatcatcagcagtgactccacagggcagctccacctcctgatggtgaatgagacgaggcccaggctgcagaaagtggcctcatggcaggcacatcaattcgaggcctggattgctgctttcaattactggcatccagaaattgtgtattcagggggcgacgatggccttctgaggggctgggacaccagggtacccggcaaatttctcttcaccagcaaaagacacaccatgggtgtgtgcagcatccagagcagccctcatcgggagcacatcctggccacgggaagctatgatgaacacatcctactgtgggacacacgaaacatgaagcagccgttggcagatacgcctgtgcagggtggggtatggagaatcaagtggcaccctttccaccaccacctgctcctggccgcctgcatgcacagtggctttaagatcctcaactgccaaaaggcaatgggtgagtggggacccgtggctgctgggcctcagggc

SEQ ID NO: 33277 - DNA, 929 bp, Homo sapiens
cccgcgctgacggtgtccctggggctctgcgctcgtccggccggccccggcctcgccgccccgcgcagtacccagcccggccccgccgacccgcctctactgccggctccgcgcccttccccgagggctggatgatgggctgtttcgccctgcaaacggtggacaccgagctgaccgcggactcggtggagtggtgcccgctgcaaggctgcaggcacctgctggcgtgcgggacctaccagctgcggcggccggaggaccggcctgccggcccccagaacaagggtggaatggaagttaaggagcctcaggtccgtttaggccgtctcttcctgtacagtttcaatgacaacaactctattcaccctctggtcgaggtccaaagaaaagatacttctgcaatcctggacatgaaatggtgtcacatcccggtggctggacatgccctcttgggcttggcagatgccagtggatccatacaactgctccgcctggtggaatctgagaagagccacgtgctggagccattgtccagccttgccctggaggagcagtgtctggctttgtccctagattggtccactgggaaaactggaagggccggggaccagcccttgaagatcatcagcagtgactccacagggcagctccacctcctgatggtgaatgagacgaggcccaggctgcagaaagtggcctcatggcaggcacatcaattcgaggcctggattgctgctttcaattactggcatccagaaattgtgtattcagggggcgacgatggccttctgaggggctgggacaccagggtacccggcaaatttctcttcaccagcaaaagacacaccatggcgtgtgtcagcatcgcacgagcagccacatgcatgcgagagcacactcctcggacctcgagaagatactcgactgac

SEQ ID NO: 33278 - DNA, 1229 bp, Homo sapiens
cccgcgctgacggtgtccctggggctctgcgctcgtccggccggccccggcctcgccgccccgcgcagtacccagcccggccccgccgacccgcctctactgccggctccgcgcccttccccgagggctggatgatgggctgtttcgccctgcaaacggtggacaccgagctgaccgcggactcggtggagtggtgcccgctgcaaggctgcaggcacctgctggcgtgcgggacctaccagctgcggcggccggaggaccggcctgccggcccccagaacaagggtggaatggaagttaaggagcctcaggtccgtttaggccgtctcttcctgtacagtttcaatgacaacaactctattcaccctctggtcgaggtccaaagaaaagatacttctgcaatcctggacatgaaatgatatacaaccacttcctgttgtgtcacacttgcctgcagtaacatgctgtaaggtttgtggcataggagcagtgggccataccatataatcaaggtgtcacatcccggtggctggacatgccctcttgggcttggcagatgccagtggatccatacaactgctccgcctggtggaatctgaggtcagtgacttgcacttgttctgtggggcagaagggacctgaatagagagggttggggaggaggctgtgctgatacagacatttttctaaaacgatctctcttcaatggtgagctatatataaacgttctaagataatgtggagtctatttttaagttgtattgcgttctacatccaactccaagaggaagtcacctcatgtgtcaccagcagaagggctgaagtgacaggatgttcattgacctgtcagtggatctgaaagttctctaaggagagcctgggcaagcattcttaggttgatgctggggcccagagtagcagtgagcatcctgtgtgaagatggcatttctcactgattattggaaaagcacaagagccacgtgctggagccattgtccagccttgccctggaggagcagtgtctggctttgtccctagattggtccactgggaaaactggaaggtaagggccaggcttggtcaggggtcctgagtctttctctgagaaccacttccacttttcaggctagagggctccagccaccttcagcgagctgcgactgtgctcctcagccctgacatcatcactgccagtcctattatgaaaaaaaggtcccccattttagata

SEQ ID NO: 33279 - DNA, 1468 bp, Homo sapiens
cccgcgctgacggtgtccctggggctctgcgctcgtccggccggccccggcctcgccgccccgcgcagtacccagcccggccccgccgacccgcctctactgccggctccgcgcccttccccgagggctggatgatgggctgtttcgccctgcaaacggtggacaccgagctgaccgcggactcggtggagtggtgcccgctgcaaggctgcaggcacctgctggcgtgcgggacctaccagctgcggcggccggaggaccggcctgccggcccccagaacaagggtggaatggaagttaaggagcctcaggtccgtttaggccgtctcttcctgtacagtttcaatgacaacaactctattcaccctctggtcgaggtccaaagaaaagatacttctgcaatcctggacatgaaatgatatacaaccacttcctgttgtgtcacacttgcctgcagtaacatgctgtaaggtttgtggcataggagcagtgggccataccatataatcaaggtgtcacatcccggtggctggacatgccctcttgggcttggcagatgccagtggatccatacaactgctccgcctggtggaatctgaggtcagtgacttgcacttgttctgtggggcagaagggacctgaatagagagggttggggaggaggctgtgctgatacagacatttttctaaaacgatctctcttcaatggtgagctatatataaacgttctaagataatgtggagtctatttttaagttgtattgcgttctacatccaactccaagaggaagtcacctcatgtgtcaccagcagaagggctgaagtgacaggatgttcattgacctgtcagtggatctgaaagttctctaaggagagcctgggcaagcattcttaggttgatgctggggcccagagtagcagtgagcatcctgtgtgaagatggcatttctcactgattattggaaaagcacgtgagtcctgtgtgaatttttccgagtttctcacagtgctctggagccatgcattaacaaagtgacttcatctgatagctgtcggggaggagaacggggatgtcccgtagtggggtgatgtaaacagcctgtgtaggaaaaggccttgcttaaggcagcttagagcagttgccctgtcttagaaaggagggaaagagcagccacaggaaagctgtgggcccaagggaggagtgcatgaacccaggaaagggctttggtacagcagcctgctgggagcagggatggagttaagcactggccaggctgtttaggaaatgaaatttatatagatctgcataaagagcaaccacgttctcatggctgctcgcggcttctgaatggggaaaagacgcggtttccagcttgcagatttgttaagtttctcaggcagattttgactttcagcctttcatacttgtttaagcaactatttgtattaaatgaagttttttgaaaaa

SEQ ID NO: 33280 - DNA, 1100 bp, Homo sapiens
cccgcgctgacggtgtccctggggctctgcgctcgtccggccggccccggcctcgccgccccgcgcagtacccagcccggccccgccgacccgcctctactgccggctccgcgcccttccccgagggctggatgatgggctgtttcgccctgcaaacggtggacaccgagctgaccgcggactcggtggagtggtgcccgctgcaaggctgcaggcacctgctggcgtgcgggacctaccagctgcggcggccggaggaccggcctgccggcccccagaacaagggtggaatggaagttaaggagcctcaggtccgtttaggccgtctcttcctgtacagtttcaatgacaacaactctattcaccctctggtcgaggtccaaagaaaagatacttctgcaatcctggacatgaaatgatatacaaccacttcctgttgtgtcacacttgcctgcagtaacatgctgtaaggtttgtggcataggagcagtgggccataccatataatcaaggtgtcacatcccggtggctggacatgccctcttgggcttggcagatgccagtggatccatacaactgctccgcctggtggaatctgaggtcagtgacttgcacttgttctgtggggcagaagggacctgaatagagagggttggggaggaggctgtgctgatacagacatttttctaaaacgatctctcttcaatggtgagctatatataaacgttctaagataatgtggagtctatttttaagttgtattgcgttctacatccaactccaagaggaagtcacctcatgtgtcaccagcagaagggctgaagtgacaggatgttcattgacctgtcagtggatctgaaagttctctaaggagagcctgggcaagcattcttaggttgatgctggggcccagagtagcagtgagcatcctgtgtgaagatggcatttctcactgattattggaaaagcacgtgagtcctgtgtgaatttttccgagtttctcacagtgctctggagccatgcattaacaaagtgacttcatctgatagctgttgtaactggagctgttgtaactggagctgttgtaactgagcttactt

SEQ ID NO: 33281 - DNA, 314 bp, Homo sapiens
tgtgtgctggacactggttcagaagccgcctctgcttgcagacacaccatgggtgtgtgcagcatccagagcagccctcatcgggagcacatcctggccacgggaaggtgagtccccaggaggctctcgggcccttctcgtctctttcgctgtccccggggggctcctgggcccttcttccctctttcgctgcctttcctcctggcaccattgcagcatttcgtctgccagtgcttcgccggagtgtaggtatatgggtttggtaaaggggactttgtcctcgagggatgcatgggacaggtctctgggagacg

SEQ ID NO: 33282 - DNA, 536 bp, Homo sapiens
ccggggagcttcctcacagacagtcaccccggggagcttcctcacagacatcaacggcctaactgagaacactcatttcctgtcattagtggtgttgatgcttctctttctccacacagggggcgacgatggccttctgaggggctgggacaccagggtacccggcaaatttctcttcaccagcaaaaggtaactgcccaagggccagcactcggtgcccacaccagcccccgcgttccctgggtcaccagccctcccgttccctgggtgggtctgtgtgctggacactggttcagaagccgcctctgcttgcagacacaccatgggtgtgtgcagcatccagagcagccctcatcgggagcacatcctggccacgggaaggtgagtccccaggaggctctcgggcccttctcgtctctttcgctgtccccggggggctcctgggcccttcttccctctttcgctgcctttcctcctggcaccattgcagcatttcgtctgccagtgcttcgccggagtgtaggtatatgggtttg

SEQ ID NO: 33283 - DNA, 677 bp, Homo sapiens
caccgtaatctccgtttgacaatgaatggtcataaattcaaagaaattgcaggactcttattttgaaattcatataaatgatttctttataagtacacataaaactcttttctcttaaaatatacagaaaaagaaaaatgtacagctgctcagggtaacaaagtattgccttctagaaattctcaggcttcttgtctttaaggataaacaggaagcatttctaattagtgtcttggttgtttgcatattgagcttccaaaatgctttagaaggttcatcttttcaatccgcccttcgcagtcctttatttttcatttgctaagcagaggtaaacttaaaaccatctctatgtgacttatcataaatcccaatcagtgagacctcaaataatgaacttggctctcatttatacacgtgacaaaaggtatacctatataaatatctaataaaaactacctaacagctaaatacaacaaagagaagcaattttcctttctttttcacccaatggctctaattaatcatacagtacagaaaaataagaaaccttttatgtagcttttagtggttttgttcattctagtttccacctgtgagtagcattcatttataaacctgtcttgctgagcacagtgctttcaaaaatgacttgcttgtgactcagaaacaaaaaaaaa

SEQ ID NO: 33284 - DNA, 465 bp, Homo sapiens
ccaagaattcggcacgaggagaggggcggatctgggcccgtttgcaggaggccattgcctaccctctccccacagtgagccagcagccatcagctgatcccacctgggaaaccttcatgcctctctgatggttactgcccacccttaccccacccctcagctcagcctggtatggaaagcaaggtgcacgttggtctttgattgttctgtcctcacagcagagccagctttccccccatgttgctgctgcttttgctgctcatgctgcttgttgttttctcttccttatctttccaaattgtttccttgaaatgcttgtttccaatttttcttagattatgtttctaatttttattccaggtgtttttttttcttacttgacagaaaaaaagaaaaccccaacaatatcttgctgtattatcacattttttataaagttaaagcatttctcttaaaaaaagccgt

SEQ ID NO: 33285 - DNA, 5635 bp, Homo sapiens
cttgtgctaacaatttatgaagcaaaaggcttagaatttgatgatgtcctcctttacaacttttttactgattctgagggatgcccaagttggagcaagctctaaggagagccttacagatgaagccaaggttagcaatgtccaccctgtgatgacagaactgggtaaggtcagttcatagatagagacaattccaggaagacaaatgaggcttggttcctgccctctggatcaggtaatgtgggggacaagaacagcttccttgcatgagagacccctctagcatggcttcactaccactgcttgcagctcatgcagatgatggcagccaaagagtccccacattgacccccagtgacctctgtattggtccactgctttcacttggctcctgagtccttgtgggtttttctccccaagcttagttcattatgggtagagctaccaactcacagccgttgtcctgggttttctagccactgttttctctttcccactatcttttggtggagactcaagctggctgctgactgtactgtggggtcttctctggggacttagctggctgtgtcccagtccttgttgcagacttcctttgcacatgatgcatgcttgaaggggctatgttatacccaagtcaagagcactgttggctttaacactttaaaaatctgccccagaactgaccctttagatagagtccttcctttttttcttatcattttttaaatgttattttgccttaatagcacaactattacaatattgatataggtgctttgcagtttacagagtactttttgaagtcattgtctcactccaccaaccctctgaggttatatgtatttttattactctcattctattttttaaaatttatttttatttttatagagatatggtcttgctgtgttgcccaggctggtctcaaactcctggccttaagtaatcttcctgccttggcctcccgaagtgctgagattataagcatgagccacctttatctgtagataaagcagaaggtcactgagattagtacatttctcatagtcgtaatgtagatggcagagcctggagatgaactcagatgctttgagttctaaatctctttccattttccttccttttaaagcctcgcatgcgaattgaattccagaaccttccacaattagtgtatcattgctgttccttatgtacattcctttcctgttaaattttgctaataaaatcagatgcacactcattaaccctggaaccatttttacctctgaggactaacttttttttctaatgatacatccatcggtcatggttggactgaggctctcctaaaagaggaagggcttataaggaatggaagatcatttcctcattcacacctacctcaactgactccagagaggaaaaccggccattggttgaagtacccctggacaaaccaggctcttctcagggtcgatctctcatggtgaatccagaaatgtacaagctcctcaacggagagctgaagcagctgtacaccgccatcacacgggctcgggtcaacctctggatctttgatgaaaaccgagagaaacgggctcccgcattcaaatatttcattagaagagattttgtccaagttgtaaagacagatgaaaataaagactttgatgatagcatgttcgttaagacctcaactcctgcggagtggattgcacagggagattactacgccaagcaccagtgctggaaggttgcagccaagtgttaccagaaaggaggtgcatttgagaaggagaagttggccctggcccatgacactgccctgagcatgaaatccaagaaagtcagccccaaggaaaagcagttggaatatttggaattggctaagacctatttggagtgcaaagagccaacactgtcccttaagtgtctgagctatgccaaggagttccagctctctgcccagctgtgcgagaggctgggaaagataagagatgctgcctatttctataagcgaagccagtgctacaaagacgctttcagatgctttgagcagattcaggaatttgatctagcactcaaaatgtactgccaagaggagctttttgaagaagctgctattgcagtggaaaagtatgaagaaatgctaaagactaagacccttcccatttccaagctctcctattctgccagtcagttttacttggaagctgcagcaaagtatctgagtgcaaataagatgaaggaaatgatggctgtcctctcaaagctagacatagaagaccagctggtgttcttgaagtctcggaaacgcttagcagaagctgcagacctgctgaacagggaaggtaggagagaagaggctgccctgctgatgaagcaacatggctgcctcctggaggctgccaggctcactgccgacaaggacttccaggcctcatgtctgctgggggccgcccgcctcaatgtggccagggattccgacatagaacacaccaaggacattctgagagaagcacttgatatctgctatcaaactggccagttgtctggcattgcggaggcccacttcctgcaaggggtaatcctgagagactttcagaagctcagggatgccttcttcaagtttgacacgctcaaccactcagctggagtggtggaagcactctacgaagcagccagccagtgtgaggccgagcctgagaagattctgggcctggctccagggggcttggaaatcctcctcagtctggtcagggctctcaaaagagtgaccaacaatgctgagaaggaaatggtcaaatcttgctttgagttttttgggatttcccaggtggatgccaagtattgccagatagctcagaatgaccctgggcccatattaagaataatttttgacctggatttgaacttgagagagaaaaaaacaaaagatcattttttgataatgactgaccaagtgaaattagccctaaacaaacaccttttgggcaggctgtgtcagatcacacggagcctgcttgggaagacctaccgaggagtctgcatgaggtttattgtaggcttaaaatgtgaggatgaaaactgtgaacattttcacaggcctctgcggcgttgtgaagccaagtgtttagttcagtcgaaaatgaacttggtggcaatcaacgggttgcttttggaagccaaaaaagtattccctaaaatcttagcagaagaacttaaagaaattgattatattttgtctacagatatgtatggcctttgcaagtccattctggatgtccttttccctaagcatttccatcagagagtgttgtcagaaaaccccatggcatgcaaagaaatcctcaaaccaaattacaaatccttccggttctacagatttgctttgaaggagtacatccactttctgtttgaaaatgaaagcgcacgcaaccgccgggaatccacagacctgtggctgagtgccatgcaagctttccttctctcttccaactacccggaggagtttgaaaagctgctccaccaggaggaggacaactacaacagggaactcaaagctctagagtctgaaaaggatgaaaggggcagggggagaggcagcaggataaaaggaatagaagggaaatttggcatgctggcacccaacagggatgatgaaaatatggacaagacccacctgtgcttcatccggcttctggagaattgcattgatcaattctacgtgtacaggaacccagaagactacaagaggctctttttccgtttcatgaatgtcctcatcaagaggtgcaaagaaccactcatccccagcattggaaacacagtagccctcctggagttccagttcatccactgtggggtggtgctggcccgcctctggaagaatgtcattctatgcctccccaagagctacattgcactcttgcactactgggagttcctgtttagcaagaaggacaaggagcttggggatgtgttctccatcattcaggaatacaaacccaaggacgtgacaagagccattcaggatttccggttccatctctcctacctcgccaaggtgctatgtggctatgagaatgtgaacttcaacgtcctgcttgatgccttcagtgaaatagactatgtggtctcgggtgaggctgagcggacactggtgctgtgcttggtgatgctagtgaatgctgaggagatcctgcagccatactgcaagcctctcctgtatcgccacttccgggagattgagtcaaggctgcagctcatgagcatggactgccctggccaggttcccgagaggctcctgaaggtggtgaagcgggtcttggtggcagtcaatgtgaagtctgtggctgaggcactgcaggacctgctctttgagcgggatgaagagtacctaatggactgtgactggcggtgggaccctgtgcacaccaaagggtccatagtccgtggcctctattatgaggaggtcagactaaaccgcctgctctgtttggaccctgtggactactttgctgaacctgagtgtgagtttggccaggatgagatggatgaactggcattagaagaccgagaccacgtcctggccaccattctttcccaaaagcaacggaaggcctccatacagcggaagttgaggagggcatgcctggtggtgtctctgtgcatcagttggaggagaagagtgggcacccagatggagcgtgtcagggaggaggccagggagcccagggctgggaacttcaaaaaggcagacgtggacaggacccagtgtgacctatgtggagtgaagtttacccgtggcccagagaactatttcagccccagcaaagcgtttgagggggcagcttccgaggtggcagtcctttccagggctgagctggaaagggaggagtgtcaggagaggaacagcgagtcttacgagcagcatatccatctagaacaccaccagaggcagcaagtggcctaccagaaatactcagaatttttccacgagaaggtggacccggccattgatgaaggcaagctggtggtgcaggacatcgagcaaagtgtatggatccacagtcacgtgggctccaaggagcacagccacatgctgcagaaggtccaggagcacatcaagagggtttcggatatggtggaggacctctacaggcggaaggcctgggctggcgcggaggaggcgatgactcggctggtcaacattctgatcctgtcagtcagggatgcacgagactggttgatgaaaacagagacccgcttaaagaaggaaggtattgttcaggaagatgattatgaaaatgaagttgaagactttggtgagcttcggcctagaaggcgttctcggaaatgtggaaacaaggtgcacgttggtctttgattgttctgtcctcacagcagagccagctttccccccatgttgctgctgcttttgctgctcatgctgcttgttgttttctcttccttatctttccaaattgtttccttgaaatgcttgtttccaatttttcttagattatgtttctaatttttattccaggtgtttttttttcttacttgacagaaaaaaagaaaaccccaacaatatcttgctgtattatcacattttttataaagttaaagcatttctcttaaaaaaagccgt

SEQ ID NO: 33286 - DNA, 347 bp, Homo sapiens
gtatgtcacacctaattcttttcacacaatgaatatttatgtatgagctgaacttccctctggggaagagaatttggagttgagggtaagagagtttatcacaggctcctgtttgtgttttagagcatcattcattcagtatgaggttttgtgtgtttagatgtgggttttgacattagctgtgggttgtttcacagtgtgtcatgggctagttccccctgtgccctgcccttctttggctctctagtacccaagtgccagtgtccagttctcattagccactgttatccttggctcccagggatgcccaagttggagcaagctctaaggagagccttacagatgaa

SEQ ID NO: 33287 - DNA, 6832 bp, Homo sapiens
cttgtgctaacaatttatgaagcaaaaggcttagaatttgatgatgtcctcctttacaacttttttactgattctgagggatgcccaagttggagcaagctctaaggagagccttacagatgaagccaaggttagcaatgtccaccctgtgatgacagaactgggtaaggtcagttcatagatagagacaattccaggaagacaaatgaggcttggttcctgccctctggatcaggtaatgtgggggacaagaacagcttccttgcatgagagacccctctagcatggcttcactaccactgcttgcagctcatgcagatgatggcagccaaagagtccccacattgacccccagtgacctctgtattggtccactgctttcacttggctcctgagtccttgtgggtttttctccccaagcttagttcattatgggtagagctaccaactcacagccgttgtcctgggttttctagccactgttttctctttcccactatcttttggtggagactcaagctggctgctgactgtactgtggggtcttctctggggacttagctggctgtgtcccagtccttgttgcagacttcctttgcacatgatgcatgcttgaaggggctatgttatacccaagtcaagagcactgttggctttaacactttaaaaatctgccccagaactgaccctttagatagagtccttcctttttttcttatcattttttaaatgttattttgccttaatagcacaactattacaatattgatataggtgctttgcagtttacagagtactttttgaagtcattgtctcactccaccaaccctctgaggttatatgtatttttattactctcattctattttttaaaatttatttttatttttatagagatatggtcttgctgtgttgcccaggctggtctcaaactcctggccttaagtaatcttcctgccttggcctcccgaagtgctgagattataagcatgagccacctttatctgtagataaagcagaaggtcactgagattagtacatttctcatagtcgtaatgtagatggcagagcctggagatgaactcagatgctttgagttctaaatctctttccattttccttccttttaaagcctcgcatgcgaattgaattccagaaccttccacaattagtgtatcattgctgttccttatgtacattcctttcctgttaaattttgctaataaaatcagatgcacactcattaaccctggaaccatttttacctctgaggactaacttttttttctaatgatacatccatcggtcatggttggactgaggctctcctaaaagaggaagggcttataaggaatggaagatcatttcctcattcacacctacctcaactgactccagagaggaaaaccggccattggttgaagtacccctggacaaaccaggctcttctcagggtcgatctctcatggtgaatccagaaatgtacaagctcctcaacggagagctgaagcagctgtacaccgccatcacacgggctcgggtcaacctctggatctttgatgaaaaccgagagaaacgggctcccgcattcaaatatttcattagaagagattttgtccaagttgtaaagacagatgaaaataaagactttgatgatagcatgttcgttaagacctcaactcctgcggagtggattgcacagggagattactacgccaagcaccagtgctggaaggttgcagccaagtgttaccagaaaggaggtgcatttgagaaggagaagttggccctggcccatgacactgccctgagcatgaaatccaagaaagtcagccccaaggaaaagcagttggaatatttggaattggctaagacctatttggagtgcaaagagccaacactgtcccttaagtgtctgagctatgccaaggagttccagctctctgcccagctgtgcgagaggctgggaaagataagagatgctgcctatttctataagcgaagccagtgctacaaagacgctttcagatgctttgagcagattcaggaatttgatctagcactcaaaatgtactgccaagaggagctttttgaagaagctgctattgcagtggaaaagtatgaagaaatgctaaagactaagacccttcccatttccaagctctcctattctgccagtcagttttacttggaagctgcagcaaagtatctgagtgcaaataagatgaaggaaatgatggctgtcctctcaaagctagacatagaagaccagctggtgttcttgaagtctcggaaacgcttagcagaagctgcagacctgctgaacagggaaggtaggagagaagaggctgccctgctgatgaagcaacatggctgcctcctggaggctgccaggctcactgccgacaaggacttccaggcctcatgtctgctgggggccgcccgcctcaatgtggccagggattccgacatagaacacaccaaggacattctgagagaagcacttgatatctgctatcaaactggccagttgtctggcattgcggaggcccacttcctgcaaggggtaatcctgagagactttcagaagctcagggatgccttcttcaagtttgacacgctcaaccactcagctggagtggtggaagcactctacgaagcagccagccagtgtgaggccgagcctgagaagattctgggcctggctccagggggcttggaaatcctcctcagtctggtcagggctctcaaaagagtgaccaacaatgctgagaaggaaatggtcaaatcttgctttgagttttttgggatttcccaggtggatgccaagtattgccagatagctcagaatgaccctgggcccatattaagaataatttttgacctggatttgaacttgagagagaaaaaaacaaaagatcattttttgataatgactgaccaagtgaaattagccctaaacaaacaccttttgggcaggctgtgtcagatcacacggagcctgcttgggaagacctaccgaggagtctgcatgaggtttattgtaggcttaaaatgtgaggatgaaaactgtgaacattttcacaggcctctgcggcgttgtgaagccaagtgtttagttcagtcgaaaatgaacttggtggcaatcaacgggttgcttttggaagccaaaaaagtattccctaaaatcttagcagaagaacttaaagaaattgattatattttgtctacagatatgtatggcctttgcaagtccattctggatgtccttttccctaagcatttccatcagagagtgttgtcagaaaaccccatggcatgcaaagaaatcctcaaaccaaattacaaatccttccggttctacagatttgctttgaaggagtacatccactttctgtttgaaaatgaaagcgcacgcaaccgccgggaatccacagacctgtggctgagtgccatgcaagctttccttctctcttccaactacccggaggagtttgaaaagctgctccaccaggaggaggacaactacaacagggaactcaaagctctagagtctgaaaaggatgaaaggggcagggggagaggcagcaggataaaaggaatagaagggaaatttggcatgctggcacccaacagggatgatgaaaatatggacaagacccacctgtgcttcatccggcttctggagaattgcattgatcaattctacgtgtacaggaacccagaagactacaagaggctctttttccgtttcatgaatgtcctcatcaagaggtgcaaagaaccactcatccccagcattggaaacacagtagccctcctggagttccagttcatccactgtggggtggtgctggcccgcctctggaagaatgtcattctatgcctccccaagagctacattgcactcttgcactactgggagttcctgtttagcaagaaggacaaggagcttggggatgtgttctccatcattcaggaatacaaacccaaggacgtgacaagagccattcaggatttccggttccatctctcctacctcgccaaggtgctatgtggctatgagaatgtgaacttcaacgtcctgcttgatgccttcagtgaaatagactatgtggtctcgggtgaggctgagcggacactggtgctgtgcttggtgatgctagtgaatgctgaggagatcctgcagccatactgcaagcctctcctgtatcgccacttccgggagattgagtcaaggctgcagctcatgagcatggactgccctggccaggttcccgagaggctcctgaaggtggtgaagcgggtcttggtggcagtcaatgtgaagtctgtggctgaggcactgcaggacctgctctttgagcgggatgaagagtacctaatggactgtgactggcggtgggaccctgtgcacaccaaagggtccatagtccgtggcctctattatgaggaggtcagactaaaccgcctgctctgtttggaccctgtggactactttgctgaacctgagtgtgagtttggccaggatgagatggatgaactggcattagaagaccgagaccacgtcctggccaccattctttcccaaaagcaacggaaggcctccatacagcggaagttgaggagggcatgcctggtggtgtctctgtgcatcagttggaggagaagagtgggcacccagatggagcgtgtcagggaggaggccagggagcccagggctgggaacttcaaaaaggcagacgtggacaggacccagtgtgacctatgtggagtgaagtttacccgtggcccagagaactatttcagccccagcaaagcgtttgagggggcagcttccgaggtggcagtcctttccagggctgagctggaaagggaggagtgtcaggagaggaacagcgagtcttacgagcagcatatccatctagaacaccaccagaggcagcaagtggcctaccagaaatactcagaatttttccacgagaaggtggacccggccattgatgaaggcaagctggtggtgcaggacatcgagcaaagtgtatggatccacagtcacgtgggctccaaggagcacagccacatgctgcagaaggtccaggagcacatcaagagggtttcggatatggtggaggacctctacaggcggaaggcctgggctggcgcggaggaggcgatgactcggctggtcaacattctgatcctgtcagtcagggatgcacgagactggttgatgaaaacagagacccgcttaaagaaggaaggtattgttcaggaagatgattatgaaaatgaagttgaagactttggtgagcttcggcctagaaggcgttctcggaaatgtggaaagcagagaaaatactaatgtccacacagctgcagcctcctcatccttcggaacattccattctgacttagaattctgagcgctggggcagaagacaaaaagaatgtgaattagcattttaaaaataggggagtctaacaacaccattgctttttattctcattacttctctttcagtggcttaggatctgattgctccctcacctctaaagtgtttccaagtagagtctggcagtattagtttcccccacaaacaaattcaggtagagaagttgtagtcgaagggaatgttgggactcctcactgcatggtccctggggtgtctggctcatccccatcatgacatgagttggtagcagaggactaggtgttaggacagactctcctcacctcagttgctgctgctctgggccaggaaatctctctatggattccctcatctcctgccacactgctgcagcatcaagtgtgctatgagagctgtatgtgcccaggggtgggccctgccactggccaccccgagcccaggacgcattctggtcatctctgagcccacttgtagtgtagcttcttctgttagagatgttagccttttctctctgtggcgacttttctgccttcccttcttctgttttttgtgatcattcttagctacctgtgccaagtcacagttagactacctcagaatgtagtcaagaattcacccagtgttctttggatgtcccttccctagggggaaaggctggggaatgttgctgggagcattcccagctgcctctccaaagtggtcctaactctgccttggctatggtgcagacattccaaaaagtgttttgtatacagccctgtacatctagttttcttggttctccctggcaagttcgctaccctagcttaggctgacgttctgatgagtctctgcttgctgagctcatcactgtgggatggtgacctgcagagctgcagattggagcaagtggacagaggagggagccagctaagccaaatccgtcactgccacttggctggcaggccttataagagggcggatctgggcccgtttgcaggaggccattgcctaccctctccccacagtgagccagcagccatcagctgatcccacctgggaaaccttcatgcctctctgatggttactgcccacccttaccccacccctcagctcagcctggtatggaaagcaaggtgcacgttggtctttgattgttctgtcctcacagcagagccagctttccccccatgttgctgctgcttttgctgctcatgctgcttgttgttttctcttccttatctttccaaattgtttccttgaaatgcttgtttccaatttttcttagattatgtttctaatttttattccaggtgtttttttttcttacttgacagaaaaaaagaaaaccccaacaatatcttgctgtattatcacattttttataaagttaaagcatttctcttaaaaaaagccgt

SEQ ID NO: 33288 - DNA, 406 bp, Homo sapiens
ggtcaaccagaaccatccctttttcggcccaaagctggtcctggtgttatcatgggaggcctccctggcctgagggctgttccaggtccagatagggcacgtcttccactaggctgtcaaaggtcacctgccaataaccccccagcctatgtacctttgcatgggccttgatacctctctgatccttataaaatgagtggagctgaacaccatcaggtccagacttgcagccataatttccctggccttcaccctgcctgactgaagctgttttgttgtgttaggacacagtcgtgcatgaggctccacgcctggcgcctccaggagccacgagtattatgcagggctcgtacactgctgcctgcgtgagaagggccagagtttgtgcggtaggcctcatgtttct

SEQ ID NO: 33289 - DNA, 521 bp, Homo sapiens
aagagagactgcaactaagaaaggagacaggataacaggatgatactatcttataatgaatgggaattacatgttgtaaaaatgtaaaaataaggatttgacccctgcaacaatccaaagagtttagtaaatgaaaagttttaaatctccatttgatatatgaaaaatgaaggcctgggaaaggcaagcatcttgccttatatcacaaatttgatatggaggctggctatctccttacttgttatataccaggcatcctacaaattgtcttatttaaatctcaataatttagggagtatcacccccattttgcagatgagaaaactgagtcccacagtcataaaatagcttgccctaagtcacataactactacatagactaaactggactctaacttaggtcccttattcatatttccgatgatgtttgctttcttttttctttttagcactatggagaataacttgcaatagaaagaaaaaatatgaataagataaacaaggataaggatgaaagctac

SEQ ID NO: 33290 - DNA, 306 bp, Homo sapiens
aaatattgattggtccctagcctacaccaggacaattaactagaatggcagcatttaggcaaagctgggttaaatcagtatgacaggacacactaactagacttctcttttctgtggaagcattttaatcacatctctcagacctcactaggtgttgtattcatggcaatggaaacctgaatattcatgggatgggaaagagcctgcctggttctgcagtgtctgatagaattaatttcttcgtgtcaaaagtgggcaaatagaactctcttgtgggtcgcagtatttagaaggcacatagtgggg

SEQ ID NO: 33291 - DNA, 654 bp, Homo sapiens
caagaccattctggaaaggaaaatgacagtttcgttaaaagagagtttaaggagaagtttcatgtaatagacattagaaaatccttcagctacaatcagtggaaatgcttagtaactatattacatatcctttaaaatacctctaaagtcatttgaggtaggggttaacaaaattggggaaattattttaagaaataaagagcaaataaaaatacttatctctggcttttgatggactgtccttgcagttaggatgtgtaggaaatcctcagttctgtttctttagtcccaagcatgctcatgttttcttagcttttggcatgattgattcagcatgagagaggcaataggggataagtaggagtacctgtgccttaataaagatttgtaaattaagtggaagatggttatagaagagtagactgggtccagattgtgtaagaccaagaatgtcaggttcataacttttagagcaggagaattgtcaagtaaaagtgatggtgttaggaatattaccctggtaattaagtatatcagggtgtccaatcttttggcttccctggaccacattaggaaaataattgtcttgggccacacataaaatatgctaacactagtgatagctgatgagcttaaaattgcaaaaaaaaaaaa

SEQ ID NO: 33292 - DNA, 811 bp, Homo sapiens
atggagtctcactctgttccccaggctggagtacagtgtacagtggcacgatctcagctgaccacaacctctgcctcccaggctcaaccaattttcgtgcctcagcctccaatgtagctgggattacaggcacctgccaccatgcctagctaattttttatatttttagtaaagacagagtttcgctgtgttggccaggctgctcttgaactcctgagctcaggcaatctgcctgccttggcctccccaagtgctaggattacagacgtgagccaccgtgcctggcccccaagttccttagttttgacaaatctaacttttttgatgtttcatattgatagacataggattgacattgaggtattctacaactttatatatgaagagcattccagttttcatatatcaggatgcttttggctgcaagtaacagaaattcccaactcaagtggcttaacaaagaatgaattatcacacataacaaaaattccaggattgctaattctctagctcagtgacatcattgaagacccatattcttttcatctttctctgtcaaccacagcttatgggccttatcctttagttcctcatggtttcaagttggttgcagcaactctaaggcaaccctaattcatatatccttatgatagccaaaggaaaaaagttttctgagagtcttctagcgactttcctttcacaactccttgtccaggaactggggtcacatggcccatggcctaaaccaattaaaggcaaaggggaggatgtccaccacggattcacttagggaccaatggaaactgtagcc

SEQ ID NO: 33293 - DNA, 402 bp, Homo sapiens
taaaaataccagttgacattagactttgtcaagtctaacgcttgctaaaaatctgcatgctatagtctctaaggcaacgaccaaaggaagagtaaaagctgtataatgtcctagcaaatagagattaaaagtagaattgttaaaaatatcaattatcggctgggcatagtggttcacacctgtaatcccagcactttgggaggccgagacaggcagatcacttgaggccaggagttcgagaccagcctggccaacatggtgaaatcctgtctctactaaaaatacaaaaattagcctggtatgatggcaggtgcctgtagtcccagctgcttcggaggctgaggcaggaatcacttgatcgcaccaccacactctagcctggccagcaaagcaagactctgc

SEQ ID NO: 33294 - DNA, 327 bp, Homo sapiens
taggtttagaagactgatgattatttattgtctagaatcttcacaaaatcaaatcacagtcatcactctagtggcatgtacattaaactatgtgcatcaaattccggcccttgaagaacaaggaagcctacggatctggacagagaaaaaggaaaaggaattgcaatggaaattcatgtaagaaaacaattgcagaaacagctcaatacctttgaaaaagatccctatagtaagtaagaaggtaagatccaagccatgtagttatgcatgcctcagagcacacctgactttggtcaaagtcactaagaaatttccaaggtaacaatg

SEQ ID NO: 33295 - DNA, 503 bp, Homo sapiens
gtaggggagatagctatagcagaaatactgcatggagctcagcatttacctttgagtttcctggtggctggagggaaaggaaataccatgcatggctcccacatactagtggcaaaatgctcccaggcttgcattttgagccagatattgctaacacttgaacaaggtcacgcagtaaggcagggagagtggtcaggtttagaatcaaggatttgccaggcatggtgactcacgcctgtaatcccagctctttgggaggctgaagcggaaggatcacttgtgccctggagttcgagaccagcctgggcaacatggtgagatccccatctctacaaaagaaaattgtttttttaattagctgggcgtggtggcacactcctgtagttccaactacttgggaggctgaggcaggagaattgcttgtgccaaggaggtcgaggctacagggatctgtgttcatgccactgcactccagcctgggcaacagagtgagaccctgtctc

SEQ ID NO: 33296 - DNA, 946 bp, Homo sapiens
aacctttgtaagcaaatattctaaggagaatcaatcttattttttaattgaactttttaaaattagggatactataataactgataaagatgaatttctgtgtttctaaagaatctaatttcaattactaccattaacatataaatgtgcttccaaaatccaagcaggtccatacaatttagagatttgaacactgttatcatgctttaattcagtcattcattaaaatattatctattcacttatttgatgattccaaacatttgatattgtattgtgtttttataattatttgaaatctgttcaccagtgctttgtaatggttttattaattgtgtagccattgctacttagatagtaacccactgagcaaaggcagtcatttattttcatccttgaagtaggggaagaaaattattaatttattagttctactttttcctgcattgcttattttgtaaacattttattatgaataatctgttctctttcactgtattaaaaggagaagaaaatgaacatttgagaatggaaaaaagtaataatatacaaataatctagtgctataaaatgcattatagtaagacacttttggtgtcttcgagtgcactatgttggaataaattttatacttgttgcttagtaaatctcagtcatacgtttggtttgaagctgttttttttttttaatttgaagtttaattttaaaagtgccacattgtaaaagttaccgttaaatactatgtagtataaaaaacaacccaagctattgttaatgctctgaatgtttttctttgaaaatttaagtttagagaagaaattccttcatttttctcccctttgctaaaagaaagaaaatctataatatgtaagtctatgaatctttaaataactgaaggaattttagcagtactttgtataataaaaatattttttaaactataact

SEQ ID NO: 33297 - DNA, 1010 bp, Homo sapiens
tgggtgaagaaatctgaggctgccccagtctggaggatgggggtggttaagtcacgcctaagtgcagaggcacacacttgcatacacacagcacacacgcatgcgtatacacacagtgggactggcagcaaggagagacgccctgaataaggaggagctgggagaggttgttgccagaccaagggagacagctgcagatatgtggccggggcaccagcacagggccctcccagacagttgtgtcatcccaggagtggcctggcacctccagccaggttgaagatgagctcacaggctggaagggatgtctccaacccctcagggcctggaatagctgtttgtacagaaaacaggtggacccagcacaccaggacactaagtgtctggagtggagggggttatactggacccaagtggaaagataagcctgggatagggttcctgctctttgggctttctgagatctgccttcaggacagacccactgcacagaacttttcttgctcaatgctcaccaatgtccactgcagcatttatgacagcaaagcatggagcaaaacaggctcacctatcaatgctaattctaggggaccggtgagacaaaccacagcgcctcagtagaatagcttgcagctattagatggcctcttccaaagactgaaataatgcaagaaaatgcttacaacaaactaaagtgaaaagagcaggctaaaaccagtttgcacagtgtaaaggcacacagccccctcccctcctgaagcctcggcctcccagcagcagggagggtggactcggttgatggccagctctgggagcggcagcaggagaggatttcctgaggccggaggtgagcactgccagccccaggaacaggaagaaacggtatctctggagggccaatgagagctgacaccatccccctaggctggacactcacagtggcaagctcaaaaccaaggcaaggctgggcaaggtggctcacgcctgtaatctcagcactttaggaggtc

SEQ ID NO: 33298 - DNA, 398 bp, Homo sapiens
  misc_feature (271)..(271): n is a, c, g, or t
  misc_feature (287)..(287): n is a, c, g, or t
tctcaaaaaaaaaaaaaaaaaaaaaaaaaattcatgtaattctaaaaactgaaatcatagaaatactacacaaagtctatataaggtatttttaaaatataaccttggtacagagaaaagcctttcaaattattattaccaaacaataacggacaatgatcatgtgttttcttacataaaaattaaaaactttgcattcacacacacacacacacacacacacacacacacgattcaagaataggactaatcaggcatggtggctcatgcntgtaatcccagctatntaggaagctgaggatgacttgagcccaaaagttcaggctgcagtgagctaagattgcacgactgcactccagcctgggcaacagagtgagatcctgtctcaaaaaaaaaaa

SEQ ID NO: 33299 - DNA, 666 bp, Homo sapiens
tctgttcccttttccttcgttgtagttttgctattctgtttacaaatattgaccaataggttaggtttcccaaaatagtttcatttagctatacttctggcttcgtcccttttggaatcctcttagcttatgactgatagggctatgaggagatgatttaagtctgtgtaccacttctaatctttacttacttttttgggaggaggggggcaataggtggaagtataaataaatgatttttttcccatttattatacacttgtatttgctaaggaattttaattaggctcttttaagcctaatcctaagtaagttgaacacatcctaagaaagttgaaattttttcttcctgagaacttaccctgccaggtgcagacttattcgaaggagcttttaaaaattctattaatcttgttatagattttagagttcattataataactagtgagatttaatttcttcttgaatcattcttaagtgtgttaatttgataatgttttaaggactgtatgctgtttgtgtatttttttatatattgaacagaaaaagcacacgagtacatgcacctgagtacaggtaaagaggagctgattgaaatatagtttaatctgttctcagtattacttttaggggtggaagaacgttaaggattaattaaaaaaaaa

SEQ ID NO: 33300 - DNA, 453 bp, Homo sapiens
tttttttgcatttttcagtgctttatttacatcacacacaataagttgtgtatatttctcagagagaaaagtcatggtgagttagacgatacttctcaaattttgatgtgaacaataaactagattaatttgtcctgcagagatttttttcaggagatctggaataaagtctgagtttctaaatttctagcaagcttaccaataacaccatgttttgggctcaagaagaatattgtgccaaacatcgaataagtggaagagcctgggtttttcccagtttttctgacccgtaaacaaagacgagagccttcatttccaaagacagatatgtgcaaagaaaatttaagtaggaagggaagcttccagattaaaggtgacagtttatgcacattatctggtaaatctccctaagatacttaataaagaagagaaaaacaattaaccctataatag

SEQ ID NO: 33301 - DNA, 375 bp, Homo sapiens
caccaagctccctcttctgttgttttggtggttttttaaagcatgacatcttgctttctgaaatttcccaactgttcttcccttcctttgctctggacccttctcttgtccctagactattcccttttaattccactcccagcaatctctcctaagcatagggcccagcactagaaggcagtgctggcaggtcaattttgagagttcaaaggtcagccctctaatcccccacaaaagcatgcagagcaactggatagcaaaataaattccgtagacaacatttgcaacaaaactaggtgacaaaacattaatcccaaagtacaagcagttggggacgaaatacctgcaaagattgcatggtattgtgagagagag

SEQ ID NO: 33302 - DNA, 143 bp, Homo sapiens
aaaacatcactttaagcaaagttagaaggcaaataacagattgagagaaaacatttagaatatgtgagatcaaggcgtgggtatccagaatatgtaaggagtacccatcagtcaattaaagttaatgactatgatggttcagt

SEQ ID NO: 33303 - DNA, 253 bp, Homo sapiens
gaattctggcccagctaggatcacttgcctaagtctgttgtcatattacacaaacatggcgacagggagccagtccctagaagtggcaaaccaattccagagaaggtgtttggcatataactcaaaagacagtgcctccaacatatagaagagaagacatggtctctgcctttggcctctagggagaatgataacagaagatgcctgaagtaacagcaagatcataacatctaacccatccctgattctaaga

SEQ ID NO: 33304 - DNA, 456 bp, Homo sapiens
tgagaccaattaagtcagaatctttggaggtgttgaggaatggatttttaaagttcccagatgattataatatgcaaacagatttgagaaaattgaatcactttattccataaatgcagatagtgaggctaagagagggaaagtgacttactcataaccacaccgtgagttagtgaccaagtcaggataagaatccaggtctgcagactcctaggccagaattcttgtctttatactacactgcttctatctctaccctattcctcctctgagcctttgcttttctcatctgtaaaatgacgataataaagcctagagagtgtatgagaatcattaaagcagaagcatttttcttaatgtacaaggttctatacaaatgcaagggaattaatgtataacatatatgtggggctaagtctctaaaacaacataataaaagttgtttttattttagtc

SEQ ID NO: 33305 - DNA, 251 bp, Homo sapiens
ggtgttcaaaactaaaatttgcccttggtcctattcgtttttagaggagtcctacccagttttgatgcctgagggtgttgtttttcctctgtcagtcattttttgacagcccctacactcaagctagaatgagatattcttttctttgtgccctacccttaccctatagtgtacttctatcaaagcaccttcaacatcttttacataattgtttacatttctactgtaagggtcttgggggcagaaactct

SEQ ID NO: 33306 - DNA, 388 bp, Homo sapiens
tgggagacagggtctcgctctgttgcccaggctggagtgcaatggcgggatctcggctcactaaagcctctgcctcccgggctcaagcgattctcctgcctcagcctcctgagtatttgggattacaagcgtgcaccaccacacccggctaattttttgtattttctgtagagacggggtttcgccctgttggccaagctggtcttgaattcttgacctcaggtgatccacccacctcagcctcccaaagtgctaggattataagcatgagccaccccgcccagccgaaatacatttcaacagcttgctttccttacttccagtttttaaccaaaatcactttttaaaagtactttccaagttattgtctagggttaatatatagata

SEQ ID NO: 33307 - DNA, 103 bp, Homo sapiens
gtcagagtcaagggaagtaccattaaaacgaatttgtttccgtctcactcctcctccagctacgctatagccgacaacgcttaccgaatgatgtgtgctgaac

SEQ ID NO: 33308 - DNA, 429 bp, Homo sapiens
atcccagcactttgggaggccaaagtggaaggatcgcttaaggccaggagttagagaccagcctgggcaacataacgagatgctgtctttaccaaaaataaatcatttctttttaacattgttggatttgctttgctaatattttatggagaatttatgtgtctaggttcatgaaagatattggcctgtacttttttttggttttgactggtttggttatttggcaatagcaacctcataaaatgagttgaagtgttctctcaccttctatattctggaagatattatataacattggtgttaattcttctttaaatatttggtagaattcaccagtgaaaccatctgggcctggagatttattttatgaatctttaaaattatgcatgtaattgttaatgatgataaaactattcagattttctgttt

SEQ ID NO: 33309 - DNA, 287 bp, Homo sapiens
ctcaaattatatctatttcgtactataatagcacaagggtgatgctactctaagaaaaggcaaaagttctttaaacagattagggaagatttctgtacataatttttttttattttttattttttttagggttaggtagatttgcaatttccagttcatttaaaaaatcttggctgggcgcggtggttcacgcctgtaatgccagcattttgggaggctgagatgggcagatcatgaggtcaagagatcgagaccttcctggccaacatggtgaaaccccgtctcta

SEQ ID NO: 33310 - DNA, 355 bp, Homo sapiens
tttttttttttaagctgaggccaggcatggtggctcatgcctgtaatcccagcactttgggaggctgaggtgagaggatcgcttgaaactagcccaggagacatgcaaaacctatcgctacaaaaaaataaaaaataaaattaaaaaagctaaaaaattgaaaaagaaagtcccaagcgctgtaaagcacagagcacggaagtgacacacagtgtggcagctgcttgttgtccagacctgccccaccggccagtcaccagctcctgactcactgaccaccctggcctctgccctgtaatcttccaaagaggaaactccaactgtgtcttttaaaactttttactttagagacagg

SEQ ID NO: 33311 - DNA, 453 bp, Homo sapiens
caccaaaaaaaaaaaaaaaaaaatttaccacaaatgagatccttaatatgtaaggaatgatagttttgaagaaagaaacatctcaaaggagatgaacacttctcagttggtttataaagatgcaaaatgtttaacttctgtagtcatgaaaaataaaaattaaagtaactgcaatattatattctacctattaaagggacagtgattgaaagtctacaatactcaatgacattgactgtgatgagatggatatttttgtcaaatagaatgggaatataatttgatacaattatttaggaacagaatttaagcagatatattcagaacattaaaaatgcttatagcttttcatccaacaacacccaatgcaagaatgtactaaagaaataatttgacaagttggtaaagatgtatgtgtaaaggcatgtcttagtttgttatttgaagtagcaa

SEQ ID NO: 33312 - DNA, 444 bp, Homo sapiens
tgaaacctccatggccaaggctcttctggctgcctgatgccagccctcacaccaatgcctcagcatgctgcctcccctagactcaggccactgccactcaagactcgggggcaggtggtacctcctgacccaaccctagggcaggtcccagcaggctctgactcacaactttgggctcctccaatccctccaagctgcccctagggaccacgtcggcacttgctgcttttctgctcctggcagcctgagcctcaggtcttgagctgagggctgctcatcccaaagccagtgttgcaaatgaaggagtctggcagggaaagatcccatactcatgggtggtgcagagagctattcctgccatatgaaagatggatatggatataaactcaatacttgtataatggggacaaaattattaatcgtcccaaagggtatgaattctaa

SEQ ID NO: 33313 - DNA, 1219 bp, Homo sapiens
gttaagggcttgatattctcaagaggggaggccttggaaaaggtgatcaatagtcaagagtctggttccatcattctgtttggcttttggcttttcactaaaacattttcttcatgagggtatttatcataatacacatatgtttttaatgtatcaatcaggaggatgtgtggtcttgtttgttcttgattaaaaagactatgtcaaaaaagaattatttcaaagttgcagtaataattggagcaataagatggtaaggggtaattaaaggatgcagctttcttttagaaacaaaaacaaatctggtgaccacatgtattcttcttttcttccttaatgaatatgatgaaacatgttatagtgagactatggacattagagatacaccaagtacgtgttaacgtgtcggatttgagcccaggttcccacattaactatactcaggaatttgtaactcataacattgtaaactgactggtgatgtgtacatttcataccattttgtatcacggtgatgcctggatgtagtggtattgctagtgcccatatcatcccttctccctgcccaccacacacacacattgtagatgagaagtatattgcttacccttcccattttgaactcttggactacaaaccataaattacccaggtattgctcttgaattattcctcttgaatttaaaggctttctatttccgtggaattggcttggaaaactcagaccaactgagaaggagaaattgtcctgggacaaactgtttttactatatgtcatactgttttcttcttcctgtaaatatcttgttgggcctactgaccagcaaggaaaacataatccaatgcttgtggtcagtactgaatgacttggccctacgtctttgtgtcttttaagaacggtccaatgggtctgtcataacacttcaaacatctgcttctcagtcctagtttatgctttataagccaattcccattggtttaaatagtttctgtgcctttaatatgactgtctatatggattaatagtaatgaacacagtgatgtggtgataatgacaattttctacttagaatttggttaaattcaattgaacttgataaatgttctctgaagtctaggttaagaaaaatagagaaatgaatgtggtagtctggcaatcatcttgctcatgtctggcaatcatcttgctcattgggaaaataagatgtataaaccaaaa

SEQ ID NO: 33314 - DNA, 704 bp, Homo sapiens
aggggttacaaataaaatttgcaattttcacatgtatggaatcctcaaataatgaggatcaattgtgtatcaaggagactaaatattccaattaaaatgtagctttttttcagattggggagaagaaaaaaacaagacccaattatgtctacaagagataccttttgaatataaagacacgggttaaaataaagaggatggaaagataaaccacacagcactaataatagagtgaaaagcacaacactttccacaactgacacaagataaaacttttaaaatctaaacagccatgtatttattaagttaaaatactcagcctacccttttacaaaaagaagactcaaaactcagatggtttcactggtgaagtctatcagacacatgtggaagaaaataaaggagtaaacaattcccaattcattttagaaggtttgcataaacccattaccaaaatatttttcatttataaaaaaactataaaacatgaccataggtgattaacacagatgaaaacatcctcagcaaaacaatggaaagatcaaaatcagtaacttacaaaaagaataatatatcatgatactgcagtatttatcccaggaatataaaatttggattcacatataaaaggcaatttcatttactataataccagatgcaatgaaagcatttgacgaagttccatatccattccgggttaaaaa

SEQ ID NO: 33315 - DNA, 580 bp, Homo sapiens
atcttacgtgttctagtcgccacgttaaaaaaagtgaaaagaggccaccatgcctggccaggaaaataagtattttcaacaaataatactgaaaaaagtggatatccatattaatatggtttgggtctgtgtccccaccaaatcttatgtgaaaatgtaatctccagaggtggggcctgctgggaggtgactggatcatgggaatggatctttcatgaatggtgtaacaccatcctcttggtgctgttcttgtgatacagttctcataagatgtggttgtttaaaagtgtgtggcacctccccacttcgctctcttgctcttgttctggccatgtggtatgtgcctgcttccccttcgccttccgccatgattgtaaattttctgaggcctccccagaagtggaagcctctatgcttccccgtacagcctgcagaactataagccaagtaaacctcttttctttataaacgacccagtctcagttattttatagtaatgtgagaatgcactggtacacatatagataaaaatgaaccttaatccttaatttatgccatacataagttaactagaaatgga

SEQ ID NO: 33316 - DNA, 434 bp, Homo sapiens
tagcaggtttattaatggcctccaaagatattaggtcctaatccctggaacttctgaatgttactttatgtggcaaagtctctgaagatgtgattaaatcaatggcccttgctaagaagagattatcctggattactctggtggtgttaaatgcaatcacatgcatccttgtaagagggaggcagaaggagatttgacacaaatacatggaggaaaaggccatgggaagacagagcagactgagtggatggtgctggccttgaagattggagtgagattcggccacaagccaaggaatgccagcggccacacaaagctggaagaggccaggaagggatgtttccctatagtttctggaggaagcaagctcttgtccacaccttgatttcagcccagtgatactaagtttgtacttctggcctccagaactgtga

SEQ ID NO: 33317 - DNA, 306 bp, Homo sapiens
taaccaatttacaagctcacctgcacacgcacaccccccatgtcctgtcttccctcctgttcagatggaaggagtgtctctgctcctataaagtgcagctgtccacttgggccctgatcacctccactcctacctcgccaggaccctccgcagcagtgacccgcgtcattgctggatttctcatgtcaattacaaacatgctagaagagctacctagattaaaaagaaaaaagttctccttgatcctacctctccctccttctaattactcctcatctctgtgttctgcatttagcacaatttcct

SEQ ID NO: 33318 - DNA, 115 bp, Homo sapiens
caaatggctgtttggaattctgtatcttggaagtcaagctaaacatgatgcctgacccagaattataaatattctatgatgtgaaactgaaacacttgaaagagctttctaaata

SEQ ID NO: 33319 - DNA, 603 bp, Homo sapiens
ccatgttggtcaggctggtctcgaactcccgacctcaggtgatctgcacgcctcagcctcccaaagtgctgggattacaggcgtgagccaccgcacccagcccacgcatttttacataaaaagagatcctttagtccacccaaaggctgatgttagctgcctctgtaacacaactttttcctcaaatgtatggagttttttttaggcttccacttctatacttacctattctcactccctgttttaatttattttttaatttaattattattattatactttaagttttagggtacatgcgcacagtgtgcaggttagttacatatgtatacatgtgccatgctggtgcgctgcacccaccaactcatcatctagcattaggtatatctcccaatgctatccctcccacctccccccaccccacaacagaccccaaagtgtgatgttccctttcctgtgtccatgtgttcccattgttcaattcccacctatgagtgaggaatatggcggtgtttggattttttgttcttgtggatagtttacttcaggaatgatgatttccaatttcatccatgtccctacaaaggacatgaactcatcatt

SEQ ID NO: 33320 - DNA, 735 bp, Homo sapiens
tgcaatctccactcaccacaacctctgcctcctgggttcaagcgattctcctgcctcagcctcccgagtagctgggactacaggcatgcgccaccacacctggctaattttgtatttttagtggagacacggtttcgccatgttggtcaggctggtctcgaactcccaacctcaggtgatcgcctgcctcggcctcccaacagagtgtggtttttaaggtgccccctaccccagcccagggactgaacagtggtttcagagtttagattctgtgatagcaggtgcctcccttctcagcctcaccccaaccctgggcctctgagccctggcttcttgggaggaagcacacacagggtgccacagcactctaccgggtctcctctagggtagccaggacagaaggcctgcatggtggaagactcccactctatacttgcttttattttccagctcctcccccagttccaaaggagtggtggcttctcaattgcatggttgtgagcaaggaaatttcttgcaggatcagggatgtgaagaggctagcaggggaggggaggtttccaggctgccttgggaagtgtggtttggaatatgaattccggggaaggagggaagaagaagatgggaagagatgggaaacaacctcatctttggggctctggaaatctgagacactgggcagataatccacttcctaaagcctagccccaaacactaatttgagagagaaaaaaa

SEQ ID NO: 33321 - DNA, 1265 bp, Homo sapiens
attctcaaaatatattcctcattctcgaagaagcagagaatgccaaggctgcatatctgctgtaatctacctagccctcttctgcttaatatgatccattattgaatcttctcagattaaaatccattcctatatcatctacctttcccaaagtgtgtgcctgtaaacctaccttggaagtggcaagttaactgatttttttgtgtcatttttataccaatccttaaggtcaaagccttttgctatcaatgtatttaaactgagttgctatatgttcactaatttgttttcaaaatgttttgctccaacttaaattatcttttaacatcttttgagtgccaagaattgctaagtaactgtaatatgttgaagagagtaattgccaagcaagcagtcataagccaaaatgtaatgagcttagtatataaccactttagagtatacactcaccactttttgtattcattcatgcaaaccctcctggaagtcgattagaagaggatccaatttgtggaccttttttcctccttttggacacctgagcacaattttttttttcctttcatatttataccactttggaaaattcagtaaacccaattctggcacatcataatggtttcagttagtgaagatgtttattttaataactttaaaatatgactatcctatacataagttatataagagggcataacaatagatgagtagaaatttataaaatttcttggatattttgaatgagaaaaaaacatttttaaaggaattttgttttttccttttttggccaaaccggtacaagttagaaagtgtgctaaggactgaatacttgcctcgtgctttttgccactggatgatgtaagttaagaatggaattgttaatcctaagtatatattttcttgactttcatcagtttctaaagaaatctaatttaagtgttttgcggttttgtttgatctgtatttattgagttctggtcatagaccagcagcttgcacgtcatgctcatgaacagccagaacatagttattggggaacttcatggctcaaaaccttctgaatcatttaacttattttgtatgttgcaaaaaaaaaaaaaaagtttattttgcttgagagtcacctttttttaaaaaaaataactgtacagcttttaagggatgggaggtgggaaaataccctaaaataggatgtagattttttacaattgtgtttatgctagatcatctacaggtgcattatgtaattaaacctaaaattgttt

SEQ ID NO: 33322 - DNA, 545 bp, Homo sapiens
tcagtaagtaaactccgccacagaaaaacttagtagacaaggtgagttcccctgtgctccgtggcaaagagtgcggtgggtgacattgacccatggttaggtaatctggtaaggaaagaccccgttgtaacacatctgagcaacgagaccaaaggaagggcttgctgccacgaggcgaagtctgcttttttgaacagagagcccagcagagttgggcggcaaatcgtgcccagcactgaggccgaggagaaagagagcaggagcattacattactgcaccaagagtaggaaaatatgatgcatgtttgggaccaggcaaccgaaatcccttctcagcagcgcctcccaaagccggcaccgccttccttcggagaaggcgcagagtccccagactcgggctgagccgcacccccatctcctttctctttcctccgccgctaaacacagacgagcacgtgagcgtcgcagcccgtcccagctgtgcctcagctgaccgcctcctgattggctgagagcggcgtgggctggggtggggacttgccgcc

SEQ ID NO: 33323 - DNA, 405 bp, Homo sapiens
gcctcaaatttataaaggaccaggagttccttagtcaaagcccaattcaacttgtagctgttactgattctgaatgagaacagaaaagactgcttactcttattttttggggaagatgtaaatactctatatgacagctgggccccagtccctacatcctatttgtgcagaaggctgaagacatagccatctgctgccaataatctacatgatatatggggaacatctgaaatgccgatgtttgatatttgctctattgcaacgaagtcagcctgaaaatgctcttcaataagggctttactcatcaaaggacctggacaaatccagttaaacagtctcctatgcttaaaagtataaaattcctaagaaatttatatattaaaacaccaacacacaaaaatagta

SEQ ID NO: 33324 - DNA, 424 bp, Homo sapiens
tgtactacttaatatattagctctttgggcgatctgtacatggtgaccttcattgttttaatcctgaaggtggctttacttcttgttcagtagtaagagttcaaaccttttcactgatgagacagttgggatttctgtggtagaaatagaccagcgttcagagttgatttttgctaaggaaatctttctgcggcacttggcttgttgggaggtctttgagaataagatcacatggtcagtccatcaaagaacagtatgatatgataacaggagcacttatgaagtgacacagcttctctgggttttaatgtcttgcttggaaagtcagaatattaattttgcctgctcatagtcagagaactagttccaggtggctgtactgaagttcttttcaactctatgagctatgattctatgatttatt

SEQ ID NO: 33325 - DNA, 348 bp, Homo sapiens
tatgacattattacttagaagtatacttaattttagtcctatctgaaattctatttaagacattttgccagttaaatttgtttccatctgtttgccttttttcccaccacagtaaaagttataatacaactaaaatttactaccatctgtatgacttagggactggaagaattccttcatccactggagggtattggtattggaaaaacaaaagctaaaacagcttaacacagatgatcataatcaattgggaattaaagtgataagatggagatgctgctaggttgttaagattgctgttcttggggtggagggattaaagtacgtggtgtgactgcattttctgta

SEQ ID NO: 33326 - DNA, 335 bp, Homo sapiens
tattgcgaaggccagtctttcacatgttcacccagttttttgagtgcctggcacaatgctaggcattgaggatttgatggtgaaccagaaacttcctagtctagatggcagggagtgggaatggtgttggtaaactcctaaacgaacacttgcaatacagtatgttaggcaacacaatcttttaggtgttgtgaaaaggacataagtaggtttctgtgcaagcgtggatcaacgatacttgatgtaccttacagtgggacttttgatcctttttaattctgcaagtgtccccactctacctgcatgtatactcagacatgtgcttgtggaaaata

SEQ ID NO: 33327 - DNA, 434 bp, Homo sapiens
gtctcccattctccgacagaaaaagtacacaagtcggtgtttcctgagaacgaaccctgcatgtttagcagcttttgtctcttagaaacactaggttttttgctgcaccaggccatggcaacgttagttttattgattcctttgatttattaggttatggaggttccctgctggttaaaccaccatgaaggattgtggctgaggctttagtgtgtaaaattcatagaaagactaggaaggaaggacgtttgacaggtgagaaggcactcatggggctgccctaccctgcacatttaattatgcatcgcaggtacaggactggtctcttctgctggaccaccgcatatacgaaagcaagggagaagaaagtgcaatactgcctctcaagacacaagtgtttactaagacttattgtgggccagaggtagccagag

SEQ ID NO: 33328 - DNA, 430 bp, Homo sapiens
gagacagagtctcactgtgtcatgcaggtcggagtgcagtggtgcaaactcgactcactgcaacctctgcctatcgggttcaagcagttctcctgtcccagctacttgggaggctgaggcaggagaatcacttgaacctgggaggcagaggttgtggtgaactgagatcatgcccctgcactccagcctgggcaacagagtgagactccatctcaaaaaaaaaaaaaaaaagaaactcagtttctggttacatctgatctttattttttatatatcatctaagctataaagttatattccctatttgtgatcttaaaagaaggactccaggaaagtgttcaaatattcatatatctaaactggaacatatgtttatatttttaaaagtagcctgagaggttggcaactaaagtcatatgttgaatgatca

SEQ ID NO: 33329 - DNA, 352 bp, Homo sapiens
acaatcaatgtttttaaacaagcagaagacttcgataaacaccgcataaaagagaatgcatgcatggccaatgagaacataaaaaagatgctcagcgttgttggtcgtcagggaagtgcagattgaaaatgcaatgggataccactacacacccgccagaatggttaatttaaaaattttaacagtaccaaatgttagagaggctgtgaagcagcaggatgttttatgcatggccagcaaaagtataaaatggtagagccatttggaaaactggcattttctcataaatattcacctatcatgtgatctaaaaattccaaaagaaatgaaactatatgtctacaaaaaaaaa

SEQ ID NO: 33330 - DNA, 457 bp, Homo sapiens
tggggagaaggtacagtaagggaagagttagaatagcagctttacatcctcaggatgctaggtatctacaactctgtgtagctgtgttgctgtatgtgtctatgtgttggattaggaaatgcaaagaaggacataaaagttgtaaaactgctttagagttcattcattaacatctgaaaagacagacaatgctaaaagcgtgtaaaagaagtacaaggtacacagaatttttttttcattttgtttgcctaagcagtgtttttaaggaaaaagttggcatcattagctaagatgttgcaaaaactcaactagaaatttcacttacagctgatcagtcttttgggtaattaacaaaatggggtaggaggagaaattaatggttgtgccaatatttgttggcaattttgatttatttttcagtagcccccaattgataaaattatcactattcaaaaaa

SEQ ID NO: 33331 - DNA, 350 bp, Homo sapiens
taaatatggcaacaagaacttttattacatgggtacatgacttgaagcaaatctctctatcaactaattgagaggtaaaactgtgtggagcacaggtgatgctgaaggagagatgccgcgtgttcttagagcactgcgaaacccatgtctgcatcctccaaatactaaattcatagtatttctgaaattatatatcttgagtatgacattttaatagcattaaaggtaattatttttaatgagaaaaatatattgcaatttgtaaatttagcataggaaaactgattggcatttctattaagaaaccttcaaagccaccttgaattaaagctactttggttactagccaa

SEQ ID NO: 33332 - DNA, 382 bp, Homo sapiens
ccgaggatcctcagatccaataaacccaacaaatcatcaggaaacagttgtcagaagacatcattggtcctgtgtttcctacggaaataaaaaacaataaatattgcactgaatgtttgtggtttggtgtccctgaataataaagaaggaacatatttgcaaaaagttgcatagggtttttttatgcagaattttgtcagaagacagtggtgctgccatgtttttctttgagtgcaaatgtacattgctaagatttttttaagatggcatgtgctttgaaaagaggatattgcatttttaagagtttaaaaatcttatgagtgagaaatattaaaaaatcttattttcccctctttacaagaaataaaagatgttcctcata

SEQ ID NO: 33333 - DNA, 312 bp, Homo sapiens
gaaatcaggaactttattcatctattctagtaaagaagccatttggagattgcaaagtgcagttggaattagcattggtttttgcactgaccatattgaggtattgaatggggagagaaatcattggccagcatcttacaaatctttaataatagctttaatcgctgcagttccccgtgaaaaagtgatcttgtttctgacttaacattttgatggggaaaagagtccagataatttccccttggttgatgctaccctaatagtccttaaggactattaagggtttttttgttttgttttgttttgttttaa

SEQ ID NO: 33334 - DNA, 356 bp, Homo sapiens
gaaaactgcaatcaactgcctatcatctctatggttctggatgtttcctgggctccacaaggttcctgccaggctttcctaaggatgcagtcagtgagtggctagggtaggcgtcatctcaaaggtggatgacattagacgtaaggttctcagctggagttgtttgccaattcatgtggctgcttggtttacttgaaacttccagaggaggagcaggcagaagttatgcagcctcgatgacctcttatagcctcagaagacaaacagcattgcttctacacagttgcatgcctaccaaaattcaacagaaggaagcataaggcagtaggttcaatgggaggagagtcaagatcacc

SEQ ID NO: 33335 - DNA, 267 bp, Homo sapiens
gaaagaaagaagagtaggaactcttcaaagtacaaaaaagaaaaaagaaagcagaagagccactgaaagcagaatacctgtttcaaagagtcaaccggtaactcctgaaaaacatcaagctagaaaaagacaggcatggcttcaggaagaagacaagaatttgagatctggcgtgaggaaatatggagagggaaactggtctaaaatactattgcattataaattcaacaaccggacaagtgtcacattaaaagacagatggaggac

SEQ ID NO: 33336 - DNA, 1074 bp, Homo sapiens
tagttgaaggatctgaggtcctcagaacaatcaagaaaactgacagtttttagctgttgattgttgattcatttcaaggcttagaagtttctgccttgttttcagtagagtttaacaaagtgagccgagactgtagatttatatggctccttcgtaaatggctttgttctaaggaaacctagttgttacagtactctaagttgaaccagtttcccatcataattctactttcaaagagagaagaacacttaataaggctttcccgagcacctgacctaacagtggtgacactcacttccaaaccacattcccactaggtaattgtatgtcgcttcacttgaaaaaaaaaaagcgcattctgcagaatgtcactgggtaatttcctggttgaatatttctgtagaactccagtatgttaccatactacttgtccattgcctttaggtggttaattttggtagcagaaaaatgtttcggttatttttttatttttgacatggagtctccctttgttgccccggctgcagtgcaatggcgtgatctcggctcactgcaacctccacctcccgggttcaagcgattctcctgcctcagtctcctgagtagctgggatgacaggtgcgcaccgccatgcctggctaatttttgtatttttagtagagacagggtttcaccatgttggccaggatggtcttggtggctactgacctcaagtgagccacccacctcggcctcccaaagtgctgggattacaggtgtgagccaccgcacccggctgtttctgttatttttgtacttttttgagggtatctgaaatggttttggtttgtgtattttaaatgttatttaaatggttttttgtttcttttttgtttttgagatgaatctctctatgtcgcccaggctggagtgcactggcacgatcttggctcactgcaacctctgccttcctggttcaagcgattctcctgcctcagcctcccaggtagctgggattacacgtgtgcaccaccatccccagctaatttttgtatttttagtagagacggggctttgccatgctggccaggctgg

SEQ ID NO: 33337 - DNA, 738 bp, Homo sapiens
tagttgaaggatctgaggtcctcagaacaatcaagaaaactgacagtttttagctgttgattgttgattcatttcaaggcttagaagtttctgccttgttttcagtagagtttaacaaagtgagccgagactgtagatttatatggctccttcgtaaatggctttgttctaaggaaacctagttgttacagtactctaagttgaaccagtttcccatcataattctactttcaaagagagaagaacacttaataaggctttcccgagcacctgacctaacagtggtgacactcacttccaaaccacattcccactaggtaattgtatgtcgcttcacttgaaaaaaaaaaagcgcattctgcagaatgtcactgggtaatttcctggttgaatatttctgtagaactccagtatgttaccatactacttgtccattgcctttaggtggttaattttggtagcagaaaaatgtttcggttatttttttatttttgacatggagtctccctttgttgccccggctgcagtgcaatggcgtgatctcggctcactgcaacctccacctcccgggttcaagcgattctcctgcctcagtctcctgagtagctgggatgacaggtgcgcaccgccatgcctggctaatttttgtatttttttttttttttttttttttttttttttttgagacggagtctcgctctgtcgcccaggctggagtgcagtggcgggatctcggct

SEQ ID NO: 33338 - DNA, 384 bp, Homo sapiens
cttgacttttgattagttacgtaagatcttttgaagggcttctctcactctacatacttgatcaggcggttgcccttcctcatgcctctgccagctgggcgtcacgttctgccttctgtttttgctttgtggtgccacacattttgaggctctcctttagtttctccacttatctggctaccatttcaaggtaccattttaccttgtgtcagcgaggattcttaggtgtaagcgatgaagaccgagtctagccaattcaagcagaaaaggaattgacaggctgttgggaagctcacagaattgccagtggggcgatatggaggtacaagttgtgtctggtatgctcaggtcttctctgtacttgtgacctgtttttgcagcatc

SEQ ID NO: 33339 - DNA, 329 bp, Homo sapiens
tctccagggccccgtgcccaggcggggagctggcagtgaggttcctgaatgggaaaggaaacccccacacaggcatgaccatgacacctggctcagtcagctacccgttgagtggtgttttttttttttaactaattgtttttagtggcaaagtatacatgcacatggtttaaaaatatatatccaccctaagaaaagggtttgcaatagaaaggaagttttctatcccagatgtttcttggggtgtatccactgttaacagtttcttgtgtatcttttcaggaattttttaagcacacacaagcataaatatgagttatttttcctga

SEQ ID NO: 33340 - DNA, 555 bp, Homo sapiens
ggtcgacgtccatgccagtaccaaactgactacttcttccagaaatttaaggactactattaggctgagagtcactttaaggttttaagaagtcaggtgacaagggtggaagtggtgaagctcagagctagataaccttaatttcagatcctcactctacaagtttgcttatgagcttttgtgaccactgaaatgtatcttagtctctccaagactcagtttccctaacacataaaaatgggactaaaagcttcagttcagaaatttagtaatgggccaggtgtggtggctcatgcctacaatcccagcaatttaggaggctgaggcaggtggatggtttgagcccaggagttcaagtctgacctgggaaacgtggcaaaactctttctctacaaaaaataaaaattagcctaacatggtggcatgcttctgtagtcccagctacttgggaagctgaggttggaggattgctggagcccaggaagtcgaggctgcagtgagccgtgtttgtgccactgcttctgtcagcctgggttacagggtgaggcgatctca

SEQ ID NO: 33341 - DNA, 377 bp, Homo sapiens
atttcctcgacattccagccttgttcccacctccagcactttgcatatgctgttccctttgccaagaatgctcttcccctaccctgtgcatggctgagttctgcagaccctcaggccttggcttcaacgttgcctcgtccaagaggccttcctcgactactttacttgtggagttcctctatcacaaggcctctgttctttcccttcatggagaatttgccactgcatatccatttgtgtaatttacttgttggttgactgtgcctcccactcgagtgtaagctcatgaggccaggtgccatgcctggttcagtctccactctgtacccagcattgagcacagggcctggtccatagttggcgttcaataaatactt

SEQ ID NO: 33342 - DNA, 325 bp, Homo sapiens
taagatttgtgaaaactgccactttaaataaatgtacacagtaagccataaacagcatgcaaatctgaagttctcaaaactaagtcggtataactggcttttgatgtcaacattattgcatattttataatatattatttgacacagtgatccatctcatccaaaatatttctggtttctgttgaataatttaaaaatattttagtgtggattttaaattctccaaattatataacttacatgagtaactcagagttttaatacatttgtcatttgcaaatctctctccccaacaaaactatgaactttttgagataatagatta

SEQ ID NO: 33343 - DNA, 183 bp, Homo sapiens
ctgagcttccggtgctttggtagcttatactctgagaacaggagcacccgctctcctcccttcatagggttatcatattgaatgaaatcattaaagtgattctttgaccactttcagaatcatcaagacccgcccagggtcacatccattcataataaaatggaaatggcaacacctgaacaa

SEQ ID NO: 33344 - DNA, 457 bp, Homo sapiens
gctcgacagagatgagaaagactgggggaggcttattttgcatttacctaactgctcaccgatgcttcagattaggaaattagggcccagagagtttaagtagtcaatgtttcatgggggaggtgatatttgagctggattttgaagaataataacaatatcttacatctattgagggttcactgtgggccagggatgattctaagtgctttacatggtttgttttacttagtgtccaaaacattcctgtgaaataggatttcggtagacagtctgaggcaggacagggaggacagactgaaaagaatcaatacagctgggcggggcgcagtggctcactcctgtaatcccagcactttgggaggctgaggcgggtggatcacgaggtcaggagatcgagaccatcctggctaacacagtgaaaccccatctctactaaaaattaaaaaaaaaatta

SEQ ID NO: 33345 - DNA, 1367 bp, Homo sapiens
gccaccctagcgatatcaaccgttaaccttccctctacacttatcatcgtcacaattctaattctactgactatcctagaaatcgctgtcgccttaatccaagcctacgttttcacacttctagtatagtcagtagatttagaaaacctgcctacccactccctgggtcatatccacatccacccaggcagctgctgcactaggactgactaaaataccagtgacccatgctctaggtctcatgctaagtagagctggggccccggatgaaactggacccagtcctgacaccaaggaaggagtttccagtacagtggggtgggggcagtggggaggcagatgaagatgagaggctagtgtggtctgggcttcaacagggggctggtatgaggcactgtgagaaccctggagggaaagatttccagttttgcctgggtacaaaaaaagatgagttcccaggaggtgacattggatatgctgggctgtgaaggacacacagagagtctgccaagtgggaaagcagtggcaaggctacattccaggtggacagaacagtatgtgcagggagaagaaatggggaccagtcagattaagaaacagcgtgctcagtgtggctcagtgctaggtgtagggggagggacatggcccctgctcctcagtaggcacaagacactgcgaccaatctcagattcatgctgccactctgctgcgcccactatagccggcttgatcattgctgggcttggaagcagacccacgtttaaatgcagcaagctgcctcctttcaccttggagttggatacaaggcagccctgctctgggccttggtttcctcacctagaaaacggggatgaaagttccttccttaaagggttgctgttacgttttctatcagtatccatcatgaagcctggcagaattccctccacaagtgtttgctggatcggtgaagaatagcaagctaccctcgatcgggcagcctcagcaccatctgcccccaccagccagtggctagaactggaacatggcaatgaagtccattcactcaacgtgtatttatttattctggtgtcaagctgatgaacagttggtgatgacttagagaagggtactagccccatagagcttgtgattttcttgtgggagccttttttactggtggggagcaatgtacagcccagagtctgggatccccagcagcccatcagcactccctggggatgagactactttctagaacattccattctcttccaggcctttgctcttgctatgtcctctgcagtctctagcttattacccatctgccactcagtttgggaactccttaagaatagaaccaggggcaggacgcggtgatcccagaa

SEQ ID NO: 33346 - DNA, 611 bp, Homo sapiens
gcgtgtggtttaccaccagcactgtctgagcgggcacacgggccggggttgcttctgtgagtttcagcaccgctcgccctcaccttcgtgtgcaggcacatgtgcacagccacctctctcagctgccggcaggcgtctgttagtctgcgatattttcctaaagacctacattttgaaaattttagccagtttctttctcaaatctgtggaacagagtttctcttagtgtgtgtgagtatgtgacggagtatgggagagagagacacgcacccaacctgaaagtcggcgtgtgagccttgggtgtggtgtcctgatacccacagatgtttttcgacagctttcaaagtgtgtgggtcatttgcctttcagaagaacagtttgcagctctttcattgcctgaccctgttctttaatgtgataacacttgctaaatatctgctggtatctggtgtggcctttagaggttttacatttttatattaaaaaaaaaagaagtcggatggtttcttgtaatatggtggccctccgtatccatcggttccacatgtgtggtttcaaccaactatgtactgaaaataaaattgcatccttacaaacacgcagactttttt

SEQ ID NO: 33347 - DNA, 509 bp, Homo sapiens
caggatgtggaatcctgaagtcagcgccttgccttctcttaggctttgaagcatttttgtctgtgctccctgatcttcaggtcaccaccatgaagttcttagcagtcctggtactcttgggagtttccatctttctggtctctgcccagaatccgacaacagctgctccagctgacacgtatccagctactggtcctgctgatgatgaagcccctgatgctgaaaccactgctgctgcaaccactgcgaccactgctgctcctaccactgcaaccaccgctgcttctaccactgctcgtaaagacattccagttttacccaaatgggttggggatctcccgaatggtagagtgtgtccctgagatggaatcagcttgagtcttctgcaattggtcacaactattcatgcttcctgtgatttcatccaactacttaccttgcctacgatatcccctttatctctaatcagtttattttctttcaaataaaaaataactatgagcaacata

SEQ ID NO: 33348 - DNA, 452 bp, Homo sapiens
ctcagtattttatttactggattgaacagttcaggcttctggccagtatgggaggtgaccatgggtatcaactggcagtgactaaagcagagaatccgacaacagctgctccagctgacacgtatccagctactggtcctgctgatgatgaagcccctgatgctgaaaccactgctgctgcaaccactgcgaccactgctgctcctaccactgcaaccaccgctgcttctaccactgctcgtaaagacattccagttttacccaaatgggttggggatctcccgaatggtagagtgtgtccctgagatggaatcagcttgagtcttctgcaattggtcacaactattcatgcttcctgtgatttcatccaactacttaccttgcctacgatatcccctttatctctaatcagtttattttctttcaaataaaaaataactatgagcaacata

SEQ ID NO: 33349 - DNA, 451 bp, Homo sapiens
gcaaatcgccactgatcattttatcagactgtgatatgaacaatgctgtaaagggggcgctgatggccaacttcctcacacaaggccaggtttgctgtaatggcacaagagtatttgtgcagaaagaaattcttgataaatttacagaggaagtggtgaaacagacccaaaggattaaaagtggagatccccttgtggaagatacaaggatgggtccactcatcaaccgacccctgctcgtaaagacattccagttttacccaaatgggttggggatctcccgaatggtagagtgtgtccctgagatggaatcagcttgagtcttctgcaattggtcacaactattcatgcttcctgtgatttcatccaactacttaccttgcctacgatatcccctttatctctaatcagtttattttctttcaaataaaaaataactatgagcaacata

SEQ ID NO: 33350 - DNA, 715 bp, Homo sapiens
gaggtcattgtgcccgcaggttgtttgtgattagctgtctctaacaattgttcatacaataattgttcattattgttctcaacttggggctctccccaacctggggacccttccttattgttgcttacttatcaggtctccacataaaggtgtggaaacttcattcattcatatcttcaacacaaattgtaggtagcctgttttttaaaacatttattcaacaaatatttagtccaagccactattacttactaccttctctactattgtatggacttttaactatctctgacactattcactattcttccacattctctattatttatacctatggtaaaatttgccagtttgaccatacaactaatactcacagggaatatatagagtctagaagaaaatatacaggtccttaaaggctgccctgccaacaaaaccataacgcaggaacaaacatcacaactatgccaaataatcaatcctacaatgtccaaaattttactttaaaactggaattaccagacttcctttctgcattaaccagtttaactagacagtaacgaaatattcctactttatgctgtgatagtttgtttgtttgtttgtttgtttatttatttatttatttaagacagagtttcgctcttgttgcggtgagccgggatcgtgccattgcactccagcctggtcaacagagcgagactccgcctcatta

SEQ ID NO: 33351 - DNA, 92 bp, Homo sapiens
aaatcatgaagaaaatgattttatctttggcgagcagaaaaatattaaaacctgtgcgcttgcagttttttcttatgtaatgtataaatgtc

SEQ ID NO: 33352 - DNA, 349 bp, Homo sapiens
acactctcttgcttcctgtggctaccaaagaagggtgagattatccaattgaaagactgaaaaggacaactgttaatgtgtactaaagagtattatacatctgtttaagagaatatgaattcggtatctccaaggcagaataattgttataaatatataagtaaatatacatatatatgcatacatatatatgagcattcatgaacccgaaaagccaaaatatagctataagctaacactgtttagataatcaataataggtctttaaaaaataagcaatatataatgacaactacctttatagatgttcattatgtatgtaaatgcatacaaatattcactcaaaatt

SEQ ID NO: 33353 - DNA, 4862 bp, Homo sapiens
tgaagttcgtggactcctacaataatgctataaatgcatagaagaaaagacacaggactgtgaaagaaagtgatgatgcgatgtctaaaacgttcaaggcaccgcatctgtgatcaagaatacatgtgctgctttaccgacacatcaaagagcaaggattgccacccaggacgatgagcggctgagatggagacgtctgcctcagccactgcctccgagaagcaagaagccaaaagtgggatcctggaggccgctggcttccccgacccgggtaaaaaggcctctcctttggtggtggctgcagcggcagcagcagcggtagctgcccaaggagcccagccttcaccttcccccaccccatcaaccccgtggcctaccagcagattctgagccagcagaggggtctggggtcagcctttggacacacaccacccctgatccagccctcacccaccttcctggcccagcagcccatggccctcacctccatcaatgccacgcccacccagctcagcagcagcagcaactgtctgagtgacaccaaccagaacaagcagagcagtgagtcggccgtcagcagcaccgtcaaccctgtcgccattcacaagcgcagcaaggtcaagaccgagcctgagggcctgcggccggcctcccctctggcgctgacgcagggccaggtgctggacacggctcatgtgggtgtgcccttcccctctccccaggagcagctggctgacctcaaggaagatctggacagggatgactgtaagcaggaggctgaggtggtcatctatgagaccaactgccactgggaagactgcaccaaggagtacgacacccaggagcagctggtgcatcacatcaacaacgagcacatccacggggagaagaaggagtttgtgtgccgctggcaggcctgcacgcgggagcagaagcccttcaaggcgcagtacatgctggtggtgcacatgcggcgacacacgggcgagaagccccacaagtgcacgttcgagggctgctcgaaggcctactcccgcctggagaacctgaagacacacctgcggtcccacaccggggagaagccatatgtgtgtgagcacgagggctgcaacaaagccttctccaacgcctcggaccgcgccaagcaccagaatcgcacccactccaacgagaaaccctacatctgcaagatcccaggctgcaccaagagatacacagaccccagctctctccggaagcatgtgaaaacggtccacggcccagatgcccacgtcaccaagaagcagcgcaatgacgtgcacctccgcacaccgctgctcaaagagaatggggacagtgaggccggcacggagcctggcggcccagagagcaccgaggccagcagcaccagccaggccgtggaggactgcctgcacgtcagagccatcaagaccgagagctccgggctgtgtcagtccagccccggggcccagtcgtcctgcagcagcgagccctctcctctgggcagtgcccccaacaatgacagtggcgtggagatgccggggacggggcccgggagcctgggagacctgacggcactggatgacacacccccaggggccgacacctcagccctggctgccccctccgctggtggcctccagctgcgcaaacacatgaccaccatgcaccggttcgagcagctcaagaaggagaagctcaagtcactcaaggattcctgctcatgggccgggccgactccacacacgcggaacaccaagctgcctcccctcccgggaagtggctccatcctggaaaacttcagtggcagtgggggcggcgggcccgcggggctgctgccgaacccgcggctgtcggagctgtccgcgagcgaggtgaccatgctgagccagctgcaggagcgccgcgacagctccaccagcacggtcagctcggcctacaccgtgagccgccgctcctccggcatctccccctacttctccagccgccgctccagcgaggcctcgcccctgggcgccggccgcccgcacaacgcgagctccgctgactcctacgaccccatctccacggacgcgtcgcggcgctcgagcgaggccagccagtgcagcggcggctccgggctgctcaacctcacgccggcgcagcagtacagcctgcgggccaagtacgcggcagccactggcggccccccgcccactccgctgccgggcctggagcgcatgagcctgcggaccaggctggcgctgctggacgcggccgagggcacgctgcccgccggctgcccacgcccactggggccgcggcgtggcagcgacgggccgacctatggccacggccacgcgggggctgcgcccgccttcccccacgaggctccaggcggcggaaccaggcgggccagcgaccctgtgcggcggcccgatgccctgtccctgccgcgggtgcagcgcttccacagcacccacaacgtgaaccccggcccgctgccgccctgtgccgacaggcgaggcctccgcctgcagagccacccgagcaccgacggcggcctggcccgcggcgcctactcgccccggccgcctagcatcagcgagaacgtggcgatggaggccgtggcggcaggagtggacggcgcggggcccgaggccgacctggggctgccggaggacgacctggtgcttccagacgacgtggtgcagtacatcaaggcgcacgccagtggcgctctggacgagggcaccgggcaggtgtatcccacggaaagcactggcttctctgacaaccccagactacccagcccggggctgcacggccagcgcaggatggtggctgcggactccaacgtgggcccctccgcccctatgctgggaggatgccagttaggctttggggcgccctccagcctgaacaaaaataacatgcctgtgcagtggaatgaggtgagctccggcaccgtagactccctggccagccaggtgaagcctccaccctttcctcagggcaacctggcggtggtgcagcagaagcctgcctttggccagtacccgggctacagtccgcaaggcctacaggctagccctgggggcctggacagcacgcagccacacctgcagccccgcagcggagccccctcccagggcatccccagggtaaactacatgcagcagctgcgacagccagtggcaggcagccagtgtcctggcatgactaccactatgagcccccatgcctgctatggccaagtccacccccagctgagccccagcaccatcagtggggccctcaaccagttcccccaatcctgcagcaacatgccagccaagccagggcatctggggcaccctcagcagacagaagtggcacctgaccccaccacgatgggcaatcgccacagggaacttggggtccccaattcagccctggctggagtgccgccacctcacccagtccagagctacccacagcagagccatcacctggcagcctccatgagccaggagggctaccaccaggtccccagccttctgcctgcccgccagcctggcttcatggagccccaaacaggcccgatgggggtggctacagcaggctttggcctagtgcagccccggcctcccctcgagcccagccccactggccgccaccgtggggtacgtgctgtgcagcagcagctggcctacgccagggccacaggccatgccatggctgccatgccgtccagtcaggaaacagcagaggctgtgcccaagggagcgatgggcaacatggggtcggtgcctccccagccgcctccgcaggacgcaggtggggccccggaccacagcatgctctactactacggccagatccacatgtacgaacaggatggaggcctggagaacctcgggagctgccaggtcatgcggtcccagccaccacagccacaggcctgtcaggacagcatccagccccagcccttgccctcaccaggggtcaaccaggtgtccagcactgtggactcccagctcctggaggccccccagattgacttcgatgccatcatggatgatggcgatcactcgagtttgttctcgggtgctctgagccccagcctcctccacagcctctcccagaactcctcccgcctcaccaccccccgaaactccttgaccctgccctccatccccgcaggcatcagcaacatggctgtcggggacatgagctccatgctcaccagcctcgccgaggagagcaagttcctgaacatgatgacctagaggcccgagcgcctggtgctgagtgcacccggaggggtcatcgctgcccagagcctggggattccagctgtcttgtctttttccaaaaaagtgttaaataggcttgaggggttgttgcgcaatggccgcttcagatgacagatgttgtaagagaaggtttatgggcatcctctctggtcttttggattattcctcagaacaatgaaaaaagtctccataggacaggaaggaatgcaaaactcatttacacagtgctttccagcctttggtgcttacaggaccgcgctgttccggcttcttcacggctgacattcggctaacgagggattactttggccaaaacctttcaaaggatatgcagaaagatggtagggagcatttgggtttgaatctgaatgctatactggatactctgctccggaaagatgagctttttattctactacttggaaggaaaaggaattcctctatgaagcctaactcttgaggtctctaacataccttgtcatagaggaaaagcacagattatacctggatgattcaggagagtgtatatgaatgaataaggcatccaagtatatatgaatgaataaagtatgtaagtatcaccag

SEQ ID NO: 33354 - DNA, 4811 bp, Homo sapiens
tgaagttcgtggactcctacaataatgctataaatgcatagaagaaaagacacaggactgtgaaagaaagtgatgatgcgatgtctaaaacgttcaaggcaccgcatctgtgatcaagaatacatgtgctgctttaccgacacatcaaagagcaaggattgccacccaggacgatgagcggctgagatggagacgtctgcctcagccactgcctccgagaagcaagaagccaaaagtgggatcctggaggccgctggcttccccgacccgggtaaaaaggcctctcctttggtggtggctgcagcggcagcagcagcggtagctgcccaaggagcccagccttcaccttcccccaccccatcaaccccgtggcctaccagcagattctgagccagcagaggggtctggggtcagcctttggacacacaccacccctgatccagccctcacccaccttcctggcccagcagcccatggccctcacctccatcaatgccacgcccacccagctcagcagcagcagcaactgtctgagtgacaccaaccagaacaagcagagcagtgagtcggccgtcagcagcaccgtcaaccctgtcgccattcacaagcgcagcaaggtcaagaccgagcctgagggcctgcggccggcctcccctctggcgctgacgcaggagcagctggctgacctcaaggaagatctggacagggatgactgtaagcaggaggctgaggtggtcatctatgagaccaactgccactgggaagactgcaccaaggagtacgacacccaggagcagctggtgcatcacatcaacaacgagcacatccacggggagaagaaggagtttgtgtgccgctggcaggcctgcacgcgggagcagaagcccttcaaggcgcagtacatgctggtggtgcacatgcggcgacacacgggcgagaagccccacaagtgcacgttcgagggctgctcgaaggcctactcccgcctggagaacctgaagacacacctgcggtcccacaccggggagaagccatatgtgtgtgagcacgagggctgcaacaaagccttctccaacgcctcggaccgcgccaagcaccagaatcgcacccactccaacgagaaaccctacatctgcaagatcccaggctgcaccaagagatacacagaccccagctctctccggaagcatgtgaaaacggtccacggcccagatgcccacgtcaccaagaagcagcgcaatgacgtgcacctccgcacaccgctgctcaaagagaatggggacagtgaggccggcacggagcctggcggcccagagagcaccgaggccagcagcaccagccaggccgtggaggactgcctgcacgtcagagccatcaagaccgagagctccgggctgtgtcagtccagccccggggcccagtcgtcctgcagcagcgagccctctcctctgggcagtgcccccaacaatgacagtggcgtggagatgccggggacggggcccgggagcctgggagacctgacggcactggatgacacacccccaggggccgacacctcagccctggctgccccctccgctggtggcctccagctgcgcaaacacatgaccaccatgcaccggttcgagcagctcaagaaggagaagctcaagtcactcaaggattcctgctcatgggccgggccgactccacacacgcggaacaccaagctgcctcccctcccgggaagtggctccatcctggaaaacttcagtggcagtgggggcggcgggcccgcggggctgctgccgaacccgcggctgtcggagctgtccgcgagcgaggtgaccatgctgagccagctgcaggagcgccgcgacagctccaccagcacggtcagctcggcctacaccgtgagccgccgctcctccggcatctccccctacttctccagccgccgctccagcgaggcctcgcccctgggcgccggccgcccgcacaacgcgagctccgctgactcctacgaccccatctccacggacgcgtcgcggcgctcgagcgaggccagccagtgcagcggcggctccgggctgctcaacctcacgccggcgcagcagtacagcctgcgggccaagtacgcggcagccactggcggccccccgcccactccgctgccgggcctggagcgcatgagcctgcggaccaggctggcgctgctggacgcggccgagggcacgctgcccgccggctgcccacgcccactggggccgcggcgtggcagcgacgggccgacctatggccacggccacgcgggggctgcgcccgccttcccccacgaggctccaggcggcggaaccaggcgggccagcgaccctgtgcggcggcccgatgccctgtccctgccgcgggtgcagcgcttccacagcacccacaacgtgaaccccggcccgctgccgccctgtgccgacaggcgaggcctccgcctgcagagccacccgagcaccgacggcggcctggcccgcggcgcctactcgccccggccgcctagcatcagcgagaacgtggcgatggaggccgtggcggcaggagtggacggcgcggggcccgaggccgacctggggctgccggaggacgacctggtgcttccagacgacgtggtgcagtacatcaaggcgcacgccagtggcgctctggacgagggcaccgggcaggtgtatcccacggaaagcactggcttctctgacaaccccagactacccagcccggggctgcacggccagcgcaggatggtggctgcggactccaacgtgggcccctccgcccctatgctgggaggatgccagttaggctttggggcgccctccagcctgaacaaaaataacatgcctgtgcagtggaatgaggtgagctccggcaccgtagactccctggccagccaggtgaagcctccaccctttcctcagggcaacctggcggtggtgcagcagaagcctgcctttggccagtacccgggctacagtccgcaaggcctacaggctagccctgggggcctggacagcacgcagccacacctgcagccccgcagcggagccccctcccagggcatccccagggtaaactacatgcagcagctgcgacagccagtggcaggcagccagtgtcctggcatgactaccactatgagcccccatgcctgctatggccaagtccacccccagctgagccccagcaccatcagtggggccctcaaccagttcccccaatcctgcagcaacatgccagccaagccagggcatctggggcaccctcagcagacagaagtggcacctgaccccaccacgatgggcaatcgccacagggaacttggggtccccaattcagccctggctggagtgccgccacctcacccagtccagagctacccacagcagagccatcacctggcagcctccatgagccaggagggctaccaccaggtccccagccttctgcctgcccgccagcctggcttcatggagccccaaacaggcccgatgggggtggctacagcaggctttggcctagtgcagccccggcctcccctcgagcccagccccactggccgccaccgtggggtacgtgctgtgcagcagcagctggcctacgccagggccacaggccatgccatggctgccatgccgtccagtcaggaaacagcagaggctgtgcccaagggagcgatgggcaacatggggtcggtgcctccccagccgcctccgcaggacgcaggtggggccccggaccacagcatgctctactactacggccagatccacatgtacgaacaggatggaggcctggagaacctcgggagctgccaggtcatgcggtcccagccaccacagccacaggcctgtcaggacagcatccagccccagcccttgccctcaccaggggtcaaccaggtgtccagcactgtggactcccagctcctggaggccccccagattgacttcgatgccatcatggatgatggcgatcactcgagtttgttctcgggtgctctgagccccagcctcctccacagcctctcccagaactcctcccgcctcaccaccccccgaaactccttgaccctgccctccatccccgcaggcatcagcaacatggctgtcggggacatgagctccatgctcaccagcctcgccgaggagagcaagttcctgaacatgatgacctagaggcccgagcgcctggtgctgagtgcacccggaggggtcatcgctgcccagagcctggggattccagctgtcttgtctttttccaaaaaagtgttaaataggcttgaggggttgttgcgcaatggccgcttcagatgacagatgttgtaagagaaggtttatgggcatcctctctggtcttttggattattcctcagaacaatgaaaaaagtctccataggacaggaaggaatgcaaaactcatttacacagtgctttccagcctttggtgcttacaggaccgcgctgttccggcttcttcacggctgacattcggctaacgagggattactttggccaaaacctttcaaaggatatgcagaaagatggtagggagcatttgggtttgaatctgaatgctatactggatactctgctccggaaagatgagctttttattctactacttggaaggaaaaggaattcctctatgaagcctaactcttgaggtctctaacataccttgtcatagaggaaaagcacagattatacctggatgattcaggagagtgtatatgaatgaataaggcatccaagtatatatgaatgaataaagtatgtaagtatcaccag

SEQ ID NO: 33355 - DNA, 3631 bp, Homo sapiens
tgaagttcgtggactcctacaataatgctataaatgcatagaagaaaagacacaggactgtgaaagaaagtgatgatgcgatgtctaaaacgttcaaggcaccgcatctgtgatcaagaatacatgtgctgctttaccgacacatcaaagagcaaggattgccacccaggacgatgagcggctgagatggagacgtctgcctcagccactgcctccgagaagcaagaagccaaaagtgggatcctggaggccgctggcttccccgacccgggtaaaaaggcctctcctttggtggtggctgcagcggcagcagcagcggtagctgcccaaggagcccagccttcaccttcccccaccccatcaaccccgtggcctaccagcagattctgagccagcagaggggtctggggtcagcctttggacacacaccacccctgatccagccctcacccaccttcctggcccagcagcccatggccctcacctccatcaatgccacgcccacccagctcagcagcagcagcaactgtctgagtgacaccaaccagaacaagcagagcagtgagtcggccgtcagcagcaccgtcaaccctgtcgccattcacaagcgcagcaaggtcaagaccgagcctgagggcctgcggccggcctcccctctggcgctgacgcagggccaggtgctggacacggctcatgtgggtgtgcccttcccctctccccaggagcagctggctgacctcaaggaagatctggacagggatgactgtaagcaggaggctgaggtggtcatctatgagaccaactgccactgggaagactgcaccaaggagtacgacacccaggagcagctggtgcatcacatcaacaacgagcacatccacggggagaagaaggagtttgtgtgccgctggcaggcctgcacgcgggagcagaagcccttcaaggcgcagtacatgctggtggtgcacatgcggcgacacacgggcgagaagccccacaagtgcacgttcgagggctgctcgaaggcctactcccgcctggagaacctgaagacacacctgcggtcccacaccggggagaagccatatgtgtgtgagcacgagggctgcaacaaagccttctccaacgcctcggaccgcgccaagcaccagaatcgcacccactccaacgagaaaccctacatctgcaagatcccaggctgcaccaagagatacacagaccccagctctctccggaagcatgtgaaaacggtccacggcccagatgcccacgtcaccaagaagcagcgcaatgacgtgcacctccgcacaccgctgctcaaagagaatggggacagtgaggccggcacggagcctggcggcccagagagcaccgaggccagcagcaccagccaggccgtggaggactgcctgcacgtcagagccatcaagaccgagagctccgggctgtgtcagtccagccccggggcccagtcgtcctgcagcagcgagccctctcctctgggcagtgcccccaacaatgacagtggcgtggagatgccggggacggggcccgggagcctgggagacctgacggcactggatgacacacccccaggggccgacacctcagccctggctgccccctccgctggtggcctccagctgcgcaaacacatgaccaccatgcaccggttcgagcagctcaagaaggagaagctcaagtcactcaaggattcctgctcatgggccgggccgactccacacacgcggaacaccaagctgcctcccctcccgggaagtggctccatcctggaaaacttcagtggcagtgggggcggcgggcccgcggggctgctgccgaacccgcggctgtcggagctgtccgcgagcgaggtgaccatgctgagccagctgcaggagcgccgcgacagctccaccagcacggtcagctcggcctacaccgtgagccgccgctcctccggcatctccccctacttctccagccgccgctccagcgaggcctcgcccctgggcgccggccgcccgcacaacgcgagctccgctgactcctacgaccccatctccacggacgcgtcgcggcgctcgagcgaggccagccagtgcagcggcggctccgggctgctcaacctcacgccggcgcagcagtacagcctgcgggccaagtacgcggcagccactggcggccccccgcccactccgctgccgggcctggagcgcatgagcctgcggaccaggctggcgctgctggacgcggccgagggcacgctgcccgccggctgcccacgcccactggggccgcggcgtggcagcgacgggccgacctatggccacggccacgcgggggctgcgcccgccttcccccacgaggctccaggcggcggaaccaggcgggccagcgaccctgtgcggcggcccgatgccctgtccctgccgcgggtgcagcgcttccacagcacccacaacgtgaaccccggcccgctgccgccctgtgccgacaggcgaggcctccgcctgcagagccacccgagcaccgacggcggcctggcccgcggcgcctactcgccccggccgcctagcatcagcgagaacgtggcgatggaggccgtggcggcaggagtggacggcgcggggcccgaggccgacctggggctgccggaggacgacctggtgcttccagacgacgtggtgcagtacatcaaggcgcacgccagtggcgctctggacgagggcaccgggcaggtgtatcccacggaaagcactggcttctctgacaaccccagactacccagcccggggctgcacggccagcgcaggatggtggctgcggactccaacgtgggcccctccgcccctatgctgggaggatgccagttaggctttggggcgccctccagcctgaacaaaaataacatgcctgtgcagtggaatgaggcatcagcaacatggctgtcggggacatgagctccatgctcaccagcctcgccgaggagagcaagttcctgaacatgatgacctagaggcccgagcgcctggtgctgagtgcacccggaggggtcatcgctgcccagagcctggggattccagctgtcttgtctttttccaaaaaagtgttaaataggcttgaggggttgttgcgcaatggccgcttcagatgacagatgttgtaagagaaggtttatgggcatcctctctggtcttttggattattcctcagaacaatgaaaaaagtctccataggacaggaaggaatgcaaaactcatttacacagtgctttccagcctttggtgcttacaggaccgcgctgttccggcttcttcacggctgacattcggctaacgagggattactttggccaaaacctttcaaaggatatgcagaaagatggtagggagcatttgggtttgaatctgaatgctatactggatactctgctccggaaagatgagctttttattctactacttggaaggaaaaggaattcctctatgaagcctaactcttgaggtctctaacataccttgtcatagaggaaaagcacagattatacctggatgattcaggagagtgtatatgaatgaataaggcatccaagtatatatgaatgaataaagtatgtaagtatcaccag

SEQ ID NO: 33356 - DNA, 3580 bp, Homo sapiens
tgaagttcgtggactcctacaataatgctataaatgcatagaagaaaagacacaggactgtgaaagaaagtgatgatgcgatgtctaaaacgttcaaggcaccgcatctgtgatcaagaatacatgtgctgctttaccgacacatcaaagagcaaggattgccacccaggacgatgagcggctgagatggagacgtctgcctcagccactgcctccgagaagcaagaagccaaaagtgggatcctggaggccgctggcttccccgacccgggtaaaaaggcctctcctttggtggtggctgcagcggcagcagcagcggtagctgcccaaggagcccagccttcaccttcccccaccccatcaaccccgtggcctaccagcagattctgagccagcagaggggtctggggtcagcctttggacacacaccacccctgatccagccctcacccaccttcctggcccagcagcccatggccctcacctccatcaatgccacgcccacccagctcagcagcagcagcaactgtctgagtgacaccaaccagaacaagcagagcagtgagtcggccgtcagcagcaccgtcaaccctgtcgccattcacaagcgcagcaaggtcaagaccgagcctgagggcctgcggccggcctcccctctggcgctgacgcaggagcagctggctgacctcaaggaagatctggacagggatgactgtaagcaggaggctgaggtggtcatctatgagaccaactgccactgggaagactgcaccaaggagtacgacacccaggagcagctggtgcatcacatcaacaacgagcacatccacggggagaagaaggagtttgtgtgccgctggcaggcctgcacgcgggagcagaagcccttcaaggcgcagtacatgctggtggtgcacatgcggcgacacacgggcgagaagccccacaagtgcacgttcgagggctgctcgaaggcctactcccgcctggagaacctgaagacacacctgcggtcccacaccggggagaagccatatgtgtgtgagcacgagggctgcaacaaagccttctccaacgcctcggaccgcgccaagcaccagaatcgcacccactccaacgagaaaccctacatctgcaagatcccaggctgcaccaagagatacacagaccccagctctctccggaagcatgtgaaaacggtccacggcccagatgcccacgtcaccaagaagcagcgcaatgacgtgcacctccgcacaccgctgctcaaagagaatggggacagtgaggccggcacggagcctggcggcccagagagcaccgaggccagcagcaccagccaggccgtggaggactgcctgcacgtcagagccatcaagaccgagagctccgggctgtgtcagtccagccccggggcccagtcgtcctgcagcagcgagccctctcctctgggcagtgcccccaacaatgacagtggcgtggagatgccggggacggggcccgggagcctgggagacctgacggcactggatgacacacccccaggggccgacacctcagccctggctgccccctccgctggtggcctccagctgcgcaaacacatgaccaccatgcaccggttcgagcagctcaagaaggagaagctcaagtcactcaaggattcctgctcatgggccgggccgactccacacacgcggaacaccaagctgcctcccctcccgggaagtggctccatcctggaaaacttcagtggcagtgggggcggcgggcccgcggggctgctgccgaacccgcggctgtcggagctgtccgcgagcgaggtgaccatgctgagccagctgcaggagcgccgcgacagctccaccagcacggtcagctcggcctacaccgtgagccgccgctcctccggcatctccccctacttctccagccgccgctccagcgaggcctcgcccctgggcgccggccgcccgcacaacgcgagctccgctgactcctacgaccccatctccacggacgcgtcgcggcgctcgagcgaggccagccagtgcagcggcggctccgggctgctcaacctcacgccggcgcagcagtacagcctgcgggccaagtacgcggcagccactggcggccccccgcccactccgctgccgggcctggagcgcatgagcctgcggaccaggctggcgctgctggacgcggccgagggcacgctgcccgccggctgcccacgcccactggggccgcggcgtggcagcgacgggccgacctatggccacggccacgcgggggctgcgcccgccttcccccacgaggctccaggcggcggaaccaggcgggccagcgaccctgtgcggcggcccgatgccctgtccctgccgcgggtgcagcgcttccacagcacccacaacgtgaaccccggcccgctgccgccctgtgccgacaggcgaggcctccgcctgcagagccacccgagcaccgacggcggcctggcccgcggcgcctactcgccccggccgcctagcatcagcgagaacgtggcgatggaggccgtggcggcaggagtggacggcgcggggcccgaggccgacctggggctgccggaggacgacctggtgcttccagacgacgtggtgcagtacatcaaggcgcacgccagtggcgctctggacgagggcaccgggcaggtgtatcccacggaaagcactggcttctctgacaaccccagactacccagcccggggctgcacggccagcgcaggatggtggctgcggactccaacgtgggcccctccgcccctatgctgggaggatgccagttaggctttggggcgccctccagcctgaacaaaaataacatgcctgtgcagtggaatgaggcatcagcaacatggctgtcggggacatgagctccatgctcaccagcctcgccgaggagagcaagttcctgaacatgatgacctagaggcccgagcgcctggtgctgagtgcacccggaggggtcatcgctgcccagagcctggggattccagctgtcttgtctttttccaaaaaagtgttaaataggcttgaggggttgttgcgcaatggccgcttcagatgacagatgttgtaagagaaggtttatgggcatcctctctggtcttttggattattcctcagaacaatgaaaaaagtctccataggacaggaaggaatgcaaaactcatttacacagtgctttccagcctttggtgcttacaggaccgcgctgttccggcttcttcacggctgacattcggctaacgagggattactttggccaaaacctttcaaaggatatgcagaaagatggtagggagcatttgggtttgaatctgaatgctatactggatactctgctccggaaagatgagctttttattctactacttggaaggaaaaggaattcctctatgaagcctaactcttgaggtctctaacataccttgtcatagaggaaaagcacagattatacctggatgattcaggagagtgtatatgaatgaataaggcatccaagtatatatgaatgaataaagtatgtaagtatcaccag

SEQ ID NO: 33357 - DNA, 529 bp, Homo sapiens
gggcctcggatcctccctatcgtacaagaatgcagatgcccatgcgttagggctgtggcagggaaaactggttccccacagcacttcgatgaagacaagtgtgcactggagaggaaggaggaagggccccaggacaggccatctgacaaggagagctgtgggcggggctgagttgaggaaaggagctaaaaaggctgatgagtgtgtgtgtgtgtgtgtgtgtctgcatgcatgtgttgtgtgtgtgcacacacacctgtaacacacacacttgcatccacacctgtaacagcccagggtccttggcacagaatgcatgggactaacagcgacctcttttcagggccaggtgctggacacggctcatgtgggtgtgcccttcccctctccccaggagcagctggctgacctcaaggaagatctggacagggatgactgtaagcaggaggctgaggtggtcatctatgagaccaactgccactgggaagactgcaccaaggagtacgacacccaggagcagctggtgcat

SEQ ID NO: 33358 - DNA, 347 bp, Homo sapiens
tgtctgatacttctactgctaaatgggttaatgtgtaattgcttcactgagcatgtgctgtgacccaggcagcacataaaacagacacaaattccaaccttttaaagcaaagattagataaagattattgatagaaggactaattggacctcactcaccttttctgtgccataaggaaagcagttaggtaaagctgaccttctttggagggaagacacaaggtcaagacatgcccatcaggatgccctttgggcctagacctgatgtgagaatgatgggcttggagtgttctggaaatagctgagaggcttatactaaagttattattgtttttcccaaaaaaaaaa

SEQ ID NO: 33359 - DNA, 375 bp, Homo sapiens
agaacctgtcccaagtctccatactgagcatcataaggatgtatattttctggccaagtggcaatgatgagttttcagagaggatgacactgaggttctgggacgacctgtgtctcacccaaggctgcctgggtaaaggggagcagaaacaggtagagggagctggtctcctgaatccgatccagccccgttttcctgccaagccctgggatgaggacctgagacgccttctcccacccactgctctgcgcattgcacagaagagcggctgctggtaaagttctgggagttctgacacatgcacgccacagaaacacaggactgggggttgtcaccgctatcaacgttaatgacaataaagggaaaacagcattt

SEQ ID NO: 33360 - DNA, 228 bp, Homo sapiens
taattttctaattcactgattcctctgtttaatctttgttgattttagtctcctgctttacttagagttgcactgcttttatttttaacttcttaagttgaatgcttagtccacttaaggttataataatttaacacaatatattttctctgcatttattttagagtttagattttctcttttacccaacagttattagagaagttttttaaatgtagtaattaaaac

SEQ ID NO: 33361 - DNA, 767 bp, Homo sapiens
aattaccaatgtcattttccatagaattagaaaaagcaattctaaagttcttatggaaccaaaaacagcctgaatagtcaaagcacttctaagtaaaaagaacaaattcggaggcatcatcttacatgacttcaagttatactacatatctataacaactaaaacagcatgttactggtagaaaaatagacacatagataaataaaatagaacagataacccagaaacaaagccacatgctacacccaactgatctttgatgaagttgacaaaaataaacaaggaagaaaggagatacccttttcaataagtagtgctgggaaaactggctagccatatgcagaataattaaagtggaatcttatttctcattccatacaaaaattaactcaacatggattaaatatttaaacgtaagatcagaaattataaaaattctggaagaaaacctaggaaaaactcttcaagacatcagcctaaccaaaaatttatgacaaagaccacaaaagcaaatgcaacaaaaataaaaataaataaatgcgacttaattaaactaaaaagtttgtgactagcaaaagaaatagtcaacataataaacaggcaacctacagaatgggacaatatattcacaaattatgcctatgacaaacaactaatatctggaatctacaaggaactcaactcaacaagaaaaaaaacaacccaattaaaaactgggcaaagaacatgcacagacgtttgtcaaaagaataaaaatacaaaaggcc

SEQ ID NO: 33362 - DNA, 388 bp, Homo sapiens
gtctccaaacaccatgtttccttcttaacatgtaactgactctgtaaaaacaatctgtttagatttctcatttaattcagaagttaattaaaagggactgaaataaaaatttgcatgtagttagagattactggttagttacacattaattcagagtttctagagccatttcacagaagctagaaaatataaccaccttgatatcagttttcacaaacttgagtacgtttttaggccttaaaaccttaccattttaaataatttcccttgtatttgaaaataacatataacccatattttctgctaaataatgccatttgtttgtcactatgcctgattggccaaatgttctaatagttatttaacattcaaaacaatgactaccaaa

SEQ ID NO: 33363 - DNA, 394 bp, Homo sapiens
gatatgcatgtacatgagaagtaatggacattcaaaaagccagatcctgctgattccacatttcaatggcttggtttgccaactcatgcatgggtgcctctaaacactaatcagtaatccagttcattgctaaggctgcagagctccaggatctcttattttctcacaggtgggaaaagaccccccgaccttcttggtctaagctctcttctggttacttggtacccacatgtttacaaggtatttattttcattagacctccgatcgttctaaaggcctgcagagcccaacccttcctgcctcctcctctccccatctttaagctataaaaccttggcggagttttctgggctgttctccaggtttttgttttccccactgtccagcatggta

SEQ ID NO: 33364 - DNA, 518 bp, Homo sapiens
agtgctcacctagacccacattcagtgtctcttcactcaccagccggaccagtccccatccacctcccaagttctgcagccagctctgctgatgcattcagaggaggatttaggcaattgtcaacctctgcacatcttgttgtgggtacgcagcagctatgtattttcattgtcatcttttaaatctatgacatagatgagatacgcaggacctaagcctgcatctctatgtgcccattccagcaccaggaaacttttaggggtctgaaacactagtggagctagtgaatgagtgaatgacggtagccagggcagttttgacctgtgtatgtggacattggaaatacacgataggtaactaactgaagtacaaaattgtgtttaaaacttgtgatttgggacaggcgcagtggctcatgtctatagtcgcagcactttgggaggccaaagcgggtggatggcttgagcccaggagtttaagaccagcctgggcaacatggtgaaaccttgtctctacc

SEQ ID NO: 33365 - DNA, 257 bp, Homo sapiens
agtgctcacctagacccacattcagtgtctcttcactcaccagccggaccagtccccatccacctcccaagttctgcagccagctctgctgatgcattcagaggaggatttaggcaattgtcaacctctgcacatcttgttgtgggtacgcagcagctatgtattttcattgtccacatacacaggtcaaaactgccctggctaccgtcattcactcattcactagttccactagtgtttcagacccctaaaagttt

SEQ ID NO: 33366 - DNA, 307 bp, Homo sapiens
catctgtgtccctcttgggtcccagaagttttggagtaatggatctagactgaatgcttctcagtctggatggcctcgggggcggcacacttgctaggctgaacttctcacatccaggtttttccctcggctggtcttgggcttgggggaggctttgcttggggccggttgctgttcctgtcccctgcactgtggaggttgcaggcctctgagaggtaacgcagggaggtgggtagtggccaggtggcccttggtgccctgccctggcccaggcgttccacgcactctgctccctaccctgcagtaa

SEQ ID NO: 33367 - DNA, 477 bp, Homo sapiens
ccacgtccagtcttgtttgtcccttttcaagtatgtaaatcttaattcgcctaaaccggctgcacgtcactcagggccactgtccatgtcttacgctagtgtgtcttttccatgcaaccttgtacaaaacgggccttcaattaacatttcttggttgcttgacttcttaacacacactatgataggttaccttcttcccagggttacatgtttggaaaatagtcttgtctgagttgccaaaatgtggtattctcagtgtgtttacctcatacctgacaatggcacctcagaatgttgaccttcttcggaaacagggtcttcacagaggtaatcgagttcaaatgaggtcaccaggcacagtggctcatgcctgtaatctcatacctgataatgaataactagatgcagaatttattttccacataaatctaattttcttgaacttgcttcattttcctcttttctataatgtaggaa

SEQ ID NO: 33368 - DNA, 503 bp, Homo sapiens
ggcagactctgtccttcagaactgtgagagagcacatttctgttgccctgtgtcacccagtgtgtggtccttcatacagccatcccaggaaacaaatacaccgcctaacactgttctgaagactagaatgtgtctgacttgacctgggtcttgcagccaggacaatcctgtttggaaacccgtatgaactctctcacattcatcattcacttcctggagagacagattttgtaaactttacagagcagcttttaatcattcggtggttcccagattcctaggccagagtctctatactgaataatttataatagaggtcatatccatcatggtggcttgaattctgtcctcccaagaacacaggctcaagtcctgacccctcctacctgtgaatgggaccttatttggaaatggagtctttgcaggtgtaattcagttaagatgaggtaggcccgaaaagcaatgactgacagtcctataagaagagaggacggagacccatg

SEQ ID NO: 33369 - DNA, 565 bp, Homo sapiens
tagctgggcatggtagcactcgcctttggtcccagctacccaggaagctgaggtgggaggatcacttgagcccaggaacttccaggctgcagtgaaccatgattgcaccactacactcagcctgggtgacagagtgagaccctgtctcaaaaataaaaataaaattaaaatgaaaaacagctgccctacttttgtttgtacaggcattggttgatggagattttacttttgggctgttatgagtaaagctggtatgaatacttgtttataaaactttctatggacacatatttttgcttctcttgggtggttgggttatatgggaggtgtatttttaactttctttttttttttttgagacaaggtctcactttgtcatccaggctagagtgcagtggcacaatcttggctcactgcaacctctgcctcctgggttcaagcgattcttgtgcctcagccttccaggtagttgggaccacaggcacacgccaccatgccctgctaattgtttttggatttttggtagagatggggtttcgccatgttgcccaggctggtctccaac

SEQ ID NO: 33370 - DNA, 503 bp, Homo sapiens
gtgtacttgggttcagatctcagcactcccgggtactcttgtgttatctgaatgacattgggcaagtggcttaactgatttgtatcctagatgtgggatctataaaatgaggttgaactatttcccactcagagcccctccacattcaccactcccacgataactccttactgcccatatttgtgactatatgcctcagagcttgtctcttgtttagccagtacttagaacagttgatgccaatgagctgcccctgcatgccaggatccaagcaacgcactgagaaatgagcactgaatgttaccgactcataagttatacttctctttcctcatgcatcttctcagagatgtaggaattcaagagagggagactttctgtgggtaagtggtaatgtggagatgatggaagacttactgattttggagtggcccttgaagggaaggaagaaatgaaaatgtgtgttcagagggatcaggcactgtaagaaatggggagtgctc

SEQ ID NO: 33371 - DNA, 336 bp, Homo sapiens
aatgaggtggtgtttggtagatggtggctaatctgcattttgccaaagcagcatcagtaggtggtccaacaatagtatctcaggcttactaagcatctgtccagataacagggaagagccagctcagtcagtgttactgtctcttctgggctccctgacttgtatttagagcgcaataccaagttgcagatccaactgctggatgacaaagttttgggagttcctgccctccaaccggacgcacaaaacagcatcatctctaatcaaattggttcagtgtaaatggagggtttataaaatagaacgcaatctcaggcaaagtctctgttcttccac

SEQ ID NO: 33372 - DNA, 1636 bp, Homo sapiens
cggctgagccccagcgaccgctctggtcggctgtgtagactgttgggtaggctgcgtgctagcttcggcgcggatccctgggcgtccgtacgtcggagtccttcgtcctccagggtccctgttctttgcgccagcgggaaccactatctctgcactcctggggttttgttacatggctgctttcctcaaaatgagtgttagtgtcaatttcttcagacctttcaccaggtttttggtgccatttacccttcataggaagagaaataacttaacaattttgcagagatacatgtcttccaaaataccagctgttacttatcctaaaaatgagagtacacccccttctgaagagctagagttggataagtggaaaactaccatgaaatctagtgtgcaagaagaatgtgtttcaacaatctcaagcagtaaggatgaagatcctctagctgccaccagagagttcattgagatgtggagattgcttggcagagaagtaccagaacacatcactgaagaagagctcaaaacccttatggaatgtgtttctaacacagcaaaaaaaaaatatttaaaatatttatatacgaaggaaaaagtgaaaaaagctaggcaaataaaaaaggaaatgaaagcagcagcaagggaagaagcaaaaaatatcaagctgctagaaaccactgaggaagataaacagaaaaactttctatttttacgactttgggataggaatatggacatagcaatgggctggaagggtgcccaggccatgcagtttggacaacctttggtttttgacatggcttacgaaaattatatgaaacgaaaagaattgcagaatactgtttcccagcttttagaaagtgaaggatggaacagaagaaatgttgatcctttccatatttatttctgcaatctaaaaatagatggtgctttgcacagagagttagttaaacggtatcaagaaaaatgggacaaattgcttttaacatcaacagaaaagtctcatgtagatttatttccaaaggacagtattatctatttaactgcagattctcccaatgttatgactactttcaggcatgacaaagtttatgtaattgggtcttttgttgataagagtatgcagccaggcacatccctagccaaggcaaaacggctgaacctggcaactgaatgccttccattagataaatatttacaatgggaaattggtaacaaaaatctcaccttagatcaaatgatacgtattttgttatgtctgaaaaacaatggtaattggcaagaggctctgcaattcgttcccaagagaaaacatactggttttctggagatttctcagcattctcaagagtttatcaacagactaaagaaggcaaagacttaattcattttcaaaaggttctctgaatgtgcacagaacacgtggctcaaatgagaacatttgatggcttaaaaagtaaatgcgttagaaatacagttctgttaatgtatttcttcccaaacaattcatttttctcttctaaaggtagtctttcccaactgactgtagggttgtgtcttttcccaattaaatatctgcagaactttgggattatactttgtttactgtagaaagataataaaaagagttgtccaa

SEQ ID NO: 33373 - DNA, 2168 bp, Homo sapiens
  misc_feature (2168)..(2168): n is a, c, g, or t
cggctgagccccagcgaccgctctggtcggctgtgtagactgttgggtaggctgcgtgctagcttcggcgcggatccctgggcgtccgtacgtcggagtccttcgtcctccagggtccctgttctttgcgccagcgggaaccactatctctgcactcctggggttttgttacatggctgctttcctcaaaatgagtgttagtgtcaatttcttcagacctttcaccaggtttttggtgccatttacccttcataggaagagaaataacttaacaattttgcagagatacatgtcttccaaaataccagctgttacttatcctaaaaatgagagtacacccccttctgaagagctagagttggataagtggaaaactaccatgaaatctagtgtgcaagaagaatgtgtttcaacaatctcaagcagtaaggatgaagatcctctagctgccaccagagagttcattgagatgtggagattgcttggcagagaagtaccagaacacatcactgaagaagagctcaaaacccttatggaatgtgtttctaacacagcaaaaaaaaaatatttaaaatatttatatacgaaggaaaaagtgaaaaaagctaggcaaataaaaaaggaaatgaaagcagcagcaagggaagaagcaaaaaatatcaagctgctagaaaccactgaggaagataaacagaaaaactttctatttttacgactttgggataggaatatggacatagcaatgggctggaagggtgcccaggccatgcagtttggacaacctttggtttttgacatggcttacgaaaattatatgaaacgaaaagaattgcagaatactgtttcccagcttttagaaagtgaaggatggaacagaagaaatgttgatcctttccatatttatttctgcaatctaaaaatagatggtgctttgcacagagagttagttaaacggtatcaagaaaaatgggacaaattgcttttaacatcaacagaaaagtctcatgtagatttatttccaaaggacagtattatctatttaactgcagattctcccaatgttatgactactttcaggcatgacaaagtttatgtaattgggtcttttgttgataagagtatgcagccaggcacatccctagccaaggcaaaacggctgaacctggcaactgaatgccttccattagataaatatttacaatgggaaattggtaacaaaaatctcaccttagatcaaatgatacgtattttgttatgtctgaaaaacaatggtaattggcaagaggctctgcaattcgttcccaagagaaaacatactggttttctggagatttctcagcattctcaagagtttatcaacagactaaagaaggcaaagacttaattcattttcaaaaggttctctgaatgtgcacagaacacgtggctcaaatgagaacatttgatggcttaaaaagtaaatgcgttagaaatacagttctgttaatgtatttcttcccaaacaattcatttttctcttctaaaggtagtctttcccaactgactgtagggttgtgtcttttcccaattaaatatctgcagaactttgggattatactttgtttactgtagaaagataataaaaagagttgtccaaaaaaaaaaaaaaaaaaattaaaataaaaaataaaataaaaaaaaaaaaaaaaagaaaaaaaaaaaaaaaaaaaaaagaaaggggggggggggattaaataattttccccgggggggggcccaaaatttatcgcgaccccctttttttatagaaaaaagggggcgcccaaaaaggagggggattaaaaaaaaaagagagggcacggcgaggcaaacaacgctcgtcggggaaaaactcctagtcggatatcggcggaagacccccctgttgcgcggccaaatggggaacacccccacaataataagggagcagagatacaaaactgggcttttaatggtcaccccggctttcgcgcgcaaaaatgtgtcccgcgtatttttataagcgtgccttcactatacaccaggaaacaagaacaagagacgataggatagaccacacaccgatacagatcaaacaccatagaagccaacagtaagcaaagcacattcactactatgctaaacaaacaaaataacgcctcaaatataan

SEQ ID NO: 33374 - DNA, 1181 bp, Homo sapiens
gatccccgttatctccttcttgattgcttggcagagaagtaccagaacacatcactgaagaagagctcaaaacccttatggaatgtgtttctaacacagcaaaaaaaaaatatttaaaatatttatatacgaaggaaaaagtgaaaaaagctaggcaaataaaaaaggaaatgaaagcagcagcaagggaagaagcaaaaaatatcaagctgctagaaaccactgaggaagataaacagaaaaactttctatttttacgactttgggataggaatatggacatagcaatgggctggaagggtgcccaggccatgcagtttggacaacctttggtttttgacatggcttacgaaaattatatgaaacgaaaagaattgcagaatactgtttcccagcttttagaaagtgaaggatggaacagaagaaatgttgatcctttccatatttatttctgcaatctaaaaatagatggtgctttgcacagagagttagttaaacggtatcaagaaaaatgggacaaattgcttttaacatcaacagaaaagtctcatgtagatttatttccaaaggacagtattatctatttaactgcagattctcccaatgttatgactactttcaggcatgacaaagtttatgtaattgggtcttttgttgataagagtatgcagccaggcacatccctagccaaggcaaaacggctgaacctggcaactgaatgccttccattagataaatatttacaatgggaaattggtaacaaaaatctcaccttagatcaaatgatacgtattttgttatgtctgaaaaacaatggtaattggcaagaggctctgcaattcgttcccaagagaaaacatactggttttctggagatttctcagcattctcaagagtttatcaacagactaaagaaggcaaagacttaattcattttcaaaaggttctctgaatgtgcacagaacacgtggctcaaatgagaacatttgatggcttaaaaagtaaatgcgttagaaatacagttctgttaatgtatttcttcccaaacaattcatttttctcttctaaaggtagtctttcccaactgactgtagggttgtgtcttttcccaattaaatatctgcagaactttgggattatactttgtttactgtagaaagataataaaaagagttgtccaa

SEQ ID NO: 33375 - DNA, 706 bp, Homo sapiens
ctagtgaccatgcgttggccgccggtatcaagaaaaatgggacaaattgcttttaacatcaacagaaaagtctcatgtagatttatttccaaaggacagtattatctatttaactgcagattctcccaatgttatgactactttcaggcatgacaaagtttatgtaattgggtcttttgttgataagagtatgcagccaggcacatccctagccaaggcaaaacggctgaacctggcaactgaatgccttccattagataaatatttacaatgggaaattggtaacaaaaatctcaccttagatcaaatgatacgtattttgttatgtctgaaaaacaatggtaattggcaagaggctctgcaattcgttcccaagagaaaacatactggttttctggagatttctcagcattctcaagagtttatcaacagactaaagaaggcaaagacttaattcattttcaaaaggttctctgaatgtgcacagaacacgtggctcaaatgagaacatttgatggcttaaaaagtaaatgcgttagaaatacagttctgttaatgtatttcttcccaaacaattcatttttctcttctaaaggtagtctttcccaactgactgtagggttgtgtcttttcccaattaaatatctgcagaactttgggattatactttgtttactgtagaaagataataaaaagagttgtccaa

SEQ ID NO: 33376 - DNA, 377 bp, Homo sapiens
tgtgtttcaaaaattgattttattttgctatttcaaatttatacttgcacaattagttgagaagttataaaaatctttgtctaatttttaattgcatttttcttcttttacaggggttttgttacatggctgctttcctcaaaatgagtgttagtgtcaatttcttcagacctttcaccaggtttttggtgccatttacccttcataggaagagaaataacttaacaattttgcagagatacatgtcttccaaaataccagctgttacttatcctaaaaatgagagtacacccccttctgaagagctagagttggataagtggaaaactaccatgaaatctagtgtgcaagaagaatgtgtttcaacaatctcaagc

SEQ ID NO: 33377 - DNA, 1835 bp, Homo sapiens
cggctgagccccagcgaccgctctggtcggctgtgtagactgttgggtaggctgcgtgctagcttcggcgcggatccctgggcgtccgtacgtcggagtccttcgtcctccagggtccctgttctttgcgccagcgggaaccactatctctgcactcctggggttttgttacatggctgctttcctcaaaatgagtgttagtgtcaatttcttcagacctttcaccaggtttttggtgccatttacccttcataggaagagaaataacttaacaattttgcagagatacatgtcttccaaaataccagctgttacttatcctaaaaatgagagtacacccccttctgaagagctagagttggataagtggaaaactaccatgaaatctagtgtgcaagaagaatgtgtttcaacaatctcaagcagtaaggatgaagatcctctagctgccaccagagagttcattgagatgtggagattgcttggcagagaagtaccagaacacatcactgaagaagagctcaaaacccttatggaatgtgtttctaacacagcaaaaaaaaaatatttaaaatatttatatacgaaggaaaaagtgaaaaaagctaggcaaataaaaaaggaaatgaaagcagcagcaagggaagaagcaaaaaatatcaagctgctagaaaccactgaggaagataaacagaaaaactttctatttttacgactttgggataggaatatggacatagcaatgggctggaagggtgcccaggccatgcagtttggacaacctttggtttttgacatggcttacgaaaattatatgaaacgaaaagaattgcagaatactgtttcccagcttttagaaagtgaaggatggaacagaagaaatgttgatcctttccatatttatttctgcaatctaaaaatagatggtgctttgcacagagagttagttaaacggtatcaagaaaaatgggacaaattgcttttaacatcaacagaaaagtctcatgtagatttatttccaaaggacagtattatctatttaactgcagattctcccaatgttatgactactttcaggcatgacaaagtttatgtaattgggtcttttgttgataagagtatgcagccaggcacatccctagccaaggcaaaacggctgaacctggcaactgaatgccttccattagataaatatttacaatgggaaattggtaacaaaaatctcaccttagatcaaatgatacgtattttgttatgtctgaaaaacaatggtaattggcaagaggctctgcaattcgttcccaagagaaaacatactggttttctggagatttctcagcattctcaagagtttatcaacagactaaagaaggcaaagacttaattcattttcaaaaggttctctgaatgtgcacagaacacgtggctcaaatgagaacatttgatggcttaaaaagtaaatgcgttagaaatacagttctgttaatgtatttcttcccaaacaattcatttttctcttctaaaggtagtctttcccaactgactgtagggttgtgtcttttcccaattaaatatctgcagaactttgggattatactttgtttactgtagaaagataataaaaagagttgtccaagattgttgaacagaataatctttatcccagttaaatagttgtaccattggtagacttttttatggaggttcctagagggtggtgccctggggtgggcttggaagctctgcaccccttcccccatagctttccccgtgcatctctttgtctgtatgttttgtaatatcttttacagtaaactggtaaatgtgtttccttc

SEQ ID NO: 33378 - DNA, 1582 bp, Homo sapiens
cggctgagccccagcgaccgctctggtcggctgtgtagactgttgggtaggctgcgtgctagcttcggcgcggatccctgggcgtccgtacgtcggagtccttcgtcctccagggtccctgttctttgcgccagcgggaaccactatctctgcactcctggggttttgttacatggctgctttcctcaaaatgagtgttagtgtcaatttcttcagacctttcaccaggtttttggtgccatttacccttcataggaagagaaataacttaacaattttgcagagatacatgtcttccaaaataccagctgttacttatcctaaaaatgagagtacacccccttctgaagagctagagttggataagtggagtaaggatgaagatcctctagctgccaccagagagttcattgagatgtggagattgcttggcagagaagtaccagaacacatcactgaagaagagctcaaaacccttatggaatgtgtttctaacacagcaaaaaaaaaatatttaaaatatttatatacgaaggaaaaagtgaaaaaagctaggcaaataaaaaaggaaatgaaagcagcagcaagggaagaagcaaaaaatatcaagctgctagaaaccactgaggaagataaacagaaaaactttctatttttacgactttgggataggaatatggacatagcaatgggctggaagggtgcccaggccatgcagtttggacaacctttggtttttgacatggcttacgaaaattatatgaaacgaaaagaattgcagaatactgtttcccagcttttagaaagtgaaggatggaacagaagaaatgttgatcctttccatatttatttctgcaatctaaaaatagatggtgctttgcacagagagttagttaaacggtatcaagaaaaatgggacaaattgcttttaacatcaacagaaaagtctcatgtagatttatttccaaaggacagtattatctatttaactgcagattctcccaatgttatgactactttcaggcatgacaaagtttatgtaattgggtcttttgttgataagagtatgcagccaggcacatccctagccaaggcaaaacggctgaacctggcaactgaatgccttccattagataaatatttacaatgggaaattggtaacaaaaatctcaccttagatcaaatgatacgtattttgttatgtctgaaaaacaatggtaattggcaagaggctctgcaattcgttcccaagagaaaacatactggttttctggagatttctcagcattctcaagagtttatcaacagactaaagaaggcaaagacttaattcattttcaaaaggttctctgaatgtgcacagaacacgtggctcaaatgagaacatttgatggcttaaaaagtaaatgcgttagaaatacagttctgttaatgtatttcttcccaaacaattcatttttctcttctaaaggtagtctttcccaactgactgtagggttgtgtcttttcccaattaaatatctgcagaactttgggattatactttgtttactgtagaaagataataaaaagagttgtccaa

SEQ ID NO: 33379 - DNA, 324 bp, Homo sapiens
acccaccatcttatgaagtggaagattaagcacacttctctcaattattgatatgtcgagcaggtgaatagtaaagaatggaagattaaacaataccatttacatgcctgataaatagacatatactatccatacttagcaaaaaagcattcttctcaagcacttttgtgaaaattgactacatactagtccaagaagtaatatcaacaaatttcaaaagtaacgtgagcaccagggcctagctttgctcccttcaatttccgcttcagcctccccagcatcccccatcttcccgcctctaggctttagtcacttgcccgctta

SEQ ID NO: 33380 - DNA, 2670 bp, Homo sapiens
tgtggtggtatgcgcctgtagtcccagctactttggaggctgaggtgggagtattgcttgagccaaggaggtcgaggctacagtgagctgtgattgagccactgcactccaatctgtgtgacagagcaagaccctgtctcaaaataataataataaaatcaaaaagagtgttaagggggtctccacttaaggagtagagagtccggggcagttctcgtatctctgtccttgtctcattttagatgtttagatatttagatattatacaaggccacccagtggtaaccaacctagaatgtgttggcctcctcttcccctcactccgtgtaggttctgtgcagcctggctgctggtggcatctcttatcatgggacattggtggggacccagccgtgcccttggtgccaagaagcctaaagggctcctgtcgcctggaaacttgagagtgcagggtcgggtgctgtgccccacaaggtgctgagcaagcccaagaagaagagtgtggggtgtggtgtgtgagttcagacctcttggagctgtgggggcatggttcccatcagctgctgttcctctgatgatgcccactgcgtgttgtgggaggcgtggccaccgtgtgatgttgtagtaggagaagggagacttaggagctagacatgatacgcaggcatcaagaggtcaaccaggtgtccacaatctgtgagccacacagagctctctttgtgcatatgcatcccaagcttcaggaaggcaacagctactagagggcctgaggacagattcttggtcgcagaagcggcattggctttagttcagccctcaccatgtttaccaacgtcacttctgtgttcccctcatgggtctcccagctcccagtctccatgccacctccacgctgagaccagaccagttttccccacacacaaatccaagcctgtcactcccctgcttgaaatccttccctgtctccctgtggccttggggtagggcctctctgctctgccacctctccagactttttgtgtgccaccgcccactcacacccacctctcaggctccaaacatgttctcttgcgtcagctcatcccttacactcgctgcttcctctgcctggccagcctcccaccttccgatctcccactcaccttttttgcctcctcatcttttgaggtctcagctcagtgtcacttcctcccgggagcctcgcctgtctcttccactccagcttggtcagtgagcagagaggcttgtgtgcttttctgtcgctgtacccataagtgtcatctgcatgtgagcatgagggccggcccattgtacccctaacaggggaggatgctcagcacttcctggatgtcgaatacctgagcgataaacaactaatgttcaggaagtgctttccaggtggcaaaaggtgtttcctctactttgaagcaagaatcttcaccaatatacatgctattttattaccccaatttactgatgaggaaactaagcttctgagacttcaagcgattttccaaggtcatgtagggatacacaagttccagcatgtgattgtggtaaaggttgtgtgtgacacatgagtgcaaccagagatgtgtataaagattgttactgggccgggcgcggtggctcacacctgtaatcccagcactttgggaggccgaggcaggtggatcacgaggtcaggagattgagaccatcctggctaacacggtgaaaccccgtctgtactaaaaatacaaaaaattagccaggcgtggcatgcgcctatagtcccagctactcgggaggctgaggcaggagaatggtgtgaacccgggaggcggagcttgcagggagccaagattgtgccactgcgctccagcctgggcgacagagcgagactccatcttaaaaaaaataataaaaggattgttattgatgaccgggtgcggtggctcatgcctgtaatcccaacactttgggaggctgaggtgggcagatcacctgaggtcaggagtttgagaccatgctggccaacatggtgaaaccctgtctctactacagatagaaaaattagctgggcatggtggtgcgcacctgtaatcccagctacttgggaggctgaggcaggagaattgcttaaacccaggaggcggaggttgcagtgagcccagatggcaccactgcactccagcctgggtgacagagcgagactcagtgccccccaaaaaaagatttttattgctgcattctctgaaatagcaaggaattaaaaactgcctgtagatacagcaattaaagtgaactccatccgcatgtaccaatatagacgaagtcctaaaaacataataactaagtgaaatgtacattgtgaaaggatagctacagtgagatacctgtacttggaaactgtaaaaacccaaaataatgctaaatgctcaggaagagacagagacacaccagcttcaaggatagtggtggcctgtggtgataggtggaagggaatgggatggggtgatggggtttttagccatatctgtatttgtattttactataaaaatacttgacataaacatgacaaaatatgaacccctggtaaatctgggcaatgagttccccaatgtctactatattattttctacctttttctgtttttcaaatagttccataattaaacatttaaaaa

SEQ ID NO: 33381 - DNA, 400 bp, Homo sapiens
aatgttgctttacataaatattctgatgcaattctaattactgattatttgcacatgacctacttttttctctctggaatattttagattcttgggtatctgataatctggaatttcatggtaagatgccttgttgtgaacctttttttattttttatttttattttttgagataagttcttgctctgtcacctaggctggagtgcagtgatgtaatcacagcttgctgcagtcttgacctcttgggctcaagtgatccttctgcctcagcctcccaagtagctgagaccgcaagcacgcaccaccacacacagctgattttttaaacttttggtccattccaagatggccgaataagaacagctctggtctgcagctcccagcgtgattgacgcagaag

SEQ ID NO: 33382 - DNA, 305 bp, Homo sapiens
gggtgacgccatgtgcttgtccctgaaaatgtgttaactctggggatgtcatcatcccatgaggccaatcacagatcattcctcccactctccttttgctttgccccaaaccatatgttccctcatgacacacctacgcttccccaccctgaccccctgccatctcctcccaccaaaagcatgttctaaatattagctttttttttccccacaagagaaaagcattgcactagtttctctacatcattttatgaaacccttacagaaatcctaaaagataggcattcttatccctattttcagaa

SEQ ID NO: 33383 - DNA, 147 bp, Homo sapiens
tagtgtgctgctctaacagaggggctttgtgctacagcttcttccagagctccacagatgcatgctgggcgggctcagtcagctttacccctaatacacttgcttcttcctaacaatagcagagcaagactgacaacaataattaaa

SEQ ID NO: 33384 - DNA, 344 bp, Homo sapiens
tcaaacttctctcattcctctaaatgtacaaaggtttcaaagttgtaaaaaatatgtctacatagccaatgctcttagtatttttaacagcaaagataatctctgccaataattattaatgacaaaatagtgataactgttcaatgttgctttaacagtccaattgtagtaggtgagaaaacaaaaaagaagagaagctatgttgaatatttagtaatgttgggaaaagatcctcaccctaggacataaaatagtttaaacattttaaacatgggcccctctcttattgtcattgctagtggaaggagttcctgaaattgcatattacattgtaaagttttggg

SEQ ID NO: 33385 - DNA, 342 bp, Homo sapiens
tttttgagacagaattttgctcctgttgcccaggcgggagtgcaatggcgcaatctcggctcaccgtaacctctgcctcctgggttcaagcgattctcttacctcggcctcccaaatagctgggactacaggtgtgcgcccactacgcctggctaattttgtatttttagtagaaacggggtttcaccatgttggtcaggctggtctcgaactcctgacctcaggtgatccgcccacatgggcctcccatgaatttttacctataaaatgaaatcaaagaaaggtacagcagggagaaaccagctggctctgtgtgatataatcccatgagaaacaacatac

SEQ ID NO: 33386 - DNA, 333 bp, Homo sapiens
taaaaaacacacaaccatttacatgaacaccaaaattttgaaaacttaggtatggattgaaagtataagatctgtatgaggaagattacaaagctctgatgaaaaaaaattacagaaataaatacggaaatattttgtgttcatggatagggaaatgtattctttatcttaattgctgattagtactaagtacaattaagatcagtaaacatcttgtgtactattaagatgtcagttttcttccaacttgatctatagtttcaatgcactacaaatcaaaccactagcaaattagtttgtggatatcaacaaattgattctaaaagtatagga

SEQ ID NO: 33387 - DNA, 329 bp, Homo sapiens
atgacaactaaagttgtggaggaagtgcagcaacataaactcttaatatactggtagtgtataagattttcaaccattttggaaaagtatctggtagtttcctacaaagcaccataatgcagctaggtatttactaaagagtgaaaatacatgtttacaaaactacttgtacaaggatatttagaaagctttataggtaagagtcaaagactagaaactaccaagtgttcattaatagaataattgatttaaaaattatagtatattcataaaacgcaatgcaataatacattcagtaataaaatcaacaatgatcaagactctatctc

SEQ ID NO: 33388 - DNA, 396 bp, Homo sapiens
cctccctgcagctctgagtggcaacgagcaggaaaagcagctcacagagcagcctccaggcaccaagaccgtgaggccacatcgcctccagggagcaggtcccacagcacccctaccccagggcaccaggactgggttattccgggatttcgcagtgctgagaactttggagaacaaaatccccggcagctgcctgaacgctgaacggaggtggcgcgatccgcctgatgaatcaggctaattacacagaagccacacaggttttgcttcctccaggaaaactgctttccctctttaatattcactatcctcttctcacagcctgtaagcctcgctcaaattagggtgcagctgcaacccaaacccaaaataaaatgcccaagcacgcgacaggga

SEQ ID NO: 33389 - DNA, 677 bp, Homo sapiens
aaatcatgataatggttccctgtttatgaggttgtcataggagcctacaaagttgtatgtgcaatggcactgtgtgatgtataaaacagtaacatggaaatgcaaggtgatgtaactggtataatcactgaaataccattgtttcagtgtctgttgtcttttctctggtgctgcaatgtgtggtggctacgaggaaaaaggaagatttgaacttgtgccagtcacaatttttgtgttggcccttcacttagaaatttatttgcaaatgcttcctcaagtaggaaggccatgatgagagagaccatgcctaatccttcagcttagacgtgacacagacatgtaacttcattttaaaaatgtctctgctggtaatatgacttcaaatttaaaataagtccttttggccaggtatggtggctcacacctgtaatcccaacactttgggaggccaagcagggagaatttcttgaggtcaggagtttgtgatcagcctgggcaagaccccatctctacaagaaataaaaaatcagtcaggtatggtgttgcatgccaatagtcccagtcactcaggaggttgaggtaggaggattgtttgagtttgggaggtcgaggctgtagtgagctatgatcacaccactgcactccagcctgggcaacagaatgagaccctgtcttta

SEQ ID NO: 33390 - DNA, 802 bp, Homo sapiens
cttaaaacttaaccttttaactcactggttaaaggaatccttctgtcttaaaactgcaaactttagatggagaaagttcattaaaacattcagtgtatcttgagaaatttaaggagtttagacttttaacatcttgtgccaagttctttaatttctcccttgagaaagtcagatgaaatgtattcagagttggagttacaaaatagttaatgtgtctaaatgatgtgttgtccttagactaattatctctaatatattggtgttctgtaattttctttcaattgtgaagtatctacaggctgttgacaatcagctaaagaaaaaagcaagactgtttaaagacagtaacagggccaggcgcggtggctcacgtctgtaatcccagtactttgggaggccgaggtgggcaaatcacctgaggtcaggagttcaagaccagcctaggcaacatggtgaaaccctttctctattaaaaatacaaataggccgggcttggtggctcatgcctgtaatcccagcactttgggaggccgagacaggcggatcacgaggtcaggagatcgagaccatggtgaaaccttgtctctactaaaaatacaaaaaaaattagctgggtgcggtggtgggtgcctatagtacaggtcgacgcggccgcgaaattatatagtaggcgacccggaaattcggaccggaccctgcagggtcccactttcctataggaggcgtttaaaactcggggaaacatgggaaaacggttcccgggggaaaggttaccgttcacaatccaccaatttggaggggt

SEQ ID NO: 33391 - DNA, 277 bp, Homo sapiens
gtggctcacacttataatctcagcactttgggagtctaaggcaggaggatcacttgagcccaggagttcgagaccagcctgggcaacatagcaaggcccaatctctgtaaaaaaaattgtaaccagctgggcatggtggtgtgcatctatagtcccaccctactcaggaggctaaagcaagaggatctcttgagcccaggagtttgattctgcagtgagttatgattgcaccactgcactctagcctgggtgacagaacaagaccttgtctcaaaaa

SEQ ID NO: 33392 - DNA, 515 bp, Homo sapiens
agtgactctgtaggatccttttactgttatcgcccaacactgagaccccaaaccacctatccccagtagatggccctgccaagaccagcacccagcaagattatagaggaagaaatcctaaatgctggtgtgggaggtctaaaacatggggagagtttttggatctggagttgagagccatgggtttggacatgactggcacaaacagctgtcatatgttcatggtcagatgtcatacattctcagctgtcttgttccaccagtatttaccaggaaaacaaagaatgtgttaagggatgctcccccaccccacatcttaagtcagtgtgccaagtactgagatgattttagggacattttattttaaattaaatttacaatctaatggtaaattgattacctaattagtgcctttctctttcatcacttgttctggatgtttcaatcagtttagtggaaggaaaaataaatggggaaactttttattcagtgttggggataacatacgggtaccg

SEQ ID NO: 33393 - DNA, 936 bp, Homo sapiens
cgagaagcgtgcggcgaggacagaggtgggctcaacaccaagaggccaccaatgaaaacgtgactttttcacattccccgccccttccgtgtgcacgctccccacgaggggctggttcctgaaaggatgtacagaggatccccaaccgcctgcgaaacccaagccgccgcgtaggagcgtgcgttcgggccctcttctcccacctgttcgactccccatccccaggatgtcaacctcagtccctcaaggccatacctggacccaacgggtgaagaaagacgatgaggaggaggacccgctggaccagctgatctcccgctctggctgtgctgcctcccactttgcagtgcaggagtgcatggcccagcaccaggactggcggcaatgccagccacaggtgcaggcgttcaaggattgcatgagtgaacagcaggcgaggcggcaagaggagctgcagaggaggcaagaacaagccggtgcccaccactgagaccccaaaccacctatccccagtagatggccctgccaagaccagcacccagcaagattatagaggaagaaatcctaaatgctggtgtgggaggtctaaaacatggggagagtttttggatctggagttgagagccatgggtttggacatgactggcacaaacagctgtcatatgttcatggtcagatgtcatacattctcagctgtcttgttccaccagtatttaccaggaaaacaaagaatgtgttaagggatgctcccccaccccacatcttaagtcagtgtgccaagtactgagatgattttagggacattttattttaaattaaatttacaatctaatggtaaattgattacctaattagtgcctttctctttcatcacttgttctggatgtttcaatcagtttagtggaaggaaaaataaatggggaaactttttattca

SEQ ID NO: 33394 - DNA, 862 bp, Homo sapiens
aaccataggctagtacgaggccggtgttatcggccgaggggttcctgaaaggatgtacagaggatccccaaccgcctgcgaaacccaagccgccgcgtaggagcgtgcgttcgggccctcttctcccacctgttcgactccccatccccaggatgtcaacctcagtccctcaaggccatacctggacccaacgggtgaagaaagacgatgaggaggaggacccgctggaccagctgatctcccgctctggctgtgctgcctcccactttgcagtgcaggagtgcatggcccagcaccaggactggcggcaatgccagccacaggtgcaggcgttcaaggattgcatgagtgaacagcaggcgaggcggcaagaggagctgcagaggaggcaagaacaagccggtgcccaccactgagaccccaaaccacctatccccagtagatggccctgccaagaccagcacccagcaagattatagaggaagaaatcctaaatgctggtgtgggaggtctaaaacatggggagagtttttggatctggagttgagagccatgggtttggacatgactggcacaaacagctgtcatatgttcatggtcagatgtcatacattctcagctgtcttgttccaccagtatttaccaggaaaacaaagaatgtgttaagggatgctcccccaccccacatcttaagtcagtgtgccaagtactgagatgattttagggacattttattttaaattaaatttacaatctaatggtaaattgattacctaattagtgcctttctctttcatcacttgttctggatgtttcaatcagtttagtggaaggaaaaataaatggggaaactttttattca

SEQ ID NO: 33395 - DNA, 862 bp, Homo sapiens
agaactagtcggacgcgtgggcgctccccacgaggggctggttcctgaaaggatgtacagaggatccccaaccgcctgcgaaacccaagccgccgcgtaggagcgtgcgttcgggccctcttctcccacctgttcgactccccatccccaggatgtcaacctcagtccctcaaggccatacctggacccaacgggtgaagaaagacgatgaggaggaggacccgctggaccagctgatctcccgctctggctgtgctgcctcccactttgcagtgcaggagtgcatggcccagcaccaggactggcggcaatgccagccacaggtgcaggcgttcaaggattgcatgagtgaacagcaggcgaggcggcaagaggagctgcagaggaggcaagaacaagccggtgcccaccactgagaccccaaaccacctatccccagtagatggccctgccaagaccagcacccagcaagattatagaggaagaaatcctaaatgctggtgtgggaggtctaaaacatggggagagtttttggatctggagttgagagccatgggtttggacatgactggcacaaacagctgtcatatgttcatggtcagatgtcatacattctcagctgtcttgttccaccagtatttaccaggaaaacaaagaatgtgttaagggatgctcccccaccccacatcttaagtcagtgtgccaagtactgagatgattttagggacattttattttaaattaaatttacaatctaatggtaaattgattacctaattagtgcctttctctttcatcacttgttctggatgtttcaatcagtttagtggaaggaaaaataaatggggaaactttttattca

SEQ ID NO: 33396 - DNA, 1062 bp, Homo sapiens
cgagaagcgtgcggcgaggacagaggtgggctcaacaccaagaggccaccaatgaaaacgtgactttttcacattccccgccccttccgtgtgcacgctccccacgaggggctggttcctgaaaggatgtacagaggatccccaaccgcctgcgaaacccaagccgccgcgtaggagcgtgcgttcgggccctcttctcccacctgttcgactccccatccccaggatgtcaacctcagtccctcaaggccatacctggacccaacgggtgaagaaagacgatgaggaggaggacccgctggaccagctgatctcccgctctggctgtgctgcctcccactttgcagtgcaggagtgcatggcccagcaccaggactggcggcaatgccagccacaggtgcaggcgttcaaggattgcatgagtgaacagcaggcgaggcggcaagaggagctgcagaggaggcaagaacaagccggtgcccaccactgagaccccaaaccacctatccccagtagatggccctgccaagaccagcacccagcaagattatagaggaagaaatcctaaatgctggtgtgggaggtctaaaacatggggagagtttttggatctggagttgagagccatgggtttggacatgactggcacaaacagctgtcatatgttcatggtcagatgtcatacattctcagctgtcttgttccaccagtatttaccaggaaaacaaagaatgtgttaagggatgctcccccaccccacatcttaagtcagtgtgccaagtactgagatgattttagggacattttattttaaattaaatttacaatctaatggtaaattgattacctaattagtgcctttctctttcatcacttgttctggatgtttcaatcagtttagtggaaggaaaaataaatggggaaactttttattcacacacattatggaggcatgctgagataatagcagaaactaggactgtttgagagaaaggatgtgtgatgaccctaattataccttctttttcagaagaaactgaatgcatagggtgaccatatatt

SEQ ID NO: 33397 - DNA, 1031 bp, Homo sapiens
cgagaagcgtgcggcgaggacagaggtgggctcaacaccaagaggccaccaatgaaaacgtgactttttcacattccccgccccttccgtgtgcacgctccccacgaggggctggttcctgaaaggatgtacagaggatccccaaccgcctgcgaaacccaagccgccgcgtaggagcgtgcgttcgggccctcttctcccacctgttcgcagcctccacgatccagctgccaaccatctagcctaccctgatctctgagcaggggtcgtcgtcattttactccagaggagactgaagccaaaagactccccatccccaggatgtcaacctcagtccctcaaggccatacctggacccaacgggtgaagaaagacgatgaggaggaggacccgctggaccagctgatctcccgctctggctgtgctgcctcccactttgcagtgcaggagtgcatggcccagcaccaggactggcggcaatgccagccacaggtgcaggcgttcaaggattgcatgagtgaacagcaggcgaggcggcaagaggagctgcagaggaggcaagaacaagccggtgcccaccactgagaccccaaaccacctatccccagtagatggccctgccaagaccagcacccagcaagattatagaggaagaaatcctaaatgctggtgtgggaggtctaaaacatggggagagtttttggatctggagttgagagccatgggtttggacatgactggcacaaacagctgtcatatgttcatggtcagatgtcatacattctcagctgtcttgttccaccagtatttaccaggaaaacaaagaatgtgttaagggatgctcccccaccccacatcttaagtcagtgtgccaagtactgagatgattttagggacattttattttaaattaaatttacaatctaatggtaaattgattacctaattagtgcctttctctttcatcacttgttctggatgtttcaatcagtttagtggaaggaaaaataaatggggaaactttttattca

SEQ ID NO: 33398 - DNA, 870 bp, Homo sapiens
ccagcatttttctgctttaagatcctttccatgacttccttgtttaggccagcctccacgatccagctgccaaccatctagcctaccctgatctctgagcaggggtcgtcgtcattttactccagaggagactgaagccaaaagactccccatccccaggatgtcaacctcagtccctcaaggccatacctggacccaacgggtgaagaaagacgatgaggaggaggacccgctggaccagctgatctcccgctctggctgtgctgcctcccactttgcagtgcaggagtgcatggcccagcaccaggactggcggcaatgccagccacaggtgcaggcgttcaaggattgcatgagtgaacagcaggcgaggcggcaagaggagctgcagaggaggcaagaacaagccggtgcccaccactgagaccccaaaccacctatccccagtagatggccctgccaagaccagcacccagcaagattatagaggaagaaatcctaaatgctggtgtgggaggtctaaaacatggggagagtttttggatctggagttgagagccatgggtttggacatgactggcacaaacagctgtcatatgttcatggtcagatgtcatacattctcagctgtcttgttccaccagtatttaccaggaaaacaaagaatgtgttaagggatgctcccccaccccacatcttaagtcagtgtgccaagtactgagatgattttagggacattttattttaaattaaatttacaatctaatggtaaattgattacctaattagtgcctttctctttcatcacttgttctggatgtttcaatcagtttagtggaaggaaaaataaatggggaaactttttattca

SEQ ID NO: 33399 - DNA, 860 bp, Homo sapiens
aaccataggctagtacgaggccggtgttatcggccgaggcagcctccacgatccagctgccaaccatctagcctaccctgatctctgagcaggggtcgtcgtcattttactccagaggagactgaagccaaaagactccccatccccaggatgtcaacctcagtccctcaaggccatacctggacccaacgggtgaagaaagacgatgaggaggaggacccgctggaccagctgatctcccgctctggctgtgctgcctcccactttgcagtgcaggagtgcatggcccagcaccaggactggcggcaatgccagccacaggtgcaggcgttcaaggattgcatgagtgaacagcaggcgaggcggcaagaggagctgcagaggaggcaagaacaagccggtgcccaccactgagaccccaaaccacctatccccagtagatggccctgccaagaccagcacccagcaagattatagaggaagaaatcctaaatgctggtgtgggaggtctaaaacatggggagagtttttggatctggagttgagagccatgggtttggacatgactggcacaaacagctgtcatatgttcatggtcagatgtcatacattctcagctgtcttgttccaccagtatttaccaggaaaacaaagaatgtgttaagggatgctcccccaccccacatcttaagtcagtgtgccaagtactgagatgattttagggacattttattttaaattaaatttacaatctaatggtaaattgattacctaattagtgcctttctctttcatcacttgttctggatgtttcaatcagtttagtggaaggaaaaataaatggggaaactttttattca

SEQ ID NO: 33400 - DNA, 1144 bp, Homo sapiens
cgagaagcgtgcggcgaggacagaggtgggctcaacaccaagaggccaccaatgaaaacgtgactttttcacattccccgccccttccgtgtgcacgctccccacgaggggctggttcctgaaaggatgtacagaggatccccaaccgcctgcgaaacccaagccgccgcgtaggagcgtgcgttcgggccctcttctcccacctgttcgactccccatccccaggatgtcaacctcagtccctcaaggccatacctggacccaacgggtgaagaaagacgatgaggaggaggacccgctggaccagctgatctcccgctctggctgtgctgcctcccactttgcagtgcaggagtgcatggcccagcaccaggactggcggcaatgccagccacaggtgcaggcgttcaaggattgcatgagtgaacagcaggcgaggcggcaagaggagctgcagaggaggcaagaacaagccggtgcccaccactgagaccccaaaccacctatccccagtagatggccctgccaagaccagcacccagcaagattatagaggaagaaatcctaaatgctggtgtgggaggtctaaaacatggggagagtttttggatctggagttgagagccatgggtttggacatgactggcacaaacagctgtcatatgttcatggtcagatgtcatacattctcagctgtcttgttccaccagtatttaccaggaaaacaaagaatgtgttaagggatgctcccccaccccacatcttaagtcagtgtgccaagtactgagatgattttagggacattttattttaaattaaatttacaatctaatggtactggctaacaaataacaaacacccacacacacaaccacacccaccaccaacactcaacacaccaccaccctcaaaccccacaccgccccacacacaacccacccccacatcacccccctcacccccccacccccccacgtacaccgagaggagaaaggtaggaaaagagaaggacgagcccagaggagaggagaagaagggtagcggaacccctcttaacacaggcatataaagcgagaaaaaataacgaggaagcaacgccacacaccggccgcgaacacaataataggtcaacagacatagatac

SEQ ID NO: 33401 - DNA, 1032 bp, Homo sapiens
cgagaagcgtgcggcgaggacagaggtgggctcaacaccaagaggccaccaatgaaaacgtgactttttcacattccccgccccttccgtgtgcacgctccccacgaggggctggttcctgaaaggatgtacagaggatccccaaccgcctgcgaaacccaagccgccgcgtaggagcgtgcgttcgggccctcttctcccacctgttcgactccccatccccaggatgtcaacctcagtccctcaaggccatacctggacccaacgggtgaagaaagacgatgaggaggaggacccgctggaccagctgatctcccgctctggctgtgctgcctcccactttgcagtgcaggagtgcatggcccagcaccaggactggcggcaatgccagccacaggtgcaggcgttcaaggattgcatgagtgaacagcaggcgaggcggcaagaggagctgcagaggaggcaagaacaagccggtgcccaccactgagaccccaaaccacctatccccagtagatggccctgccaagaccagcacccagcaagattatagaggaagaaatcctaaatgctggtgtgggaggtctaaaacatggggagagtttttggatctggagttgagagccatgggtttggacatgactggcacaaacagctgtcatatgttcatggtcagatgtcatacattctcagctgtcttgttccaccagtatttaccaggaaaacaaagaatgtgttaagggatgctcccccaccccacatcttaagtcagtgtgccaagtactgagatgattttagggacattttattttaaattaaatttacaatctaatggtaaaaaaaaaatatcatactaaaagagaagggctaaattttaaaaataatagaaaaaaccctttagggggggcccggttccaaattcgccctatggggagttgtttaacaattaactggccctcgttttacaaacttctggactgggaaaccccgggtgtttcccaacttaaaatgctttgtagaaaatcccccttt

SEQ ID NO: 33402 - DNA, 571 bp, Homo sapiens
cgagaagcgtgcggcgaggacagaggtgggctcaacaccaagaggccaccaatgaaaacgtgactttttcacattccccgccccttccgtgtgcacgctccccacgaggggctggttcctgaaaggatgtacagaggatccccaaccgcctgcgaaacccaagccgccgcgtaggagcgtgcgttcgggccctcttctcccacctgttcgcagcctccacgatccagctgccaaccatctagcctaccctgatctctgagcaggggtcgtcgtcattttactccagaggagactgaagccaaaaggtggtgagaggagagtacagcagcatttactgagtcctatagtagcccaagcgcttttcattcgttatattaatcttcattctaattgtgcgaattaaatattattaatgggaaaactaaaatgaaaaagatacatagtaaggcgtagtgctgggatttgaacacggatctcttggtttaggatcaaggcactttctattccactgttctttctctaaattatttgctcctggccctatttaaagagtatatccagtgtatttagg

SEQ ID NO: 33403 - DNA, 664 bp, Homo sapiens
cgagaagcgtgcggcgaggacagaggtgggctcaacaccaagaggccaccaatgaaaacgtgactttttcacattccccgccccttccgtgtgcacgctccccacgaggggctggttcctgaaaggatgtacagaggatccccaaccgcctgcgaaacccaagccgccgcgtaggagcgtgcgttcgggccctcttctcccacctgttcgcagcctccacgatccagctgccaaccatctagcctaccctgatctctgagcaggggtcgtcgtcattttactccagaggagactgaagccaaaagggtctcccgctgtaacccaggctggaatgcagtggcgtgatcacggctcacagtgttgcccaggctgggcgcaaaccatcctcccgcctcagcctcccagtgttgggattacaggcgtgagccatggcacccggcttcatctctgtgcttccagagaggttattaaatgatgtgtccaagggcaccaaatgaggcagtgacaaagctaggtccaagtctgtttcaaagcccattttctccctcttgcttaagttataccgcctccaaggcaaatgagttgtgtaaagtgcctaactccctcttgtgattccccattgccctcagaataaaaagtcttaaactccctactatgtcctaca

SEQ ID NO: 33404 - DNA, 1131 bp, Homo sapiens
  misc_feature (1131)..(1131): n is a, c, g, or t
cgagaagcgtgcggcgaggacagaggtgggctcaacaccaagaggccaccaatgaaaacgtgactttttcacattccccgccccttccgtgtgcacgctccccacgaggggctggttcctgaaaggatgtacagaggatccccaaccgcctgcgaaacccaagccgccgcgtaggagcgtgcgttcgggccctcttctcccacctgttcgactccccatccccaggatgtcaacctcagtccctcaaggccatacctggacccaacgggtgaagaaagacgatgaggaggaggacccgctggaccagctgatctcccgctctggctgtgctgcctcccactttgcagtgcaggagtgcatggcccagcaccaggactggcggcaatgccagccacaggtgcaggcgttcaaggattgcatgagtgaacagcaggcgaggcggcaagaggagctgcagaggaggcaagaacaagccggtgcccaccactgagaccccaaaccacctatccccagtagatggccctgccaagaccagcacccagcaagattatagaggaagaaatcctaaatgctggtgtgggaggtctaaaacatggggagagtttttggatctggagttgagagccatgggtttggacatgactggcacaaacagctgtcatatgttcatggtcagatgtcatacattctcagctgtcttgttccaccagtatttaccaggaaaacaaagaatgtgttaagggatgctcccccaccccacatcttaagtcagtgtgccaagtactgagatgattttagggacattttattttaaattaaatttacaatctaatggtacacacacaccggtcagcaccgaccgacacacaacaggagagggcgccgctcaaaaaaattccccgcgaggcccaatgagcgctacccgtttctgaacgagggcccagagggcgcgactaaacaggcggggcgcggtgaaggccgagggaacgggcctggaccggcagcccactggggcggcaaggacgcaccgagtgcggaaacacggtcaggcccgcgtccgaagccgttatacgccactggaacgcgcctccctccacacgctgcaccgccacaccagcgccatcgccacgn

SEQ ID NO: 33405 - DNA, 1254 bp, Homo sapiens
caaccagttatttgggagccgaggcagatggatcataaagtcagaagttcagaccagcctggctgggatgatgaaaccccatctctactaaaaatacaaaaattaggcgggcgtgatggcaggcacctgtaatcccagcattttgggtggctaaggcaggaggatcacttgagcccaggagtttgagaccatgctgagcaacatggaaaaaccttgtctctattaaagaatcaaaaaaattagctgagtggtgatgcacacctgtagtcccagctactctggccagggagggactgagggggaaggattgcttgatccctaaagatggaggctacagtgagcctgggcaacaaagcaagacaccctcaaaaaaaaaaaaaaaaaaacaagcatctgtcttcaagcttagagtctcccacgggagacagacacattaaacaggctaaatggtgcagtctggtcagtgctatttataatttaggaaccttacatattatatccctactctaacctgttaatgttctatagactccccatccccaggatgtcaacctcagtccctcaaggccatacctggacccaacgggtgaagaaagacgatgaggaggaggacccgctggaccagctgatctcccgctctggctgtgctgcctcccactttgcagtgcaggagtgcatggcccagcaccaggactggcggcaatgccagccacaggtgcaggcgttcaaggattgcatgagtgaacagcaggcgaggcggcaagaggagctgcagaggaggcaagaacaagccggtgcccaccactgagaccccaaaccacctatccccagtagatggccctgccaagaccagcacccagcaagattatagaggaagaaatcctaaatgctggtgtgggaggtctaaaacatggggagagtttttggatctggagttgagagccatgggtttggacatgactggcacaaacagctgtcatatgttcatggtcagatgtcatacattctcagctgtcttgttccaccagtatttaccaggaaaacaaagaatgtgttaagggatgctcccccaccccacatcttaagtcagtgtgccaagtactgagatgattttagggacattttattttaaattaaatttacaatctaatggtaaattgattacctaattagtgcctttctctttcatcacttgttctggatgtttcaatcagtttagtggaaggaaaaataaatggggaaactttttattca

SEQ ID NO: 33406 - DNA, 1169 bp, Homo sapiens
taatttctcattccatatatattaggaatgtctttccatgtcacatacacttcagtgtttttctcattccattagaaatgttatatgtatatttcttgattgaagaaataaccataaagttatatgctcattgtaaaaatactcaaatccaaacagtgcagaaatgtatagcaaaggaaggaaaaattttactgaattccacccttgagacctaatttagcggtattgctaaatttcatcttcacatttttctgtgcacagactggacatatagatgcattttttcttctgcaaagtggacccatctacggtttggcagttttctttttcccttcctgtattcctgtagtgtggacatcttttcctgtcggtacatgaggctctaaggcatctttcttccagtcctgggaaaaggaacatttggcttgaaggatcctcggaaggagggactgcccctcaggtgtgtacattctcacgaccggcctgatccctgtgctggagaaagaacacgacccccgagtgataaccgtctcctcaggaggaatgttggttcagaaactgaacaccaatgatctccagtccgaaagaacaccatttgatggaactatggtctatgcacaaaacaagaggcagcaagtggttctgacggagcggtgggcccaagggcacccggccatccatttttcttccatgcatcctggctgggccgacaccccaggtgtgaggcaggcgatgccggggttccacgccaggttcggggaccgcctgcgctccgaggcccagggcgcggacaccatgctgtggctggccctctcctctgccgcagccgcacagcccagcggccgcttctttcaagatcggaagccagtttctacacacttgcctctcgctacagcgtcctcctcaccggccgaagaggagaaactcattgaaatcctggaacagctggctcagacatttaaataggccaacccagacacagtgcggtaccagaattgccttagaagataccagaaggtgcggtctagggaccagtgaataagaagaccccacttcaacttcccctcgaagacgttgtgcctcacagcgaggcctacaagggatgggaacttttatttcaaaataaatactaccgaggctgtgatcaggctcacccctcgtgccgaatt

SEQ ID NO: 33407 - DNA, 452 bp, Homo sapiens
cccacactagcctcctaaagcgacacatctctcatcagacgtctgtgaatgcagaccccgctccccacaatgaaataaagttattttctcattcccaaaaaaaaaaaaaaaaaaaacgaaggcggccgcttctttcaagatcggaagccagtttctacacacttgcctctcgctacagcgtcctcctcaccggccgaagaggagaaactcattgaaatcctggaacagctggctcagacatttaaataggccaacccagacacagtgcggtaccagaattgccttagaagataccagaaggtgcggtctagggaccagtgaataagaagaccccacttcaacttcccctcgaagacgttgtgcctcacagcgaggcctacaagggatgggaacttttatttcaaaataaatactaccgaggctgtgatcaggctcacccctcgtgccgaatt

SEQ ID NO: 33408 - DNA, 2504 bp, Homo sapiens
cacggcactgcatcccccaacacgtgtagaaacttagagaatgccagttattaaaataacccttatgataacaccaattcgatgcagaagtcttttaaatatcataagcctcgtcgttttattccacatggttttctaggtaaccaaattctaggaggtgcgttgcagggccatcttcgcatcccggccatgcccagcaggacggtgttctctaaacggcgctgatgcccgatttcgaccccgaggagactgcggacctcgactgcggcccccaccagggccggtccgccctcactccaccctctgaggctggggcggagtcgaccggccggccccgagaccccttgccttaccggtggagcaaggaaccggaagccgcggctcttacataaccgggatgatgtcagggcgggcgactcccggggggcgggaccagggcggaggccgcgccgggagcgcggtggggctaggcgtggggcgctcccggcatgtccctgtaccgcagcgtcgtgtggttcgccaaggggctgcgcgagtacaccaagagtggctatgaatctgcatgtaaagactttgtccctcatgacttggaggtccagattcctggaagagtctttttggtcactggaggaaacagcggcattggcaaagcaactgcccttgaaatcgccaagcgaggtggcacagttcacctggtttgtcgagatcaagccccagcagaagatgccaggggtgagatcatccgggagagcggtaaccagaacatttttctgcacattgtggacttgtctgatcccaagcaaatctggaaatttgttgaaaatttcaagcaggaacataaactccatgttctgatcaataatgcaggttgcatggtcaataaaagagagctcacagaagatggacttgaaaaaaactttgctgccaatactctgggtgtgtacattctcacgaccggcctgatccctgtgctggagaaagaacacgacccccgagtgataaccgtctcctcaggaggaatgttggttcagaaactgaacaccaatgatctccagtccgaaagaacaccatttgatggaactatggtctatgcacaaaacaagaggcagcaagtggttctgacggagcggtgggcccaagggcacccggccatccatttttcttccatgcatcctggctgggccgacaccccaggtgtgaggcaggcgatgccggggttccacgccaggttcggggaccgcctgcgctccgaggcccagggcgcggacaccatgctgtggctggccctctcctctgccgcagccgcacagcccagcggccgcttctttcaaggtgacttcctccctggctgtgaaggcagctgacacagggctaggggcagcagctgggccttcgaggcgcaccttcccctccgtgaaacctggggtgggactgtcccctggggggtgcctgggcttctttggcgagatgattgctttgcctgctgaggttagttttgggaagcgcttcactccaggttggtagcttctttggagacttgtgataaccctgtcatcaaggtcctgtgagaacgggagaggcagttcctaccttgggaatggaagattttctctgcagtttgctgaggcccaggaggggcgctattcaaagctgcactgcaaagggagtaacggactctgcttctctgcagtgcaaagggtgtaagggactctgcttctctatttttggaagcagtgatctgttcacgtctctccccagtgggctcctaagggggcaggcgtgtgagtggacgccatccgaagacagcacttgacctcgggtggaagccaggctctttgcttggcttctctttcctctgttcttgatgagaaccacccttgcttgaggaattctgaagcgctggtgacccctggggtatccgggaggatggccgcaccccttcctgctgatcacccaaacgtggtctcccgtccagccctggctgcagcctcccagttcccaaactgcactttacatatcaatccatgctgcctgatccctgtgggacctttgacagcagggatgggggtctaacagctgtagggtgctgccactccagcaggcgtcggttcaaggcctgagcagcacagggacatggacccagccacgctgcagcagctcacacctctctgcggttccctctcacttttagatcggaagccagtttctacacacttgcctctcgctacagcgtcctcctcaccggccgaagaggagaaactcattgaaatcctggaacagctggctcagacatttaaataggccaacccagacacagtgcggtaccagaattgccttagaagataccagaaggtgcggtctagggaccagtgaataagaagaccccacttcaacttcccctcgaagacgttgtgcctcacagcgaggcctacaagggatgggaacttttatttcaaaataaatactaccgaggctgtgatcaggctcacccctcgtgccgaatt

SEQ ID NO: 33409 - DNA, 2171 bp, Homo sapiens
agcggggtgtcgaatggcgctcccgcgaatctttccaggctcagtctgaggggcgcgcggagactgtctcttggaaccgaacgcctcgagttgcttgcgccaggggaggacgtcgccccagaagtctcagctctacagaacgtggttattggagattcgtggtcgatagtgatgaggtacttgtgatacacaatcgatgcatctctgtggagagatcgctcgattttcgcatcgtggagatgaagacttcttgtagcagaggtacagctgtgatgagaccacacgtctggcgattgtgtggcaggttgtcatctcgcctatttgattactcagacaagcagtagcgtggcacagttcacctggtttgtcgagatcaagccccagcagaagatgccaggggtgagatcatccgggagagcggtaaccagaacatttttctgcacattgtggacttgtctgatcccaagcaaatctggaaatttgttgaaaatttcaagcaggaacataaactccatgttctgatcaataatgcaggttgcatggtcaataaaagagagctcacagaagatggacttgaaaaaaactttgctgccaatactctgggtgtgtacattctcacgaccggcctgatccctgtgctggagaaagaacacgacccccgagtgataaccgtctcctcaggaggaatgttggttcagaaactgaacaccaatgatctccagtccgaaagaacaccatttgatggaactatggtctatgcacaaaacaagaggcagcaagtggttctgacggagcggtgggcccaagggcacccggccatccatttttcttccatgcatcctggctgggccgacaccccaggtgtgaggcaggcgatgccggggttccacgccaggttcggggaccgcctgcgctccgaggcccagggcgcggacaccatgctgtggctggccctctcctctgccgcagccgcacagcccagcggccgcttctttcaaggtgacttcctccctggctgtgaaggcagctgacacagggctaggggcagcagctgggccttcgaggcgcaccttcccctccgtgaaacctggggtgggactgtcccctggggggtgcctgggcttctttggcgagatgattgctttgcctgctgaggttagttttgggaagcgcttcactccaggttggtagcttctttggagacttgtgataaccctgtcatcaaggtcctgtgagaacgggagaggcagttcctaccttgggaatggaagattttctctgcagtttgctgaggcccaggaggggcgctattcaaagctgcactgcaaagggagtaacggactctgcttctctgcagtgcaaagggtgtaagggactctgcttctctatttttggaagcagtgatctgttcacgtctctccccagtgggctcctaagggggcaggcgtgtgagtggacgccatccgaagacagcacttgacctcgggtggaagccaggctctttgcttggcttctctttcctctgttcttgatgagaaccacccttgcttgaggaattctgaagcgctggtgacccctggggtatccgggaggatggccgcaccccttcctgctgatcacccaaacgtggtctcccgtccagccctggctgcagcctcccagttcccaaactgcactttacatatcaatccatgctgcctgatccctgtgggacctttgacagcagggatgggggtctaacagctgtagggtgctgccactccagcaggcgtcggttcaaggcctgagcagcacagggacatggacccagccacgctgcagcagctcacacctctctgcggttccctctcacttttagatcggaagccagtttctacacacttgcctctcgctacagcgtcctcctcaccggccgaagaggagaaactcattgaaatcctggaacagctggctcagacatttaaataggccaacccagacacagtgcggtaccagaattgccttagaagataccagaaggtgcggtctagggaccagtgaataagaagaccccacttcaacttcccctcgaagacgttgtgcctcacagcgaggcctacaagggatgggaacttttatttcaaaataaatactaccgaggctgtgatcaggctcacccctcgtgccgaatt

SEQ ID NO: 33410 - DNA, 2736 bp, Homo sapiens
cacggcactgcatcccccaacacgtgtagaaacttagagaatgccagttattaaaataacccttatgataacaccaattcgatgcagaagtcttttaaatatcataagcctcgtcgttttattccacatggttttctaggtaaccaaattctaggaggtgcgttgcagggccatcttcgcatcccggccatgcccagcaggacggtgttctctaaacggcgctgatgcccgatttcgaccccgaggagactgcggacctcgactgcggcccccaccagggccggtccgccctcactccaccctctgaggctggggcggagtcgaccggccggccccgagaccccttgccttaccggtggagcaaggaaccggaagccgcggctcttacataaccgggatgatgtcagggcgggcgactcccggggggcgggaccagggcggaggccgcgccgggagcgcggtggggctaggcgtggggcgctcccggcatgtccctgtaccgcagcgtcgtgtggttcgccaaggggctgcgcgagtacaccaagagtggctatgaatctgcatgtaaagactttgtccctcatgacttggaggtccagattcctggaagagtctttttggtcactggaggaaacagcggcattggcaaagcaactgcccttgaaatcgccaagcgaggtggcacagttcacctggtttgtcgagatcaagccccagcagaagatgccaggggtgagatcatccgggagagcggtaaccagaacatttttctgcacattgtggacttgtctgatcccaagcaaatctggaaatttgttgaaaatttcaagcaggaacataaactccatgttctgatcaataatgcaggttgcatggtcaataaaagagagctcacagaagatggacttgaaaaaaactttgctgccaatactctggtgtggacatcttttcctgtcggtacatgaggctctaaggcatctttcttccagtcctgggaaaaggaacatttggcttgaaggatcctcggaaggagggactgcccctcaggtggccacttgccctcttgtggggggcgggtgcgggcagacagtccccacatcagtcctgcaggaccccttgagttggggcttcctgcagccccctcatgggatgctgtgtgctgcctcaggtgtgtacattctcacgaccggcctgatccctgtgctggagaaagaacacgacccccgagtgataaccgtctcctcaggaggaatgttggttcagaaactgaacaccaatgatctccagtccgaaagaacaccatttgatggaactatggtctatgcacaaaacaagaggcagcaagtggttctgacggagcggtgggcccaagggcacccggccatccatttttcttccatgcatcctggctgggccgacaccccaggtgtgaggcaggcgatgccggggttccacgccaggttcggggaccgcctgcgctccgaggcccagggcgcggacaccatgctgtggctggccctctcctctgccgcagccgcacagcccagcggccgcttctttcaaggtgacttcctccctggctgtgaaggcagctgacacagggctaggggcagcagctgggccttcgaggcgcaccttcccctccgtgaaacctggggtgggactgtcccctggggggtgcctgggcttctttggcgagatgattgctttgcctgctgaggttagttttgggaagcgcttcactccaggttggtagcttctttggagacttgtgataaccctgtcatcaaggtcctgtgagaacgggagaggcagttcctaccttgggaatggaagattttctctgcagtttgctgaggcccaggaggggcgctattcaaagctgcactgcaaagggagtaacggactctgcttctctgcagtgcaaagggtgtaagggactctgcttctctatttttggaagcagtgatctgttcacgtctctccccagtgggctcctaagggggcaggcgtgtgagtggacgccatccgaagacagcacttgacctcgggtggaagccaggctctttgcttggcttctctttcctctgttcttgatgagaaccacccttgcttgaggaattctgaagcgctggtgacccctggggtatccgggaggatggccgcaccccttcctgctgatcacccaaacgtggtctcccgtccagccctggctgcagcctcccagttcccaaactgcactttacatatcaatccatgctgcctgatccctgtgggacctttgacagcagggatgggggtctaacagctgtagggtgctgccactccagcaggcgtcggttcaaggcctgagcagcacagggacatggacccagccacgctgcagcagctcacacctctctgcggttccctctcacttttagatcggaagccagtttctacacacttgcctctcgctacagcgtcctcctcaccggccgaagaggagaaactcattgaaatcctggaacagctggctcagacatttaaataggccaacccagacacagtgcggtaccagaattgccttagaagataccagaaggtgcggtctagggaccagtgaataagaagaccccacttcaacttcccctcgaagacgttgtgcctcacagcgaggcctacaagggatgggaacttttatttcaaaataaatactaccgaggctgtgatcaggctcacccctcgtgccgaatt

SEQ ID NO: 33411 - DNA, 2615 bp, Homo sapiens
cacggcactgcatcccccaacacgtgtagaaacttagagaatgccagttattaaaataacccttatgataacaccaattcgatgcagaagtcttttaaatatcataagcctcgtcgttttattccacatggttttctaggtaaccaaattctaggaggtgcgttgcagggccatcttcgcatcccggccatgcccagcaggacggtgttctctaaacggcgctgatgcccgatttcgaccccgaggagactgcggacctcgactgcggcccccaccagggccggtccgccctcactccaccctctgaggctggggcggagtcgaccggccggccccgagaccccttgccttaccggtggagcaaggaaccggaagccgcggctcttacataaccgggatgatgtcagggcgggcgactcccggggggcgggaccagggcggaggccgcgccgggagcgcggtggggctaggcgtggggcgctcccggcatgtccctgtaccgcagcgtcgtgtggttcgccaaggggctgcgcgagtacaccaagagtggctatgaatctgcatgtaaagactttgtccctcatgacttggaggtccagattcctggaagagtctttttggtcactggaggaaacagcggcattggcaaagcaactgcccttgaaatcgccaagcgaggtggcacagttcacctggtttgtcgagatcaagccccagcagaagatgccaggggtgagatcatccgggagagcggtaaccagaacatttttctgcacattgtggacttgtctgatcccaagcaaatctggaaatttgttgaaaatttcaagcaggaacataaactccatgttctgatcaataatgcaggttgcatggtcaataaaagagagctcacagaagatggacttgaaaaaaactttgctgccaatactctggtgtggacatcttttcctgtcggtacatgaggctctaaggcatctttcttccagtcctgggaaaaggaacatttggcttgaaggatcctcggaaggagggactgcccctcaggtgtgtacattctcacgaccggcctgatccctgtgctggagaaagaacacgacccccgagtgataaccgtctcctcaggaggaatgttggttcagaaactgaacaccaatgatctccagtccgaaagaacaccatttgatggaactatggtctatgcacaaaacaagaggcagcaagtggttctgacggagcggtgggcccaagggcacccggccatccatttttcttccatgcatcctggctgggccgacaccccaggtgtgaggcaggcgatgccggggttccacgccaggttcggggaccgcctgcgctccgaggcccagggcgcggacaccatgctgtggctggccctctcctctgccgcagccgcacagcccagcggccgcttctttcaaggtgacttcctccctggctgtgaaggcagctgacacagggctaggggcagcagctgggccttcgaggcgcaccttcccctccgtgaaacctggggtgggactgtcccctggggggtgcctgggcttctttggcgagatgattgctttgcctgctgaggttagttttgggaagcgcttcactccaggttggtagcttctttggagacttgtgataaccctgtcatcaaggtcctgtgagaacgggagaggcagttcctaccttgggaatggaagattttctctgcagtttgctgaggcccaggaggggcgctattcaaagctgcactgcaaagggagtaacggactctgcttctctgcagtgcaaagggtgtaagggactctgcttctctatttttggaagcagtgatctgttcacgtctctccccagtgggctcctaagggggcaggcgtgtgagtggacgccatccgaagacagcacttgacctcgggtggaagccaggctctttgcttggcttctctttcctctgttcttgatgagaaccacccttgcttgaggaattctgaagcgctggtgacccctggggtatccgggaggatggccgcaccccttcctgctgatcacccaaacgtggtctcccgtccagccctggctgcagcctcccagttcccaaactgcactttacatatcaatccatgctgcctgatccctgtgggacctttgacagcagggatgggggtctaacagctgtagggtgctgccactccagcaggcgtcggttcaaggcctgagcagcacagggacatggacccagccacgctgcagcagctcacacctctctgcggttccctctcacttttagatcggaagccagtttctacacacttgcctctcgctacagcgtcctcctcaccggccgaagaggagaaactcattgaaatcctggaacagctggctcagacatttaaataggccaacccagacacagtgcggtaccagaattgccttagaagataccagaaggtgcggtctagggaccagtgaataagaagaccccacttcaacttcccctcgaagacgttgtgcctcacagcgaggcctacaagggatgggaacttttatttcaaaataaatactaccgaggctgtgatcaggctcacccctcgtgccgaatt

SEQ ID NO: 33412 - DNA, 2475 bp, Homo sapiens
cacggcactgcatcccccaacacgtgtagaaacttagagaatgccagttattaaaataacccttatgataacaccaattcgatgcagaagtcttttaaatatcataagcctcgtcgttttattccacatggttttctaggtaaccaaattctaggaggtgcgttgcagggccatcttcgcatcccggccatgcccagcaggacggtgttctctaaacggcgctgatgcccgatttcgaccccgaggagactgcggacctcgactgcggcccccaccagggccggtccgccctcactccaccctctgaggctggggcggagtcgaccggccggccccgagaccccttgccttaccggtggagcaaggaaccggaagccgcggctcttacataaccgggatgatgtcagggcgggcgactcccggggggcgggaccagggcggaggccgcgccgggagcgcggtggggctaggcgtggggcgctcccggcatgtccctgtaccgcagcgtcgtgtggttcgccaaggggctgcgcgagtacaccaagagtggctatgaatctgcatgtaaagactttgtccctcatgacttggaggtccagattcctggaagagtctttttggtcactggaggaaacagcggcattggcaaagcaactgcccttgaaatcgccaagcgaggtggcacagttcacctggtttgtcgagatcaagccccagcagaagatgccaggggtgagatcatccgggagagcggtaaccagaacatttttctgcacattgtggacttgtctgatcccaagcaaatctggaaatttgttgaaaatttcaagcaggaacataaactccatgttctgatcaataatgcaggttgcatggtcaataaaagagagctcacagaagatggacttgaaaaaaactttgctgccaatactctgggtgtgtacattctcacgaccggcctgatccctgtgctggagaaagaacacgacccccgagtgataaccgtctcctcaggaggaatgttggttcagaaactgaacaccaatgatctccagtccgaaagaacaccatttgatggaactatggtctatgcacaaaacaagggaagtcaaccacatttgctggagaatgctgtcctaatccgcctgacccttccttctcccaggtgtgaggcaggcgatgccggggttccacgccaggttcggggaccgcctgcgctccgaggcccagggcgcggacaccatgctgtggctggccctctcctctgccgcagccgcacagcccagcggccgcttctttcaaggtgacttcctccctggctgtgaaggcagctgacacagggctaggggcagcagctgggccttcgaggcgcaccttcccctccgtgaaacctggggtgggactgtcccctggggggtgcctgggcttctttggcgagatgattgctttgcctgctgaggttagttttgggaagcgcttcactccaggttggtagcttctttggagacttgtgataaccctgtcatcaaggtcctgtgagaacgggagaggcagttcctaccttgggaatggaagattttctctgcagtttgctgaggcccaggaggggcgctattcaaagctgcactgcaaagggagtaacggactctgcttctctgcagtgcaaagggtgtaagggactctgcttctctatttttggaagcagtgatctgttcacgtctctccccagtgggctcctaagggggcaggcgtgtgagtggacgccatccgaagacagcacttgacctcgggtggaagccaggctctttgcttggcttctctttcctctgttcttgatgagaaccacccttgcttgaggaattctgaagcgctggtgacccctggggtatccgggaggatggccgcaccccttcctgctgatcacccaaacgtggtctcccgtccagccctggctgcagcctcccagttcccaaactgcactttacatatcaatccatgctgcctgatccctgtgggacctttgacagcagggatgggggtctaacagctgtagggtgctgccactccagcaggcgtcggttcaaggcctgagcagcacagggacatggacccagccacgctgcagcagctcacacctctctgcggttccctctcacttttagatcggaagccagtttctacacacttgcctctcgctacagcgtcctcctcaccggccgaagaggagaaactcattgaaatcctggaacagctggctcagacatttaaataggccaacccagacacagtgcggtaccagaattgccttagaagataccagaaggtgcggtctagggaccagtgaataagaagaccccacttcaacttcccctcgaagacgttgtgcctcacagcgaggcctacaagggatgggaacttttatttcaaaataaatactaccgaggctgtgatcaggctcacccctcgtgccgaatt

SEQ ID NO: 33413 - DNA, 1552 bp, Homo sapiens
agccccacctcagacttctgggctccagaaccataggagaatacatataaccgtctcctcaggaggaatgttggttcagaaactgaacaccaatgatctccagtccgaaagaacaccatttgatggaactatggtctatgcacaaaacaagaggcagcaagtggttctgacggagcggtgggcccaagggcacccggccatccatttttcttccatgcatcctggctgggccgacaccccaggtgtgaggcaggcgatgccggggttccacgccaggttcggggaccgcctgcgctccgaggcccagggcgcggacaccatgctgtggctggccctctcctctgccgcagccgcacagcccagcggccgcttctttcaaggtgacttcctccctggctgtgaaggcagctgacacagggctaggggcagcagctgggccttcgaggcgcaccttcccctccgtgaaacctggggtgggactgtcccctggggggtgcctgggcttctttggcgagatgattgctttgcctgctgaggttagttttgggaagcgcttcactccaggttggtagcttctttggagacttgtgataaccctgtcatcaaggtcctgtgagaacgggagaggcagttcctaccttgggaatggaagattttctctgcagtttgctgaggcccaggaggggcgctattcaaagctgcactgcaaagggagtaacggactctgcttctctgcagtgcaaagggtgtaagggactctgcttctctatttttggaagcagtgatctgttcacgtctctccccagtgggctcctaagggggcaggcgtgtgagtggacgccatccgaagacagcacttgacctcgggtggaagccaggctctttgcttggcttctctttcctctgttcttgatgagaaccacccttgcttgaggaattctgaagcgctggtgacccctggggtatccgggaggatggccgcaccccttcctgctgatcacccaaacgtggtctcccgtccagccctggctgcagcctcccagttcccaaactgcactttacatatcaatccatgctgcctgatccctgtgggacctttgacagcagggatgggggtctaacagctgtagggtgctgccactccagcaggcgtcggttcaaggcctgagcagcacagggacatggacccagccacgctgcagcagctcacacctctctgcggttccctctcacttttagatcggaagccagtttctacacacttgcctctcgctacagcgtcctcctcaccggccgaagaggagaaactcattgaaatcctggaacagctggctcagacatttaaataggccaacccagacacagtgcggtaccagaattgccttagaagataccagaaggtgcggtctagggaccagtgaataagaagaccccacttcaacttcccctcgaagacgttgtgcctcacagcgaggcctacaagggatgggaacttttatttcaaaataaatactaccgaggctgtgatcaggctcacccctcgtgccgaatt

SEQ ID NO: 33414 - DNA, 1991 bp, Homo sapiens
taatttctcattccatatatattaggaatgtctttccatgtcacatacacttcagtgtttttctcattccattagaaatgttatatgtatatttcttgattgaagaaataaccataaagttatatgctcattgtaaaaatactcaaatccaaacagtgcagaaatgtatagcaaaggaaggaaaaattttactgaattccacccttgagacctaatttagcggtattgctaaatttcatcttcacatttttctgtgcacagactggacatatagatgcattttttcttctgcaaagtggacccatctacggtttggcagttttctttttcccttcctgtattcctgtagtgtggacatcttttcctgtcggtacatgaggctctaaggcatctttcttccagtcctgggaaaaggaacatttggcttgaaggatcctcggaaggagggactgcccctcaggtgtgtacattctcacgaccggcctgatccctgtgctggagaaagaacacgacccccgagtgataaccgtctcctcaggaggaatgttggttcagaaactgaacaccaatgatctccagtccgaaagaacaccatttgatggaactatggtctatgcacaaaacaagggcacccggccatccatttttcttccatgcatcctggctgggccgacaccccaggtgtgaggcaggcgatgccggggttccacgccaggttcggggaccgcctgcgctccgaggcccagggcgcggacaccatgctgtggctggccctctcctctgccgcagccgcacagcccagcggccgcttctttcaaggtgacttcctccctggctgtgaaggcagctgacacagggctaggggcagcagctgggccttcgaggcgcaccttcccctccgtgaaacctggggtgggactgtcccctggggggtgcctgggcttctttggcgagatgattgctttgcctgctgaggttagttttgggaagcgcttcactccaggttggtagcttctttggagacttgtgataaccctgtcatcaaggtcctgtgagaacgggagaggcagttcctaccttgggaatggaagattttctctgcagtttgctgaggcccaggaggggcgctattcaaagctgcactgcaaagggagtaacggactctgcttctctgcagtgcaaagggtgtaagggactctgcttctctatttttggaagcagtgatctgttcacgtctctccccagtgggctcctaagggggcaggcgtgtgagtggacgccatccgaagacagcacttgacctcgggtggaagccaggctctttgcttggcttctctttcctctgttcttgatgagaaccacccttgcttgaggaattctgaagcgctggtgacccctggggtatccgggaggatggccgcaccccttcctgctgatcacccaaacgtggtctcccgtccagccctggctgcagcctcccagttcccaaactgcactttacatatcaatccatgctgcctgatccctgtgggacctttgacagcagggatgggggtctaacagctgtagggtgctgccactccagcaggcgtcggttcaaggcctgagcagcacagggacatggacccagccacgctgcagcagctcacacctctctgcggttccctctcacttttagatcggaagccagtttctacacacttgcctctcgctacagcgtcctcctcaccggccgaagaggagaaactcattgaaatcctggaacagctggctcagacatttaaataggccaacccagacacagtgcggtaccagaattgccttagaagataccagaaggtgcggtctagggaccagtgaataagaagaccccacttcaacttcccctcgaagacgttgtgcctcacagcgaggcctacaagggatgggaacttttatttcaaaataaatactaccgaggctgtgatcaggctcacccctcgtgccgaatt

SEQ ID NO: 33415 - DNA, 1215 bp, Homo sapiens
gaatacaatgtgttgcttcaagccactaattttgtggtcattggtcacaacagcaagaagcactgctctacagggggtgaagagtggaaggggtcacaggctttagtttgtaaatctctgttacctttattgcagataaccgtctcctcaggaggaatgttggttcagaaactgaacaccaatgatctccagtccgaaagaacaccatttgatggaactatggtctatgcacaaaacaagaggcagcaagtggttctgacggagcggtgggcccaagggcacccggccatccatttttcttccatgcatcctggctgggccgacaccccaggtgtgaggcaggcgatgccggggttccacgccaggttcggggaccgcctgcgctccgaggcccagggcgcggacaccatgctgtggctggccctctcctctgccgcagccgcacagcccagcggccgcttctttcaagtgggctcctaagggggcaggcgtgtgagtggacgccatccgaagacagcacttgacctcgggtggaagccaggctctttgcttggcttctctttcctctgttcttgatgagaaccacccttgcttgaggaattctgaagcgctggtgacccctggggtatccgggaggatggccgcaccccttcctgctgatcacccaaacgtggtctcccgtccagccctggctgcagcctcccagttcccaaactgcactttacatatcaatccatgctgcctgatccctgtgggacctttgacagcagggatgggggtctaacagctgtagggtgctgccactccagcaggcgtcggttcaaggcctgagcagcacagggacatggacccagccacgctgcagcagctcacacctctctgcggttccctctcacttttagatcggaagccagtttctacacacttgcctctcgctacagcgtcctcctcaccggccgaagaggagaaactcattgaaatcctggaacagctggctcagacatttaaataggccaacccagacacagtgcggtaccagaattgccttagaagataccagaaggtgcggtctagggaccagtgaataagaagaccccacttcaacttcccctcgaagacgttgtgcctcacagcgaggcctacaagggatgggaacttttatttcaaaataaatactaccgaggctgtgatcaggctcacccctcgtgccgaatt

SEQ ID NO: 33416 - DNA, 2421 bp, Homo sapiens
cacggcactgcatcccccaacacgtgtagaaacttagagaatgccagttattaaaataacccttatgataacaccaattcgatgcagaagtcttttaaatatcataagcctcgtcgttttattccacatggttttctaggtaaccaaattctaggaggtgcgttgcagggccatcttcgcatcccggccatgcccagcaggacggtgttctctaaacggcgctgatgcccgatttcgaccccgaggagactgcggacctcgactgcggcccccaccagggccggtccgccctcactccaccctctgaggctggggcggagtcgaccggccggccccgagaccccttgccttaccggtggagcaaggaaccggaagccgcggctcttacataaccgggatgatgtcagggcgggcgactcccggggggcgggaccagggcggaggccgcgccgggagcgcggtggggctaggcgtggggcgctcccggcatgtccctgtaccgcagcgtcgtgtggttcgccaaggggctgcgcgagtacaccaagagtggctatgaatctgcatgtaaagactttgtccctcatgacttggaggtccagattcctggaagagtctttttggtcactggaggaaacagcggcattggcaaagcaactgcccttgaaatcgccaagcgagaacatttttctgcacattgtggacttgtctgatcccaagcaaatctggaaatttgttgaaaatttcaagcaggaacataaactccatgttctgatcaataatgcaggttgcatggtcaataaaagagagctcacagaagatggacttgaaaaaaactttgctgccaatactctgggtgtgtacattctcacgaccggcctgatccctgtgctggagaaagaacacgacccccgagtgataaccgtctcctcaggaggaatgttggttcagaaactgaacaccaatgatctccagtccgaaagaacaccatttgatggaactatggtctatgcacaaaacaagaggcagcaagtggttctgacggagcggtgggcccaagggcacccggccatccatttttcttccatgcatcctggctgggccgacaccccaggtgtgaggcaggcgatgccggggttccacgccaggttcggggaccgcctgcgctccgaggcccagggcgcggacaccatgctgtggctggccctctcctctgccgcagccgcacagcccagcggccgcttctttcaaggtgacttcctccctggctgtgaaggcagctgacacagggctaggggcagcagctgggccttcgaggcgcaccttcccctccgtgaaacctggggtgggactgtcccctggggggtgcctgggcttctttggcgagatgattgctttgcctgctgaggttagttttgggaagcgcttcactccaggttggtagcttctttggagacttgtgataaccctgtcatcaaggtcctgtgagaacgggagaggcagttcctaccttgggaatggaagattttctctgcagtttgctgaggcccaggaggggcgctattcaaagctgcactgcaaagggagtaacggactctgcttctctgcagtgcaaagggtgtaagggactctgcttctctatttttggaagcagtgatctgttcacgtctctccccagtgggctcctaagggggcaggcgtgtgagtggacgccatccgaagacagcacttgacctcgggtggaagccaggctctttgcttggcttctctttcctctgttcttgatgagaaccacccttgcttgaggaattctgaagcgctggtgacccctggggtatccgggaggatggccgcaccccttcctgctgatcacccaaacgtggtctcccgtccagccctggctgcagcctcccagttcccaaactgcactttacatatcaatccatgctgcctgatccctgtgggacctttgacagcagggatgggggtctaacagctgtagggtgctgccactccagcaggcgtcggttcaaggcctgagcagcacagggacatggacccagccacgctgcagcagctcacacctctctgcggttccctctcacttttagatcggaagccagtttctacacacttgcctctcgctacagcgtcctcctcaccggccgaagaggagaaactcattgaaatcctggaacagctggctcagacatttaaataggccaacccagacacagtgcggtaccagaattgccttagaagataccagaaggtgcggtctagggaccagtgaataagaagaccccacttcaacttcccctcgaagacgttgtgcctcacagcgaggcctacaagggatgggaacttttatttcaaaataaatactaccgaggctgtgatcaggctcacccctcgtgccgaatt

SEQ ID NO: 33417 - DNA, 1840 bp, Homo sapiens
cacggcactgcatcccccaacacgtgtagaaacttagagaatgccagttattaaaataacccttatgataacaccaattcgatgcagaagtcttttaaatatcataagcctcgtcgttttattccacatggttttctaggtaaccaaattctaggaggtgcgttgcagggccatcttcgcatcccggccatgcccagcaggacggtgttctctaaacggcgctgatgcccgatttcgaccccgaggagactgcggacctcgactgcggcccccaccagggccggtccgccctcactccaccctctgaggctggggcggagtcgaccggccggccccgagaccccttgccttaccggtggagcaaggaaccggaagccgcggctcttacataaccgggatgatgtcagggcgggcgactcccggggggcgggaccagggcggaggccgcgccgggagcgcggtggggctaggcgtggggcgctcccggcatgtccctgtaccgcagcgtcgtgtggttcgccaaggggctgcgcgagtacaccaagagtggctatgaatctgcatgtaaagactttgtccctcatgacttggaggtccagattcctggaagagtctttttggtcactggaggaaacagcggcattggcaaagcaactgcccttgaaatcgccaagcgagaacatttttctgcacattgtggacttgtctgatcccaagcaaatctggaaatttgttgaaaatttcaagcaggaacataaactccatgttctgatcaataatgcaggttgcatggtcaataaaagagagctcacagaagatggacttgaaaaaaactttgctgccaatactctgggtgtgtacattctcacgaccggcctgatccctgtgctggagaaagaacacgacccccgagtgataaccgtctcctcaggaggaatgttggttcagaaactgaacaccaatgatctccagtccgaaagaacaccatttgatggaactatggtctatgcacaaaacaagaggcagcaagtggttctgacggagcggtgggcccaagggcacccggccatccatttttcttccatgcatcctggctgggccgacaccccagacaggaatgagcaggagctgaggaaggtagtgggagaggcccagactgcctcaccactccccaggtttttggaaataatgatgcatgaaggtaaatgccagccacaaggacacagctcgaatgatctggaagcgtgttggagcagcggtggaggggagcagaattctcttccggattggcctcaccaactccatgacctcaggcagctcacctgggctctctgcagctctttcctcctctacaaacaagggaactgaaagcagcagcagccacagcacacaccccagggtgcacccgcggcgccaagaactggtctcagcgctgtctgcggattaacgcatttgtcctcaagcctctgtggagtggccactactgtctattatcacacccatttacagatgagggaactgaggcccagagaggctaagacctcccagccgggcctggccatggggttttgggaatcaggctctcacacactgctggcatggcctttctgaaaatcactatttatcagaagccttggaattcatcctaagaaataaagatagggaaaacaaggttgcttatcacagtgctggtggtaggagatgaagttaataaattatagaacacctgtgcaaaatctgttcagggctgaagactctgctgccaatcatgcctatggaaaaaccctgtgtgcactatatcattaaatgaagataccaagttcctgaataaaaaaaaact

SEQ ID NO: 33418 - DNA, 797 bp, Homo sapiens
cacggcactgcatcccccaacacgtgtagaaacttagagaatgccagttattaaaataacccttatgataacaccaattcgatgcagaagtcttttaaatatcataagcctcgtcgttttattccacatggttttctaggtaaccaaattctaggaggtgcgttgcagggccatcttcgcatcccggccatgcccagcaggacggtgttctctaaacggcgctgatgcccgatttcgaccccgaggagactgcggacctcgactgcggcccccaccagggccggtccgccctcactccaccctctgaggctggggcggagtcgaccggccggccccgagaccccttgccttaccggtggagcaaggaaccggaagccgcggctcttacataaccgggatgatgtcagggcgggcgactcccggggggcgggaccagggcggaggccgcgccgggagcgcggtggggctaggcgtggggcgctcccggcatgtccctgtaccgcagcgtcgtgtggttcgccaaggggctgcgcgagtacaccaagtaaggcggcgcggcggggcgcggggccccgggctgtcacgtggcccgcctcggcgcgggcgagcagggttggcggggacgcgcccgcggctccttcgccctctcgctgggccgactaagcgtgtccagaacgacgggtgcgcccgccgtctagcgacccacggctgggcgtggggcagtcgccagactccagccgctcaatgcccgcgaccgagactggcgcccgaggggcggggctgtggcgcgcccaagc

SEQ ID NO: 33419 - DNA, 2570 bp, Homo sapiens
cacggcactgcatcccccaacacgtgtagaaacttagagaatgccagttattaaaataacccttatgataacaccaattcgatgcagaagtcttttaaatatcataagcctcgtcgttttattccacatggttttctaggtaaccaaattctaggaggtgcgttgcagggccatcttcgcatcccggccatgcccagcaggacggtgttctctaaacggcgctgatgcccgatttcgaccccgaggagactgcggacctcgactgcggcccccaccagggccggtccgccctcactccaccctctgaggctggggcggagtcgaccggccggccccgagaccccttgccttaccggtggagcaaggaaccggaagccgcggctcttacataaccgggatgatgtcagggcgggcgactcccggggggcgggaccagggcggaggccgcgccgggagcgcggtggggctaggcgtggggcgctcccggcatgtccctgtaccgcagcgtcgtgtggttcgccaaggggctgcgcgagtacaccaagagtggctatgaatctgcatgtaaagactttgtccctcatgacttggaggtccagattcctggaagagtctttttggtcactggaggaaacagcggcattggcaaagcaactgcccttgaaatcgccaagcgaggtggcacagttcacctggtttgtcgagatcaagccccagcagaagatgccaggggtgagatcatccgggagagcggtaaccagaacatttttctgcacattgtggacttgtctgatcccaagcaaatctggaaatttgttgaaaatttcaagcaggaacataaactccatgttctgatcaataatgcaggttgcatggtcaataaaagagagctcacagaagatggacttgaaaaaaactttgctgccaatactctgggtgtgtacattctcacgaccggcctgatccctgtgctggagaaagaacacgacccccgagtgaagggacttggcagctgcagttcagttcaaggccttgggatgagaagcgtgtcctggagtatccagataaccgtctcctcaggaggaatgttggttcagaaactgaacaccaatgatctccagtccgaaagaacaccatttgatggaactatggtctatgcacaaaacaagaggcagcaagtggttctgacggagcggtgggcccaagggcacccggccatccatttttcttccatgcatcctggctgggccgacaccccaggtgtgaggcaggcgatgccggggttccacgccaggttcggggaccgcctgcgctccgaggcccagggcgcggacaccatgctgtggctggccctctcctctgccgcagccgcacagcccagcggccgcttctttcaaggtgacttcctccctggctgtgaaggcagctgacacagggctaggggcagcagctgggccttcgaggcgcaccttcccctccgtgaaacctggggtgggactgtcccctggggggtgcctgggcttctttggcgagatgattgctttgcctgctgaggttagttttgggaagcgcttcactccaggttggtagcttctttggagacttgtgataaccctgtcatcaaggtcctgtgagaacgggagaggcagttcctaccttgggaatggaagattttctctgcagtttgctgaggcccaggaggggcgctattcaaagctgcactgcaaagggagtaacggactctgcttctctgcagtgcaaagggtgtaagggactctgcttctctatttttggaagcagtgatctgttcacgtctctccccagtgggctcctaagggggcaggcgtgtgagtggacgccatccgaagacagcacttgacctcgggtggaagccaggctctttgcttggcttctctttcctctgttcttgatgagaaccacccttgcttgaggaattctgaagcgctggtgacccctggggtatccgggaggatggccgcaccccttcctgctgatcacccaaacgtggtctcccgtccagccctggctgcagcctcccagttcccaaactgcactttacatatcaatccatgctgcctgatccctgtgggacctttgacagcagggatgggggtctaacagctgtagggtgctgccactccagcaggcgtcggttcaaggcctgagcagcacagggacatggacccagccacgctgcagcagctcacacctctctgcggttccctctcacttttagatcggaagccagtttctacacacttgcctctcgctacagcgtcctcctcaccggccgaagaggagaaactcattgaaatcctggaacagctggctcagacatttaaataggccaacccagacacagtgcggtaccagaattgccttagaagataccagaaggtgcggtctagggaccagtgaataagaagaccccacttcaacttcccctcgaagacgttgtgcctcacagcgaggcctacaagggatgggaacttttatttcaaaataaatactaccgaggctgtgatcaggctcacccctcgtgccgaatt

SEQ ID NO: 33420 - DNA, 2028 bp, Homo sapiens
taatttctcattccatatatattaggaatgtctttccatgtcacatacacttcagtgtttttctcattccattagaaatgttatatgtatatttcttgattgaagaaataaccataaagttatatgctcattgtaaaaatactcaaatccaaacagtgcagaaatgtatagcaaaggaaggaaaaattttactgaattccacccttgagacctaatttagcggtattgctaaatttcatcttcacatttttctgtgcacagactggacatatagatgcattttttcttctgcaaagtggacccatctacggtttggcagttttctttttcccttcctgtattcctgtagtgtggacatcttttcctgtcggtacatgaggctctaaggcatctttcttccagtcctgggaaaaggaacatttggcttgaaggatcctcggaaggagggactgcccctcaggtgtgtacattctcacgaccggcctgatccctgtgctggagaaagaacacgacccccgagtgataaccgtctcctcaggaggaatgttggttcagaaactgaacaccaatgatctccagtccgaaagaacaccatttgatggaactatggtctatgcacaaaacaagaggcagcaagtggttctgacggagcggtgggcccaagggcacccggccatccatttttcttccatgcatcctggctgggccgacaccccaggtgtgaggcaggcgatgccggggttccacgccaggttcggggaccgcctgcgctccgaggcccagggcgcggacaccatgctgtggctggccctctcctctgccgcagccgcacagcccagcggccgcttctttcaaggtgacttcctccctggctgtgaaggcagctgacacagggctaggggcagcagctgggccttcgaggcgcaccttcccctccgtgaaacctggggtgggactgtcccctggggggtgcctgggcttctttggcgagatgattgctttgcctgctgaggttagttttgggaagcgcttcactccaggttggtagcttctttggagacttgtgataaccctgtcatcaaggtcctgtgagaacgggagaggcagttcctaccttgggaatggaagattttctctgcagtttgctgaggcccaggaggggcgctattcaaagctgcactgcaaagggagtaacggactctgcttctctgcagtgcaaagggtgtaagggactctgcttctctatttttggaagcagtgatctgttcacgtctctccccagtgggctcctaagggggcaggcgtgtgagtggacgccatccgaagacagcacttgacctcgggtggaagccaggctctttgcttggcttctctttcctctgttcttgatgagaaccacccttgcttgaggaattctgaagcgctggtgacccctggggtatccgggaggatggccgcaccccttcctgctgatcacccaaacgtggtctcccgtccagccctggctgcagcctcccagttcccaaactgcactttacatatcaatccatgctgcctgatccctgtgggacctttgacagcagggatgggggtctaacagctgtagggtgctgccactccagcaggcgtcggttcaaggcctgagcagcacagggacatggacccagccacgctgcagcagctcacacctctctgcggttccctctcacttttagatcggaagccagtttctacacacttgcctctcgctacagcgtcctcctcaccggccgaagaggagaaactcattgaaatcctggaacagctggctcagacatttaaataggccaacccagacacagtgcggtaccagaattgccttagaagataccagaaggtgcggtctagggaccagtgaataagaagaccccacttcaacttcccctcgaagacgttgtgcctcacagcgaggcctacaagggatgggaacttttatttcaaaataaatactaccgaggctgtgatcaggctcacccctcgtgccgaatt

SEQ ID NO: 33421 - DNA, 1641 bp, Homo sapiens
gaatacaatgtgttgcttcaagccactaattttgtggtcattggtcacaacagcaagaagcactgctctacagggggtgaagagtggaaggggtcacaggctttagtttgtaaatctctgttacctttattgcagataaccgtctcctcaggaggaatgttggttcagaaactgaacaccaatgatctccagtccgaaagaacaccatttgatggaactatggtctatgcacaaaacaagaggcagcaagtggttctgacggagcggtgggcccaagggcacccggccatccatttttcttccatgcatcctggctgggccgacaccccaggtgtgaggcaggcgatgccggggttccacgccaggttcggggaccgcctgcgctccgaggcccagggcgcggacaccatgctgtggctggccctctcctctgccgcagccgcacagcccagcggccgcttctttcaaggtgacttcctccctggctgtgaaggcagctgacacagggctaggggcagcagctgggccttcgaggcgcaccttcccctccgtgaaacctggggtgggactgtcccctggggggtgcctgggcttctttggcgagatgattgctttgcctgctgaggttagttttgggaagcgcttcactccaggttggtagcttctttggagacttgtgataaccctgtcatcaaggtcctgtgagaacgggagaggcagttcctaccttgggaatggaagattttctctgcagtttgctgaggcccaggaggggcgctattcaaagctgcactgcaaagggagtaacggactctgcttctctgcagtgcaaagggtgtaagggactctgcttctctatttttggaagcagtgatctgttcacgtctctccccagtgggctcctaagggggcaggcgtgtgagtggacgccatccgaagacagcacttgacctcgggtggaagccaggctctttgcttggcttctctttcctctgttcttgatgagaaccacccttgcttgaggaattctgaagcgctggtgacccctggggtatccgggaggatggccgcaccccttcctgctgatcacccaaacgtggtctcccgtccagccctggctgcagcctcccagttcccaaactgcactttacatatcaatccatgctgcctgatccctgtgggacctttgacagcagggatgggggtctaacagctgtagggtgctgccactccagcaggcgtcggttcaaggcctgagcagcacagggacatggacccagccacgctgcagcagctcacacctctctgcggttccctctcacttttagatcggaagccagtttctacacacttgcctctcgctacagcgtcctcctcaccggccgaagaggagaaactcattgaaatcctggaacagctggctcagacatttaaataggccaacccagacacagtgcggtaccagaattgccttagaagataccagaaggtgcggtctagggaccagtgaataagaagaccccacttcaacttcccctcgaagacgttgtgcctcacagcgaggcctacaagggatgggaacttttatttcaaaataaatactaccgaggctgtgatcaggctcacccctcgtgccgaatt

SEQ ID NO: 33422 - DNA, 1756 bp, Homo sapiens
cacggcactgcatcccccaacacgtgtagaaacttagagaatgccagttattaaaataacccttatgataacaccaattcgatgcagaagtcttttaaatatcataagcctcgtcgttttattccacatggttttctaggtaaccaaattctaggaggtgcgttgcagggccatcttcgcatcccggccatgcccagcaggacggtgttctctaaacggcgctgatgcccgatttcgaccccgaggagactgcggacctcgactgcggcccccaccagggccggtccgccctcactccaccctctgaggctggggcggagtcgaccggccggccccgagaccccttgccttaccggtggagcaaggaaccggaagccgcggctcttacataaccgggatgatgtcagggcgggcgactcccggggggcgggaccagggcggaggccgcgccgggagcgcggtggggctaggcgtggggcgctcccggcatgtccctgtaccgcagcgtcgtgtggttcgccaaggggctgcgcgagtacaccaagagtggctatgaatctgcatgtaaagactttgtccctcatgacttggaggtccagattcctggaagagtctttttggtcactggaggaaacagcggcattggcaaagcaactgcccttgaaatcgccaagcgaggtggcacagttcacctggtttgtcgagatcaagccccagcagaagatgccaggggtgagatcatccgggagagcggtaaccagaacatttttctgcacattgtggacttgtctgatcccaagcaaatctggaaatttgttgaaaatttcaagcaggaacataaactccatgttctgatcaataatgcaggttgcatggtcaataaaagagagctcacagaagatggacttgaaaaaaactttgctgccaatactctggtgtggacatcttttcctgtcggtacatgaggctctaaggcatctttcttccagtcctgggaaaaggaacatttggcttgaaggatcctcggaaggagggactgcccctcaggtgtgtacattctcacgaccggcctgatccctgtgctggagaaagaacacgacccccgagtgataaccgtctcctcaggaggaatgttggttcagaaactgaacaccaatgatctccagtccgaaagaacaccatttgatggaactatggtctatgcacaaaacaagaggcagcaagtggttctgacggagcggtgggcccaagggcacccggccatccatttttcttccatgcatcctggctgggccgacaccccaggtgtgaggcaggcgatgccggggttccacgccaggttcggggaccgcctgcgctccgaggcccagggcgcggacaccatgctgtggctggccctctcctctgccgcagccgcacagcccagcggccgcttctttcaagatcggaagccagtttctacacacttgcctctcgctacagcgtcctcctcaccggccgaagaggagaaactcattgaaatcctggaacagctggctcagacatttaaataggccaacccagacacagtgcggtaccagaattgccttagaagataccagaaggtgcggtctagggaccagtgaataagaagaccccacttcaacttcccctcgaagacgttgtgcctcacagcgaggcctacaagggatgggaacttttatttcaaaataaatactaccgaggctgtgatcaggctcacccctcgtgccgaatt

SEQ ID NO: 33423 - DNA, 1377 bp, Homo sapiens
cacggcactgcatcccccaacacgtgtagaaacttagagaatgccagttattaaaataacccttatgataacaccaattcgatgcagaagtcttttaaatatcataagcctcgtcgttttattccacatggttttctaggtaaccaaattctaggaggtgcgttgcagggccatcttcgcatcccggccatgcccagcaggacggtgttctctaaacggcgctgatgcccgatttcgaccccgaggagactgcggacctcgactgcggcccccaccagggccggtccgccctcactccaccctctgaggctggggcggagtcgaccggccggccccgagaccccttgccttaccggtggagcaaggaaccggaagccgcggctcttacataaccgggatgatgtcagggcgggcgactcccggggggcgggaccagggcggaggccgcgccgggagcgcggtggggctaggcgtggggcgctcccggcatgtccctgtaccgcagcgtcgtgtggttcgccaaggggctgcgcgagtacaccaagagtggctatgaatctgcatgtaaagactttgtccctcatgacttggaggtccagattcctggaagagtctttttggtcactggaggaaacagcggcattggcaaagcaactgcccttgaaatcgccaagcgaggtggcacagttcacctggtttgtcgagatcaagccccagcagaagatgccaggggtgagatcatccgggagagcggtaaccagaacatttttctgcacattgtggacttgtctgatcccaagcaaatctggaaatttgttgaaaatttcaagcaggaacataaactccatgttctgatcaataatgcaggttgcatggtcaataaaagagagctcacagaagatggacttgaaaaaaactttgctgccaatactctgggtgtgtacattctcacgaccggcctgatccctgtgctggagaaagaacacgacccccgagtgataaccgtctcctcaggaggaatgttggttcagaaactgaacaccaatgatctccagtccgaaagaacaccatttgatggaactatggtctatgcacaaaacaagggcgcccacattgtctgtaaggctgccagcaccctccgccttccttgtcgctgctgtgtgccttccgaaggtggccctgtctgagactctctgcacctccacttcttctgtttatatgccctgggtgtgccccagttttgctccttgaccccagaccaaatcctggtgaattacatttcatgactccaaatcctgacatttgaaagacctgcacttttttacagttttcccagaggacatgggaataaaccatccccttgtaaatgagaaaaaa

SEQ ID NO: 33424 - DNA, 596 bp, Homo sapiens
tattccaacagagatcctaattcttttccctcttatttaaacttggaattatcaaaatcacagttttaaaaatattttatttaggatatccacatgcaaaagaatgaaattggaccttggtcttacaacatgcacaataatcaactcaaaatggagtacacaatgttagaaagacctaatgccataaaacaaaggaaacaacaaaatggaaaggcaacttgtggaataggaaaaactatttataaactgtatatccagtaaggagtttaatatccaaaatatataaggaactcatacaacacaataacttttttaaaaaatgggcaaaggacctaaaaagacatttttccaaagaacacatgcaagtggccaataagtaaaaaggtgttcaacaccgctaaccattagggaaatgaaaatcaaaaccacaatgagatatcacatcacaactgttaggatggctattaccagaaagtcaaaagacaacaagtgttggcaaggatgtagagaaaagcgaacctttgtgcactattggtggaaatgtaaattggtatagctattatggaaaacagtatggaatttcctcaaaaaataaa

SEQ ID NO: 33425 - DNA, 383 bp, Homo sapiens
attaaataaaatatatttttaaaaaatgaagcaatttggccaggtgtaggaagtatcttatgtaggaagtatggagtaataaaaaatgaagcaatttggctgggtgcagtggctcatgcctataatcccagcacgttgggagcctgaggatcgcttgagctcaggagttcaagaccagcctggcaacatgatgaaaccccctctctaccaaaaaaaaccaaaaacttagcctgacttggtagtgcgtgtctgtggtcctagctcctctggaggctgaagtggcaggatcggttgagcccagggggtggaggttgcagtgagctgagatccggctgctgtactccaccccaggtgacagagtgagactctctcaaaaagaaggg

SEQ ID NO: 33426 - DNA, 1710 bp, Homo sapiens
gggatggtgaagctgagtttgtggacgctgcctgacatcctcatcatccacctcaaaaggttctgccaggtgggcgagagaagaaacaagctctccacgctggtgaagtttccgctctctggactcaacatggctccccatgtggcccagagaagcaccagccctgaggcaggactgggcccctggccttcctggaagcagccggactgcctgcccaccagttacccgctggacttcctgtacgacctgtatgccgtctgcaaccaccatggcaacctgcaaggtgggcattacacagcctactgccggaactctctggatggccagtggtacagttatgatgacagcacggtggaaccgcttcgagaagatgaggtcaacaccagaggggcttatatcctgttctatcagaagcggaacagcatccctccctggtcagccagcagctccatgagaggctctaccagctcctccctgtctgatcactggctcttacggctcgggagccacgctggcagcacaaggggaagcctgctgtcctggagctctgccccctgcccctccctgccccaggttcctgactctcccatcttcaccaacagcctctgcaatcaggaaaagggagggttggagcccaggcgtttggtacggggcgtgaaaggcagaagcattagcatgaaggcacccaccacttcccgagccaagcagggaccattcaagaccatgcctctgcggtggtcctttggatccaaggagaaaccaccaggtgcctccgtcgagttggtggagtacttggaatccagacgaagacctcggtccacgagccagtccattgtgtcgctgttgacgggcactgcgggtgaggatgagaagtcagcatcgccgaggtccaacgtcgcccttcctgctaacagcgaagatggtgggcgggccattgaaagaggtccagccggggtgccctgtccctcggctcaacccaaccactgtctggcccctggaaactcagatggtccaaacacagcaaggaaactcaaggaaaatgcagggcaggacatcaagcttcccagaaagtttgacctgcctctcactgtgatgccttcagtggagcatgagaaaccagctcgaccggagggccagaaggccatgaactggaaggagagcttccagatgggaagcaaaagcagcccaccctccccctatatgggattctctggaaacagcaaagacagtcgccgaggcacctctgagctagacagacccctgcaggggacactcacccttctgaggtccgtgtttcggaagaaggagaacaggaggaatgagagggcagaggtctctccacaggtgccccccgtctccctggtgagtggcgggctgagccctgccatggacgggcaggctccaggctcacctcctgccctcaggatcccagagggcctggccaggggcctgggcagccggctcgagagggatgtctggtcagcccccagctctctccgcctccctcgtaaagccagcagggccccgagaggcagtgcactgggcatgtcacaaaggactgttccaggggagcaggcttcttatggcacctttcagagagtcaaatatcacactctttctttaggtcgaaagaaaaccttaccggagtccagcttttgatggagcgtgtcagtattgtgtgacgctggcattcttgggactttgccaagc

SEQ ID NO: 33427 - DNA, 395 bp, Homo sapiens
ttgtgtggacgtttccatttcttcagaatatttacctgggggtggaattgctgggtcacgtggtgacaacttttttgaggaactaccagactgttttccaaagcagttgcatcattttacattcccaccagcagtgtatgagggttccagtttctccacatcctcaccagcactcattgctggctctttgttttttgttttttttttaaatgaaatgtatactccgatgccatgtttattttcatttctcctgacctctatcaagaatgatgccgtctcacctgggtgcagtggctcacgcctataatcccagcactttgagaggctgaagcaggcggatcacctgaggtcaggagttagagaccagcctggccaacatggcaaaccctcatctc

SEQ ID NO: 33428 - DNA, 336 bp, Homo sapiens
gggtgtctcaggggtggcagagacagaaaaaaccggcatacacatgagcccgcgtagtttaagcacatgtagtccaagggcttattgtgtatctgcaacaatcagatatctctgacagatgaacctgataaagtcacactatttagagtatgataccatttatgttaaaaacaaaatactatatatgtgtgcataaacctacagaaaatttcctagagaggaacaactctggagagtggtatgagatcacggaggagtaaataggatttatgccttttacgttttacacttgtgtttttgaaatattatagaaatatatttgtatattgattgttt

SEQ ID NO: 33429 - DNA, 464 bp, Homo sapiens
aaaataatttgatataattcaacatttcttcatgataaaaaaactcttcagtagactatgaataataggttgggatatcaaagccctatcacaaggtaattaatggcaaaatattagaagcattatcttaaaagtgaagacagcagctctcatcgctggaagaagagccattggttgtatgccaaggaaagcaatgtggctagatctctgttttgaaaggagtttcctgtaggcactgtattgtggaggggaggcttttaaaatgctgactatgcctaatgtatttgagaatatccacctatgaatttctaaaaatgcttatctagaaaacatttcttaaaggaaaaaaacctcagctttttggttttctacagaaaaccaaagctagtcaggaatgcaaaggtggcttctgaatgctacagagttgcagttgttcacccacaggcggcaattgacacacccta

SEQ ID NO: 33430 - DNA, 759 bp, Homo sapiens
catttttaaacgaatcaccttttacgttcacttatatgccaatacttacagttaagtaaaaaaaaaaattgaaaaatttattattgccattcaccatatttaaaaaataaagaacagaggcagaccagtctttagaaaattaaaattaaatattaaaaggagaaaaattacatgatatcaagatttagactaaagcattctgtaaaattcaacacctatttatgttctaaaacaaaacaaaaccctttacaaactagtaatagaagggaactttcttaacctatcaattctatagcatataaaacacctagtcatgacatgtattttttttaatccctttaaaaatcaagaataaaactaggaatatataattacttctattcaacattatactggtggaaatcctacccaacattttacttgcaaatgacatgatcatgtatagaaaatatcacaggacatgtacaaaaaaagccgttagagagccaggcgcggtggctcatgcatgaaatcccagcactttggcaggccgaggtgggtggatcacgaggtcaagagatcgagaccatcctggccaacacggtgaaaccccatctctactaaaaatacaaaaattagctaggcatggtggcgcacgcctgtagtcccagctacttgggaggctgaggcaggagaatcacttgaacctgggaggcagaggttgcagtgaaccaagattgagccactgtactccagcctggcaatagagcaagactccat

SEQ ID NO: 33431 - DNA, 89 bp, Homo sapiens
gcaaggcctgtgaagaaggtaagtttccaagaaggaccaaggagcatgccagcaccaactgatgaactgaattacatcaggggaaaact

SEQ ID NO: 33432 - DNA, 601 bp, Homo sapiens
aatagaatattgttttcctgctaaaattcaccaatgctgtccaagtaccctggatttgctataatttttgttgtggaattcagatatccagtggagttttctaactcctggggcttctgctgatgagaggaagggcatgaagctgattcagatttaagggtacagtagcagagtaattacaaacagagaacctgcaatcggcatggccagaaatatacatttcaattatggtttctaagggagaatttcataggacctgcctatgatatatctgactatatgtggcctctatggtacgttctttctttcttgggttcatgattcacatcctgctagaaaataccagaactgcacaatactttatatttgttattggcaaagtttctttttaatgttccgttggtgtagtctttacataatacattttggggggaacatttgactcatggctaaagcgaaactccaagggtataattaaccccaggggtcttctgggagcaacctgccgattgctgctgaatcgcaaaccaacatttacaaataattacaataatggttttactgaacttactcataatgatttcaatcagggcagccatct

SEQ ID NO: 33433 - DNA, 479 bp, Homo sapiens
gttatttattgagacataaacatttatgatagttgtaaatccatattttcaaatagtattctagatcatgtcaatatatttggaactcctgtcagatctgattaatcattgttttgaccttgtgaatgacaaagagccctgtgagttaagtatggtctctgccctttcttggagtactccacacacactgcttcttttcagcaacactttaggtcgtttatctgttgtgtgggtttgtttcattgtaacctgggtaatatgatctgtaaatatatataagtggcaggtgcatacagcacaagtactacaaaagagtttacaagtgtggggccctgctcagtccctccctttttgtagcgtctccctctgtacatggggactcccatgccatatgtgaccactgtctgtacctcatgcagggaacgtaaggctttcagggctcaatcccataaactaaatattggcaaagcttaatttct

SEQ ID NO: 33434 - DNA, 178 bp, Homo sapiens
tcatcctttattccacctccacagggatgaaaatggaagaatgatcatatatatgcacataccaatgtgaaagcatgttaatgagattaaggtaggacactatcagtcatagacatatttgtagtcataaacaaataagaatattaaaatataagccataagaaatcatatggattct

SEQ ID NO: 33435 - DNA, 503 bp, Homo sapiens
cctgacgtggtgagtgctccagtggcattaagaacatagggcatgtctgtctggtaacctatctccccagcagactgagctccacgagagcagagaccctggtgcagggcctggctcacagtgggtgctcaattaatattacttatgtgaaggaaccacttccagctgctcaagtattctatgctaaaacttgggtttctttcatccttgttgtcctcccaagatacaatgtgtacataattggaaagttagccaaggtgactatgaaggtgaccccacccaatcaatctatgtcttcctggttactgtgcctgtcattcgatgattccacggttatgtctatagtgataacagaaaaaagcaactgaaaacaatattatttactcgggtctcgtgcatctcctccacacatttgtagaaatgagattaccacaaattgccaagatggttacatcaaattttcagcagcatcagtcataggacaaaaaggcctttgagtgtat

SEQ ID NO: 33436 - DNA, 508 bp, Homo sapiens
atggacagctccaggacacagagctgcaggtggggacctccccctgctctggaaatcagccagggagcactgggcagtgcggtttgaggctctgtacccctggcccccacagctcagccacagcaccctctagcttgggggactagtccagggccaaaatgggataacccttccccatataagcagtaggatggcgtcccccctggtggagagaggaaggaggcctagagggtgtggggcagcttcgaagcgcggggagccgggggtctccaagcaccttctcctggacatgccagccttgaatgggggatgtgcagggcttcaaacccacctggcaggagccctgtggcagggcagagggaccctgctccaaattctctgttggctgcgcttttgtatccaatgcttttcagagtgtattcactcacccacagaaatagagccctgtgctttaggggtgactgtcatatgccttattcttaataaaatctctgaaaaacaaaaaaaa

SEQ ID NO: 33437 - DNA, 487 bp, Homo sapiens
ttaacttatctgagcctctattacttctaaaaagtgcataaagtgcagactaagacagtttttttggcaaaattcagtcagactacatcaagtaaactccctaagtctcctagtataattcatggcacaaaaaattggggaaaaaacagggaggatatgattataagttcagtttatgttttttgttgagtgaatgtctccagtcatagagatgcaagtgtagatacacagtaagagtagtatgaatgggagacaccttggaaggctatttcttccttccttcattcagttggtcactcagtgaactatcatgaattgagcaccgcctctgtttcttatcaacaaaggagactgcggaaaagaagagtgactaagatctctgaagaagggaaaagctagatgactgggccacaagaggaaaaaaagcagcaagacagttacaatggtttctggtcccacttttataaacacacacacacacacacac

SEQ ID NO: 33438 - DNA, 296 bp, Homo sapiens
aatccaagcaatgtgaacttctgcttctgtacaggatggagtaacagggactacatttatcattgtgactgaaacaactaagaaactggacaaaatatatggagcaatagttctcaagacactgggcatcaggcagcaaagaaaagttattgctgggagatggaaaagaaataaagtgagtcctgtgagtgcctcagtttactgtctatacaacagcgttgaggaatccaggcagagaccagagtctccttctgttgaagaggtggagctgggaattcaaagaatccaatgcagct

SEQ ID NO: 33439 - DNA, 448 bp, Homo sapiens
ttcagcactttaattctgcctctccggaaagacttccaaagaatggcagaatttgttaatgaagagttgagtatgaaactttctgtgactaactttccaagtttatattacctgtcttaggattgtgctgactgacaaactatgattatattgttggtaaccctatacaagtttctgaagagaaaagaaaaacggttgatgtttttgtgcataggtaatctgtgattgattcaactgttctttttttatgttgagggcatgtttttctttaaaatagcaaataattatgttaaaacttagtgtttgaatccctttcttaatgagatatggtggctataatttttaaataaggtagctaattatgagctatttgccaacctacaagtgttttcctcagtggtaaaacaatagaagcaacataaatacatccataaattagaatatcaac

SEQ ID NO: 33440 - DNA, 96 bp, Homo sapiens
gcccagcaatctgttttaacaagccctacaggtgattctgatcatgcttcataaagttagagatcatggccttccactgttcccttcttaggcatg

SEQ ID NO: 33441 - DNA, 466 bp, Homo sapiens
ccattacatttacaaaattttctagaaagttcaaactaatttttagtgttagaaagcagatcagtggctgcctgggaatggcacactagcgagaaggaagaataaggaacacaaacaaatgttttgaggtgcttgacagatgcactatgttggttgtacttgtgatttcaaaactgtacatgtatataaatttttcaaattgtacacttttaatatgtgcaatatcaattataccacaataaagctatttttaaaaagctgaaggtaagggttgaataatttccccaactttctcaccaatcttaaataaaagcaggtcacagagcaaatttgccacaggtggcaatattatcaagtaggtgcaaaaagagtcacatactctttctttgttgttttgtaagcttaatttagttccaacgttctatctttttatgtcttccaaccacactttacagagagactttat

SEQ ID NO: 33442 - DNA, 329 bp, Homo sapiens
gcaaaaccaactcttcatcctcttgctgctttgccagggattttaaaagcactgttctggtttttcttggctcacttggttttgtttcctgaacagcacttttgagctgtccaagatactttaatatgttatctttaaatgaaactaaatcctgctcattcgcgcgcccccgcgcgcacacatacacaggcgtacacaattaccttaacttcaaataaagtgttcttttctccatactcttctattcccttaacaatccctgttctcaaaggcctttgtgttttattttctgctttataacaaaacaaaaaaacaaacacccaccgtcc

SEQ ID NO: 33443 - DNA, 454 bp, Homo sapiens
  misc_feature (118)..(118): n is a, c, g, or t
tgtattttcagtagagacgtggtttcaccgtgttagccaggatggtctcgatctcctgacctcgtgatccgcccgcctcggcctcccaaagagctgggattacaggcgtgagccaccngcgcccggcctaaatttggtcatttttttgactgatgtgctacttcttactagattagggagatgcacttagcttttaaaacctgagttcctgttacatgatgaggctcttggacgtgtgtctctgactctgcgttgcgagcagagtgagggatgcaggatgatccctggtcctgtcctgtgctcctaccatcgagcccactacctggctggggagacttgtgaacgcatctcaccaaacccttcccaacagaccctcagcgagctctagcagctgccagctacctggcccagaaaagaaatacacccatcgtctcctactgatatcatttagaaa

SEQ ID NO: 33444 - DNA, 797 bp, Homo sapiens
aaaatatttaagggcctaccacatcagtgaagattttaaggctcagtgttgtaccttgaacaacctatcattaaaaaagaggtgcaaaactgtgcccaaaattcatgaccccagaagcttaaattttggaggcagcatttacttcacttgacaacgatatattcagttgctttataggctgactcacagataccagtttagagtggtatctagagcaaaaataaataataaataaatatgctctgcagcaagtttaaactttgatttaagctgtcctttattttggccatatcacctggcaggtcctatggaattacagaggtcatggtaggttaattatgctgagcatcgtctctagtaagtcccagggagagagatgctgggtagaccagtaggcttctgaaacaaagccatgccctctatagcagagaactttattatttatttatttatttatggctctttaaagatctagaagaccatcaactttatttgaatcatatgtcacacacacacacacacacacacacacacacacacacacccctacaaaacaatctgagaaatctgaacattgactggatatttgacagccttaggaatgattattaaagatgtgatcatagaattgtgattacatttttattcaacaggtttttggggaacaggtggtgtttggtgatgttaataagttatttattggtgatttctgagattttaatgcttccatcacccgagcagtgtacccgtacccaatgcatagtcttttatccctcaccccatttcccacactttct

SEQ ID NO: 33445 - DNA, 654 bp, Homo sapiens
ggaggcggatgttgcagcgagccgagattgtgccactgcactccagcttgggcaacagatcgagactctgtctcaaataaataaataaataatgagattatgcatttttgtagtgtaggtgtttcaggtatttgtttaagcaaagcatatgttaaggttaaaagcctttggaacactctgcccccacatcctggaagcgttttctttcctcccatccagttaggtaaagctacttgccatctcagtgtattcagtcagcttttaggaaatagattatttctgatgaatgaggatcctgctgcttcacaagtagatgttgacactcatggctccccaaagtctgcctcaaatctatttctgtgggccaggtatggtggctcacgcctgtaatcccagtactttgggagactgaggtgggcagatcacttgaacctaggagtttgagaccagcctgggcaatgtggagaaaccctatgtctacaaaaaataccatcaccaacaaaaaattagctgggcatggagacgtgtgcctgtagccccagctacttgggaggctgaggtgggaggatcacttgagactgggaggttgaggctgcagtgagccatgactgcaccagtgcactcaacctgggcaacagggcgagactctgactc

SEQ ID NO: 33446 - DNA, 1748 bp, Homo sapiens
ggaagggctggtggttcctgtaaaagtttgtgctccccgcgcctttccttccttccctcgtctttggcgcctgcgggcaccgggagtcctgggagagggaggaggaacggcgaatcggcggggcgtgtccttcacgccgccccgtagctcggggccgaagctggcgcagcgcgcgactttttgaaagccaggagggttcgaattgcaacggcagctgccgggcgtatgtgttggtgctagaggcagctgcagggtctcgctgggggccgctcgggaccaattttgaagaggtacttggccacgacttattttcacctccgacctttccttccaggcggtgagactctggactgagagtggctttcacaatggaagggatcagtaatttcaagacaccaagcaaattatcagaaaaaaagaaatctgtattatgttcaactccaactataaatatcccggcctctccgtttatgcagaagcttggctttggtactggggtaaatgtgtacctaatgaaaagatctccaagaggtttgtctcattctccttgggctgtaaaaaagattaatcctatatgtaatgatcattatcgaagtgtgtatcaaaagagactaatggatgaagctaagattttgaaaagccttcatcatccaaacattgttggttatcgtgcttttactgaagccaatgatggcagtctgtgtcttgctatggaatatggaggtgaaaagtctctaaatgacttaatagaagaacgatataaagccagccaagatccttttccagcagccataattttaaaagttgctttgaatatggcaagagggttaaagtatctgcaccaagaaaagaaactgcttcatggagacataaagtcttcaaatgttgtaattaaaggcgattttgaaacaattaaaatctgtgatgtaggagtctctctaccactggatgaaaatatgactgtgactgaccctgaggcttgttacattggcacagagccatggaaacccaaagaagctgtggaggagaatggtgttattactgacaaggcagacatatttgcctttggccttactttgtgggaaatgatgactttatcgattccacacattaatctttcaaatgatgatgatgatgaagataaaacttttgatgaaagtgattttgatgatgaagcatactatgcagcgttgggaactaggccacctattaatatggaagaactggatgaatcataccagaaagtaattgaactcttctctgtatgcactaatgaagaccctaaagatcgtccttctgctgcacacattgttgaagctctggaaacagatgtctagtgatcatctcagctgaagtgtggcttgcgtaaataactgtttattccaaaatatttacatagttactatcagtagttattagactctaaaattggcatatttgaggaccatagtttcttgttaacatatggataactatttctaatatgaaatatgcttatattggctataagcacttggaattgtactgggttttctgtaaagttttagaaactagctacataagtactttgatactgctcatgctgacttaaaacactagcagtaaaacgctgtaaactgtaacattaaattgaatgaccattacttttattaatgatctttcttaaatattctatattttaatggatctactgacattagcactttgtacagtacaaaataaagtctacatttgtttaaaacactgaa

SEQ ID NO: 33447 - DNA, 474 bp, Homo sapiens
atgatccccctctgacatttagtattatgttcaactccaactataaatatcccggcctctccgtttatgcagaagcttggctttggtactggggtaaatgtgtacctaatgaaaaggtaagtataagatttcagattaaccttttttcatgcaactataattctactgtacttggagacaaagaagtagtctgaaaattccagtatttagattcggttgtctgctcctgatcctggctgatggctgtattccggtccctagacccttttgtaactttgcctgtagctctgcctctgcttctctcctagcttcctcctgatgggttattaaaggggaagtcatttactttttaatttttccttggcttccataagaaggggaagtggcaggggaaagggttcctttgtggtaattaaaccagattcttcatgagaaaacctcaaagaggaagccagttgattgggttgacgtcag

SEQ ID NO: 33448 - DNA, 231 bp, Homo sapiens
ggctccagagtctgtaatctcaacatccacattctatattcctactaatttgtaagagaattgctgtttctctacatacctgccaactgaccagcttcttgaatatttaccaacctgaaaggtagaaagtaatccttattgaggttgagtgtatttttacattttctggctacactgattaacctgtgaactacttgttcaaatcgttcgcctgtttccctttgggttgct

SEQ ID NO: 33449 - DNA, 2164 bp, Homo sapiens
ggaagggctggtggttcctgtaaaagtttgtgctccccgcgcctttccttccttccctcgtctttggcgcctgcgggcaccgggagtcctgggagagggaggaggaacggcgaatcggcggggcgtgtccttcacgccgccccgtagctcggggccgaagctggcgcagcgcgcgactttttgaaagccaggagggttcgaattgcaacggcagctgccgggcgtatgtgttggtgctagaggcagctgcagggtctcgctgggggccgctcgggaccaattttgaagaggtacttggccacgacttattttcacctccgacctttccttccaggcggtgagactctggactgagagtggctttcacaatggaagggatcagtaatttcaagacaccaagcaaattatcagaaaaaaagaaatctgtattatgttcaactccaactataaatatcccggcctctccgtttatgcagaagcttggctttggtactggggtaaatgtgtacctaatgaaaagatctccaagaggtttgtctcattctccttgggctgtaaaaaagattaatcctatatgtaatgatcattatcgaagtgtgtatcaaaagagactaatggatgaagctaagattttgaaaagccttcatcatccaaacattgttggttatcgtgcttttactgaagccaatgatggcagtctgtgtcttgctatggaatatggaggtgaaaagtctctaaatgacttaatagaagaacgatataaagccagccaagatccttttccagcagccataattttaaaagttgctttgaatatggcaagagggttaaagtatctgcaccaagaaaagaaactgcttcatggagacataaagtcttcaaatgttgtaattaaaggcgattttgaaacaattaaaatctgtgatgtaggagtctctctaccactggatgaaaatatgactgtgactgaccctgaggcttgttacattggcacagagccatggaaacccaaagaagctgtggaggagaatggtgttattactgacaaggcagacatatttgcctttggccttactttgtgggaaatgatgactttatcgattccacacattaatctttcaaatgatgatgatgatgaagataaaacttttgatgaaagtgattttgatgatgaagcatactatgcagcgttgggaactaggccacctattaatatggaagaactggatgaatcataccagaaagtaattgaactcttctctgtatgcactaatgaagaccctaaagatcgtccttctgctgcacacattgttgaagctctggaaacagatgtctagtgatcatctcagctgaagtgtggcttgcgtaaataactgtttattccaaaatatttacatagttactatcagtagttattagactctaaaattggcatatttgaggaccatagtttcttgttaacatatggataactatttctaatatgaaatatgcttatattggctataagcacttggaattgtactgggttttctgtaaagttttagaaactagctacataagtactttgatactgctcatgctgacttaaaacactagcagtaaaacgctgtaaactgtaacattaaattgaatgaccattacttttattaatgatctttcttaaatattctatattttaatggatctactgacattagcactttgtacagtacaaaataaagtctacatttgtttaaaacactgaaaaaaaaaaaaaaaaaaaaaaaaaaaaaaaaaaaaaaaaaaaaaaaaaaagggggggggggaaaaaaaatccccgggggggggcaaaaataggggaccaccattttgttgaaaagaggggggcccaaaataagaggagacccgaaatacatagcacagccgaccacggggccccagattaaacaaaaacgcgctgcggcttaggggaaaacagcgcctagtggtgagacagctctggggaaacgacaaccacaaccactggggggcgggaaccaagcgtggagaaccacctcactacgagaaattcaaggcccggaggagacaatatacagctggcggcggcaaccagggtgctaaccgctacgaaaagtcgcggcaaagaaaagtggccgcaccgacactgatcaggaaaagttat

SEQ ID NO: 33450 - DNA, 1969 bp, Homo sapiens
ggaagggctggtggttcctgtaaaagtttgtgctccccgcgcctttccttccttccctcgtctttggcgcctgcgggcaccgggagtcctgggagagggaggaggaacggcgaatcggcggggcgtgtccttcacgccgccccgtagctcggggccgaagctggcgcagcgcgcgactttttgaaagccaggagggttcgaattgcaacggcagctgccgggcgtatgtgttggtgctagaggcagctgcagggtctcgctgggggccgctcgggaccaattttgaagaggactgagagtggctttcacaatggaagggatcagtaatttcaagacaccaagcaaattatcagaaaaaaagaaatctgtattatgttcaactccaactataaatatcccggcctctccgtttatgcagaagcttggctttggtactggggtaaatgtgtacctaatgaaaagatctccaagaggtttgtctcattctccttgggctgtaaaaaagattaatcctatatgtaatgatcattatcgaagtgtgtatcaaaagagactaatggatgaagctaagattttgaaaagccttcatcatccaaacattgttggttatcgtgcttttactgaagccaatgatggcagtctgtgtcttgctatggaatatggaggtgaaaagtctctaaatgacttaatagaagaacgatataaagccagccaagatccttttccagcagccataattttaaaagttgctttgaatatggcaagagggttaaagtatctgcaccaagaaaagaaactgcttcatggagacataaagtcttcaaatgttgtaattaaaggcgattttgaaacaattaaaatctgtgatgtaggagtctctctaccactggatgaaaatatgactgtgactgaccctgaggcttgttacattggcacagagccatggaaacccaaagaagctgtggaggagaatggtgttattactgacaaggcagacatatttgcctttggccttactttgtgggaaatgatgactttatcgattccacacattaatctttcaaatgatgatgatgatgaagataaaacttttgatgaaagtgattttgatgatgaagcatactatgcagcgttgggaactaggccacctattaatatggaagaactggatgaatcataccagaaagtaattgaactcttctctgtatgcactaatgaagaccctaaagatcgtccttctgctgcacacattgttgaagctctggaaacagatgtctagtgatcatctcagctgaagtgtggcttgcgtaaataactgtttattccaaaatatttacatagttactatcagtagttattagactctaaaattggcatatttgaggaccatagtttcttgttaacatatggataactatttctaatatgaaatatgcttatattggctataagcacttggaattgtactgggttttctgtaaagttttagaaactagctacataagtactttgatactgctcatgctgacttaaaacactagcagtaaaacgctgtaaactgtaacattaaattgaatgaccattacttttattaatgatctttcttaaatattctatattttaatggatctactgacattagcactttgtacagtacaaaataaagtctacatttgtttaaaacactgaaccttttgctgatgtgtttatcaaatgataactggaagctgaggagaatatgcctcaaaaagagtagctccttggatacttcagactctggttacagattgtcttgatctcttggatctcctcagatctttggtttttgctttaatttattaaatgtattttccatactgagtttaaaatttattaatttgtaccttaagcatttcccagctgtgtaaaaacaataaaactcaaataggatgataaagaataaaggacactttgggtaccagaaaaaatc

SEQ ID NO: 33451 - DNA, 1835 bp, Homo sapiens
gacccacgcgtcgcggacgcgtgggtcgacccacgcgtcgggtgctagaggcagctgcagggtctcgctgggggccgctcgggaccaattttgaagaggtacttggccacgacttattttcacctccgacctttccttccaggcggtgagactctggactgagagtggctttcacaatggaagggatcagtaatttcaagacaccaagcaaattatcagaaaaaaagaaatctgtattatgttcaactccaactataaatatcccggcctctccgtttatgcagaagcttggctttggtactggggtaaatgtgtacctaatgaaaagatctccaagaggtttgtctcattctccttgggctgtaaaaaagattaatcctatatgtaatgatcattatcgaagtgtgtatcaaaagagactaatggatgaagctaagattttgaaaagccttcatcatccaaacattgttggttatcgtgcttttactgaagccaatgatggcagtctgtgtcttgctatggaatatggaggtgaaaagtctctaaatgacttaatagaagaacgatataaagccagccaagatccttttccagcagccataattttaaaagttgctttgaatatggcaagagggttaaagtatctgcaccaagaaaagaaactgcttcatggagacataaagtcttcaaatgttgtaattaaaggcgattttgaaacaattaaaatctgtgatgtaggagtctctctaccactggatgaaaatatgactgtgactgaccctgaggcttgttacattggcacagagccatggaaacccaaagaagctgtggaggagaatggtgttattactgacaaggcagacatatttgcctttggccttactttgtgggaaatgatgactttatcgattccacacattaatctttcaaatgatgatgatgatgaagataaaacttttgatgaaagtgattttgatgatgaagcatactatgcagcgttgggaactaggccacctattaatatggaagaactggatgaatcataccagaaagtaattgaactcttctctgtatgcactaatgaagaccctaaagatcgtccttctgctgcacacattgttgaagctctggaaacagatgtctagtgatcatctcagctgaagtgtggcttgcgtaaataactgtttattccaaaatatttacatagttactatcagtagttattagactctaaaattggcatatttgaggaccatagtttcttgttaacatatggataactatttctaatatgaaatatgcttatattggctataagcacttggaattgtactgggttttctgtaaagttttagaaactagctacataagtactttgatactgctcatgctgacttaaaacactagcagtaaaacgctgtaaactgtaacattaaattgaatgaccattacttttattaatgatctttcttaaatattctatattttaatggatctactgacattagcactttgtacagtacaaaataaagtctacatttgtttaaaacactgaaccttttgctgatgtgtttatcaaatgataactggaagctgaggagaatatgcctcaaaaagagtagctccttggatacttcagactctggttacagattgtcttgatctcttggatctcctcagatctttggtttttgctttaatttattaaatgtattttccatactgagtttaaaatttattaatttgtaccttaagcatttcccagctgtgtaaaaacaataaaactcaaataggatgataaagaataaaggacactttgggtaccagaaaaaatc

SEQ ID NO: 33452 - DNA, 1912 bp, Homo sapiens
atctcttctttaaatttcctaatgtttttttcttcaggatcctataactcatctctgatacatataattaaatatttaataagttgtagtccaacatgctcaaatggaaaaattggaaagttacaattttcaggtttaaagttggtaacattccatctttacccttcaaattcttttcatcctctcccttccacagtatagatagtaagacttgtttcagtatattagatcttacctcccaattgaaatggaaatgtagcagaggtgttcatagtccaaactattttaaattctgtttttaaaagcaaatttctttcaagctttttcccaaaaatttggaagtcattttaaaaagtattgtggttttattgttttctatcctttttaaatgaatttttttcttagatctccaagaggtttgtctcattctccttgggctgtaaaaaagattaatcctatatgtaatgatcattatcgaagtgtgtatcaaaagagactaatggatgaagctaagattttgaaaagccttcatcatccaaacattgttggttatcgtgcttttactgaagccaatgatggcagtctgtgtcttgctatggaatatggaggtgaaaagtctctaaatgacttaatagaagaacgatataaagccagccaagatccttttccagcagccataattttaaaagttgctttgaatatggcaagagggttaaagtatctgcaccaagaaaagaaactgcttcatggagacataaagtcttcaaatgttgtaattaaaggcgattttgaaacaattaaaatctgtgatgtaggagtctctctaccactggatgaaaatatgactgtgactgaccctgaggcttgttacattggcacagagccatggaaacccaaagaagctgtggaggagaatggtgttattactgacaaggcagacatatttgcctttggccttactttgtgggaaatgatgactttatcgattccacacattaatctttcaaatgatgatgatgatgaagataaaacttttgatgaaagtgattttgatgatgaagcatactatgcagcgttgggaactaggccacctattaatatggaagaactggatgaatcataccagaaagtaattgaactcttctctgtatgcactaatgaagaccctaaagatcgtccttctgctgcacacattgttgaagctctggaaacagatgtctagtgatcatctcagctgaagtgtggcttgcgtaaataactgtttattccaaaatatttacatagttactatcagtagttattagactctaaaattggcatatttgaggaccatagtttcttgttaacatatggataactatttctaatatgaaatatgcttatattggctataagcacttggaattgtactgggttttctgtaaagttttagaaactagctacataagtactttgatactgctcatgctgacttaaaacactagcagtaaaacgctgtaaactgtaacattaaattgaatgaccattacttttattaatgatctttcttaaatattctatattttaatggatctactgacattagcactttgtacagtacaaaataaagtctacatttgtttaaaacactgaaccttttgctgatgtgtttatcaaatgataactggaagctgaggagaatatgcctcaaaaagagtagctccttggatacttcagactctggttacagattgtcttgatctcttggatctcctcagatctttggtttttgctttaatttattaaatgtattttccatactgagtttaaaatttattaatttgtaccttaagcatttcccagctgtgtaaaaacaataaaactcaaataggatgataaagaataaaggacactttgggtaccagaaaaaatc

SEQ ID NO: 33453 - DNA, 1714 bp, Homo sapiens
ggaagggctggtggttcctgtaaaagtttgtgctccccgcgcctttccttccttccctcgtctttggcgcctgcgggcaccgggagtcctgggagagggaggaggaacggcgaatcggcggggcgtgtccttcacgccgccccgtagctcggggccgaagctggcgcagcgcgcgactttttgaaagccaggagggttcgaattgcaacggcagctgccgggcgtatgtgttggtgctagaggcagctgcagggtctcgctgggggccgctcgggaccaattttgaagaggtacttggccacgacttattttcacctccgacctttccttccaggcggtgagactctggactgagagtggctttcacaatggaagggatcagtaatttcaagacaccaagcaaattatcagaaaaaaagaaatctgtattatgttcaactccaactataaatatcccggcctctccgtttatgcagaagcttggctttggtactggggtaaatgtgtacctaatgaaaagtatctgcaccaagaaaagaaactgcttcatggagacataaagtcttcaaatgttgtaattaaaggcgattttgaaacaattaaaatctgtgatgtaggagtctctctaccactggatgaaaatatgactgtgactgaccctgaggcttgttacattggcacagagccatggaaacccaaagaagctgtggaggagaatggtgttattactgacaaggcagacatatttgcctttggccttactttgtgggaaatgatgactttatcgattccacacattaatctttcaaatgatgatgatgatgaagataaaacttttgatgaaagtgattttgatgatgaagcatactatgcagcgttgggaactaggccacctattaatatggaagaactggatgaatcataccagaaagtaattgaactcttctctgtatgcactaatgaagaccctaaagatcgtccttctgctgcacacattgttgaagctctggaaacagatgtctagtgatcatctcagctgaagtgtggcttgcgtaaataactgtttattccaaaatatttacatagttactatcagtagttattagactctaaaattggcatatttgaggaccatagtttcttgttaacatatggataactatttctaatatgaaatatgcttatattggctataagcacttggaattgtactgggttttctgtaaagttttagaaactagctacataagtactttgatactgctcatgctgacttaaaacactagcagtaaaacgctgtaaactgtaacattaaattgaatgaccattacttttattaatgatctttcttaaatattctatattttaatggatctactgacattagcactttgtacagtacaaaataaagtctacatttgtttaaaacactgaaccttttgctgatgtgtttatcaaatgataactggaagctgaggagaatatgcctcaaaaagagtagctccttggatacttcagactctggttacagattgtcttgatctcttggatctcctcagatctttggtttttgctttaatttattaaatgtattttccatactgagtttaaaatttattaatttgtaccttaagcatttcccagctgtgtaaaaacaataaaactcaaataggatgataaagaataaaggacactttgggtaccagaaaaaatc

SEQ ID NO: 33454 - DNA, 703 bp, Homo sapiens
tgagtgtatttttacattttctggctacactgattaacctgtgaactacttgttcaaatcgttcgcctgtttccctttgggttgctgccttttcgtgatttgtagctcctgccttcataaccatcttgcttgtttcagtgactgaccctgaggcttgttacattggcacagagccatggaaacccaaagaagctgtggaggagaatggtgttattactgacaaggcagacatatttgcctttggccttactttgtgggaaatgatgactttatcgattccacacattaatctttcaaatgatgatgatgatgaaggtatgaatacaatttctaacataaatcccaatctcttcatttcacactaaagattatataattttatctttctaagatatgtattagtactgatgactgatttggtaccaccaaggtttaatctcacacaaatgagacatagattgagaatagggagaaaaattgaggctatccagagaagcaaaacattatcttaaaaactcccctttcctgagaaaatgattgattggaaaactatcacaggaagggtaaaagtaggggtcgataacctataaatccaagactaaagcaaatctacttgatggcaggacaattgaagacatttccattctgtctgtggcagaatggaaagcatactggaccataaattcttgtttcaggagaaggg

SEQ ID NO: 33455 - DNA, 2027 bp, Homo sapiens
ggaagggctggtggttcctgtaaaagtttgtgctccccgcgcctttccttccttccctcgtctttggcgcctgcgggcaccgggagtcctgggagagggaggaggaacggcgaatcggcggggcgtgtccttcacgccgccccgtagctcggggccgaagctggcgcagcgcgcgactttttgaaagccaggagggttcgaattgcaacggcagctgccgggcgtatgtgttggtgctagaggcagctgcagggtctcgctgggggccgctcgggaccaattttgaagaggtacttggccacgacttattttcacctccgacctttccttccaggcggtgagactctggactgagagtggctttcacaatggaagggatcagtaatttcaagacaccaagcaaattatcagaaaaaaagaaatctgtattatgttcaactccaactataaatatcccggcctctccgtttatgcagaagcttggctttggtactggggtaaatgtgtacctaatgaaaagatctccaagaggtttgtctcattctccttgggctgtaaaaaagattaatcctatatgtaatgatcattatcgaagtgtgtatcaaaagagactaatggatgaagctaagattttgaaaagccttcatcatccaaacattgttggttatcgtgcttttactgaagccaatgatggcagtctgtgtcttgctatggaatatggaggtgaaaagtctctaaatgacttaatagaagaacgatataaagccagccaagatccttttccagcagccataattttaaaagttgctttgaatatggcaagagggttaaagtatctgcaccaagaaaagaaactgcttcatggagacataaagtcttcaaatgttgtaattaaaggcgattttgaaacaattaaaatctgtgatgtaggagtctctctaccactggatgaaaatatgactgtgactgaccctgaggcttgttacattggcacagagccatggaaacccaaagaagctgtggaggagaatggtgttattactgacaaggcagacatatttgcctttggccttactttgtgggaaatgatgactttatcgattccacacattaatctttcaaatgatgatgatgatgaagataaaacttttgatgaaagtgattttgatgatgaagcatactatgcagcgttgggaactaggccacctattaatatggaagaactggatgaatcataccagaaagtaattgaactcttctctgtatgcactaatgaagaccctaaagatcgtccttctgctgcacacattgttgaagctctggaaacagatgtctagtgatcatctcagctgaagtgtggcttgcgtaaataactgtttattccaaaatatttacatagttactatcagtagttattagactctaaaattggcatatttgaggaccatagtttcttgttaacatatggataactatttctaatatgaaatatgcttatattggctataagcacttggaattgtactgggttttctgtaaagttttagaaactagctacataagtactttgatactgctcatgctgacttaaaacactagcagtaaaacgctgtaaactgtaacattaaattgaatgaccattacttttattaatgatctttcttaaatattctatattttaatggatctactgacattagcactttgtacagtacaaaataaagtctacatttgtttaaaacactgaaccttttgctgatgtgtttatcaaatgataactggaagctgaggagaatatgcctcaaaaagagtagctccttggatacttcagactctggttacagattgtcttgatctcttggatctcctcagatctttggtttttgctttaatttattaaatgtattttccatactgagtttaaaatttattaatttgtaccttaagcatttcccagctgtgtaaaaacaataaaactcaaataggatgataaagaataaaggacactttgggtaccagaaaaaatc

SEQ ID NO: 33456 - DNA, 327 bp, Homo sapiens
ccacagagtccttgtgctcagtgtagtggctgagctggaggatgccctggaactcggagcacacagcactgacttgctatggtacctgtgcagtgaaattgaaggcagaatcaccaggatggaacacaggtcttgcaggatcacggaaaaccttcttggagttgtcttgacaccactgatgtcgagtgtctgggtgcttgtaggatgacctgccactcagtccaggggcaggagcaacggggagatcccacaagcaaagtgaactgggggatgggttgaaggggctccaggcaactgagccctactcgcaggtcctcagccttggcc

SEQ ID NO: 33457 - DNA, 883 bp, Homo sapiens
tctgagatggagtctcactctgtctccaggctagagtgcagtggcccagtcttggctcactgcaacctctgcctctcgggttcaagcgattctcttgcctcagcctcccgagtagctgggactacaggtgcgtgccaccatgcccagctaatttttgtatttttagtagagatgggttttcaccatgttggccagtatggtctcgagctcttgaccatgatccgcccacctcggcctcccacagtgctgggattacaggcgtgagccaccgtgcgctgagtgatacgtggttccctttaacttcgcacatggtaaaatcagtttctttccatgatctgtttcacagtctctgtgaagctacctaccacaaagaagtagtgagtgatgactttctagaatctaagtatatggcatgtatttattataagtaaaacattaagtttgctgattgtttacttgtgataaacaattattgtgaactttatttgtgctggacataagtgtctgttttacagtgaaattccattatagagggttacttggtagagaaatgcaaattgtagttggtcatatactaaaatttgaactttttacatatcaatacttacaaataggtgtttactttcccacaaaactccagaacatttaagagtctcgggtgtttaaatttgatgagatttacccaaacaaatagtgaacaaaaggtttatgaaaataagttatgaaactaaaatacttaataaacatccagtgacaataaaaaaacactagacatccagcagggggagccaggtggtacaggggcactcgaggctgcagtgggagcccatggggacactatacaagggcacaagttttccaactatgactactaacctgatcg

SEQ ID NO: 33458 - DNA, 430 bp, Homo sapiens
ttttttttttgaggtggagtctcagtctgtcacccaggctggagtgcactggtgctgtctgcgctcactgcaacctccacctcctaggatcaagcgattttcctgccttagcctcctgagtagctgaaattacaggtgcatgccaccacaaccagttaatttttgtatttttagcagaaacggggtttcaccgtaatagccaggttggtctcaaactcctgacctcgtgatctgcctgactcagcctctcaaagtgctggaattacatgcgtgatccaccgcgcccggcccagaaacttttattgacacagcaagtgacattccgtatctagatgagacagagtacgggtgatgtcttcagagatgacaacattcacagtgaaagatgagaaactaaaatctggctgggcacagcggcacatgcctgtta

SEQ ID NO: 33459 - DNA, 570 bp, Homo sapiens
gcccacctgcaacattgggggtcacatttcaacatgagatttggaggggacaaaacatccaaactgtatcagcttctttgtggtgacatttaaatctttctattatccccccattccctgtgaggggaatttggttttagacccttgactaagttcaggttcaacatttaggggaagaatccttcatatgtggtgctgtgtgcctaacctcaggaagaatacattcatttttccaccttcagagataatgagatggatcaaggggttccgtaaatctgtccattgtaagggcatcctccagccttctctcatgtaatggttccatccattacatatcacctgactcaactatttaggacttacaaaatgaggcaatcctaattttatcattcctaccctatgtagtatttggaaatctgtttaaaaaaaaaaaactcttccacataaaatagagctatttggtggaaatgcagtatgtataagaaagttagggtagccaggtgcggtggctcatgcctgtattcccagcacttcgggaggccaaggcgggtggatcacctgaggtcggga

SEQ ID NO: 33460 - DNA, 398 bp, Homo sapiens
tcgaactcctgacctaaggtgatcggccttcctcggcctcccaaagtgctggaattacaggcatgagccactgtgtctggcacaattaatattcttttgtagaaacttgtgtgaatggtttacataaacttgtgtgagaagagatgtatcttgtctcactaactcttatcttgttaagttttcccccagaaactgtgagtgtccaccctcttgaaggcgcagtggcggaatgaagttcacagaatggaagatgtgagctggtctgagtgatgcaaggggtggtcttgggtgggctcagttcctgctccctcagaggcctttggatctatttttgctgtttctgtgaactccgccagtgctttttggtgcttttgcttcaaacagccccatacccgtga

SEQ ID NO: 33461 - DNA, 696 bp, Homo sapiens
gccactgcccgaggtgagaagttctggtaggtcagggttagttgcttttcctttctcagtacaaataagtcagtcgggttacttcatgtagaacctcttctcctctcaacaaatgttgaaatgtttgtgtttttctccccatgatgaggaaagaagcctggagaggctagaggttgcagctgttcaagtaaagttttgtgattaaaaccccattgtaggtattccacaaatatttgaatcaaattgatttgttagctccagggtgtagggatagagtctgggctgagctgtttgatctgcacagtttttctgcttgaaacagatgctgtgcttgaaacttaagcattttctcgcctataatcttatatttatgctatttgcctggtccctgaaggcattttaaggacgtgacgctgtaccacctcagccctgggtgccgaattgatttgtttgtatgtgaccctggtaatagaaaagcttcatcagtgggtgccatctttggaatctatctatcttttgaaaacattgcacctttgagttcctgtggcactgttgtccatccacttctgtttttctgagtgtcctctgactttgccctttttatttgagattcctcctccattctcagctagatattcactccctcactggcttccctttctcttctatcctttttcatctcctttcctccctccc

SEQ ID NO: 33462 - DNA, 447 bp, Homo sapiens
agctcaaatggcctttgaaaagattgatgcaatatatcctcccgttttgagaattcaagtattatattcacttttcttgctcaacactggcccaaaccttgctttagctttttctccttcctattatagcagtggagaccgaccctgaatctgtagatagggagagcccagagcccatactctatttgggaagggaggctggaaactttcctgaatctgctttattcagcctttccatcagcctgacaccaagtcagttgctctgaaaaactgggtatgaagagggaacagatgaaagaggctaatgcccttctaagccactctctagcaccaccactactttcccaatgagcgcctacctttgcagccagaaaaattatgtatattgttgttaggaattgctgtttcaaactattattgcttaaatgcttattaaatgtatgttct

SEQ ID NO: 33463 - DNA, 343 bp, Homo sapiens
tccaaattgtattgttttcaacaagttctaaaatgtaattaggattatattgtgatggcatagtatattttccttccttaatcttgatcttattaagagccattaatagtttccacaaatccttgtttagctcctacagcaggccatatcatttgaggttgaggtgccactatactgccatgtttccagataataggaactcttgccgtacttcttatcatttctgctatctgatcgttctgttcagacaagctgaacatagtgtggccatggcacacagactgagaggtgcagtttatgctaaacatctccttaggggaccaatcaataatgattccatagg

SEQ ID NO: 33464 - DNA, 1000 bp, Homo sapiens
ttttttattttttattttttatgacacggagtctcactctgtcgcccaggctggaatgcagtggcacgatcttggctccctgaaacctccgcctccagggttcaagtgattctcccacttcggcctctcgagtagctgggactaccggcatgtgccaccacacccagctaatttttgtatttttagtagagatggggtttcaccatgttggccaggctggtcttgaactcctgacctcaagtgattcgcgtgctttggcctgccaaagtgctgggattacaggtgtcagccactgtgcccggcctcttttttgtgtttaaaatatgacttgaaaaatgtattaggctcatgggatgatcagagcacagaaaactgttcatttgggaagaaaatattctatatttggcatttaacccctcacctcagaattcccaccttagtattggcagcgttccctctacttttcagaacttttagtcctcagcctttggtgagccataaacttccccaattcctactttactctatgccctcatatatatatttagtttgttctatacgtttatacttactaagagtgctttgcaaattttctcaaattattttatggatagctctgtctttctgaactgtaagttaaactactcctaaaaatgagctgattttctacttctttcaaaactgctcttctcctcaattgtactagatgcagtactatgcatataaaatgatctcaataaaagcatgaaagcttatttcctgtctaaagaggcacataatccatttatctcaccatttgaggtagaaaaagaacggactataacagtccaaatttactactacatccttttcaaaaatctgatctcgattccgttttctatattcccatcattctcaattctgacttaagtgatggaagattaattccaaagacagtcaactagagctaagacaaagtagttaagtacaagaaaattaagtgctaatttattaagttatc

SEQ ID NO: 33465 - DNA, 483 bp, Homo sapiens
gcggccgctactactactagccgcctactactactaaattcgcggccgcgtcgacggagtgaacccagaaggctttgagccatcacaacactgcagcaggcgagtgtagcaggtggacacagagacggcccgaggcaccatggaggggttcactgccgcaagaggcattctgctttggtggcatgcccctcagagtgggtgtcaggggtctgtccggggctccagccctagctctgatgctgactttgggacattgggcaagttgccatagctctctggcgtcagtagtctcatccatgagttgataactctagatgtttactaaggtgacattaaattctaaaaatctatgtctgaaaatgatacttggataaaaatgacaagaaagcacataaagcattttagaaaaatgtctagctggccaagcgcggtggctcacgcctgtaatcccagcattttgggaggctgaggcgggcagatcac

SEQ ID NO: 33466 - DNA, 885 bp, Homo sapiens
ggggagtcagaattggggttggggtcccgtcgcaataggcctgggagatatttgggggctgtggataaacaaaacacatcctctggctcaggcagggtcccaggctgcaccaaggaacgagctgcctcaccatcagggtgcagagccatctgcaggtgatgggcagctgcgtttctaattcactcttaaactccaggtgaagccagggagagaaattccaaacatggcaaggcagggaaaggctgaaaatggggccagagttggtagggggaccatgtgtggaaagcatggtgcctgggagaggaagttgataggcaaagccccctgggagaatccactgacctctgggagccagccagttggtactgccctggtgggtgggacctcaggtgtgagagggaaagggccaggggacctgaggccttaccttgcagagaccgcgtattgtaagagattagaaatgcttgcaaaaatttaagctaatggaattagatatacttctactgcaaaaataaaaataaaaataaatgaaagtctttgtcataaggagagagagagagatctagtaagtgcagtaaaaaaagatgcatgggtcgtgtggtttggacatggacttaaacagaacagaggtgaccggggtggtgtgtgggtgagcatgaggcctgcacgcatgcagcagtgtgcttcaaagaaaggtcctggtgggagacaagaactgaacaaaagagacacgtacttgaaaatgtgcctccctggagacgtggcaaaggaatgggccttcatgggagcaggggagcggaaaccaccggatgctggatttccaccccaagggcaggcaaaagaaggctttggctggctcactgggcatgactccaataccagggt

SEQ ID NO: 33467 - DNA, 1564 bp, Homo sapiens
gtgccactacacttcagccttggcaatagagcgagaccctctctccaacaaaaaaagaaaaaattgttaatatttatttagtactcaattggtgccagacactttacatgcaccatctctttgatcctatgttataagcctataacacagaaaccatctacctcatttaaggaaacagagaggttaaataacttgtccaaaccatacagcaagttactggcaagactggcttgaacacaagtctgttgggctccaaagcccatgtccttaaacagtaccatgagagaactcttaatggacaagatatatccagtctactcatttaccccatgattctgtacagaaacttagcacagcacatttatatgagcattcaacatatgaagtagttaacagattaatatagttaccaaactaaaattggcctatgttaatttctattctcagttcttctgtgcccttcctcctcttaaaaaaaaaaaaaaaaagagagagagagagaaagggccaggtgtggtggctcacgcctgtaatcccagcactttgggaggccgaggcagctggatcacctgaggtcaggaattcgacaccagcccggccaacaaggctaaaccttgtctctactaaaaatacaaaaattagccaggtgtggtggcacatacctgtagtcccagctactgaggaggctgaggcaggagaatcgcttgaacccaggaggtgaaggttgcagtaagccgaggtcacaccactgcactccagcctggatgacagagcgagactctgtctcaaaaaaagaataaaaagaataaaaagaatgaaagaatgaaagaaagagagagaaagaaagcaagccagccagccagccagccagccaaggtggttcatgcctataatcccagccctttgggaggttgtggcaggaggatcacttaaatctgggagttcaaaacccacctggacaatatagcaagaccccaactcttgaaaaaaaattgctttaattagctagacgtggtggcatgaacctgtgttgggagactaaggtgggaagatcgctcgagcccaggagtttgaggctgcagtaagctataatcatgccactgcactctagcatggactacagagtaagactgtctaaaaaaagaaaaaaaagaaaaagaagctttttgcccactgttgcagttaactggcaaacttgtgtaataaattaactaacagaactggtttagcaacaaatgagatgcacaaggtctttaaattataaccctaggtatgttggtgatttgaaaggtgacctaacagcatttaaagtaagttatattttatatttatggggctttcaaaaccacagtcaaaaataagaacccaagcctgagtaacatggcaaaaccccatctgtacagaaaacacaaaaattagccaggcgtggtggtgcacacctgtagtcccagctgctaaggaagctgatgtgagaggattgtttcagctcaggaggcagaaggtacagtgagccgagatcatgccactgcactcgagcctggacagcagagtgagaccctgcctt

SEQ ID NO: 33468 - DNA, 320 bp, Homo sapiens
atgtttcaagttattaataaatgcaaaataaatattttgaatgtttgagttcacattcaaaaaagaaattcaataccttaatcttttaattctaaatctttccctaagatttcactgacaagttagttaagtcacatattttagacattagtacatatatatccatggtctttattgcattctataagatcggtttgttatacttagctaactttctgctgttagattcaaccttagatgggataaatgaggaacagccagcactttagcattgtataaaaccctacttcagaattgtagtgactcttccctcaagcact

SEQ ID NO: 33469 - DNA, 420 bp, Homo sapiens
gaaatatgtttttatacctctcagtttcagttagaggcatattttgtgtaatatttatggcttaaaatggactaaaggtcctgttcttgccttttctgaacttgccgcttttgcattctttgagttcagtttaaagacacttactttaactccattttaaaccctcgggctagaaatcgtaccactgttaattagccacgttatttggtctaacagtttttgtttatcattctgaaactgagcttatctaatacattgataaattatttcaaaggtatttttatagttcaaatcgcttcacttttaccctgacacgtataaatgactaggaatgaccttcagatagcgtttagcaactgtaaccaatctgacaataatgtgttcatcaggtacctgtggattaaatcacatactggcata

SEQ ID NO: 33470 - DNA, 427 bp, Homo sapiens
gatctaggttaccagagctagacaacatcttgacctataattctaacaggtacttatcagatacatgaaaacaaatgccaactgagtataggagatctcattttctacataaaggaaacatatatggctaaaaatgtcttttgatggtgtaaaaattttatgaatctgataaccacggggagggataatggaagtatgacttcaatctcccctcctccccttttacctttctttgcctatttctgagtatctctaggctaccaaatgtttcagtctgaatgtagaaaaaacaaaataatgagcaggaatagaccgactggcacaaaatgtaccaaatggaaacaatttccagacggaatgtacactgacatgcgcgacttactgtaaataattatacaaagcacaatacaatgagaacaagagcaaa

SEQ ID NO: 33471 - DNA, 299 bp, Homo sapiens
aaaattagaataattcatcttcatgaagagctacatgataaaccactgacttatttttatttgcttaacctgtttttttgcttcaggaacatctgtttttgtttttttggtctgttttaaagagacgggtcttgctatgttgtccaggatggtctcgaactcctggctcaagcagtccttcctcagcctcacaaagtgctgggattacaggcctgagccagccaggaacaacctattttgaaatgaaattattgtttacgattgcgccactgcagtccgcagtccgacctgggcgacag

SEQ ID NO: 33472 - DNA, 460 bp, Homo sapiens
ggcacaaggaagtgggttggattgactaggtttgggaattggttaagtgggtactaggtaaagcccagtgtgtgaagtagttaagggttctgctgaaagtgtagtttgaatgattggctgaggcattgaggataagagaagggagcagaggcttatggactagaccacttttttcagggctttaccttatcagccatgacaaagtatagagaatctggtctcaatgtaggtctctcactccagcagttttgcccacatttttcatggctgttagagaatcagggctgaaggcaagccttgagtgccacttacttggtaaaaaattgtgtcagattgctcactgtagccaagacagagttctttgtggcttctgtaacttgccatccaagtaaaaaaattttcttaaaagttgaaatgacctttgtataaaaagtaataaaatacttgctatgtgtcaggg

SEQ ID NO: 33473 - DNA, 332 bp, Homo sapiens
aagcgggaaatgcacatctagtgcagtagttttaggccagcctttttcagagcctcaggctctgcctgtcaccttgaagacatccatgtgggtcccctcagggcttctctttgccataaaaataaaatgattgctcccaccaatgtttgcgtccatgggagaggaggtaggagcagcagtacttgtcctgtgtgtgggagacacttgaagggctcagtgggaattgtcagcagcagggaacagaacaggtggtgagaagagtcattccactgagtttctgggcctttgactccctgaaacttccttctcctctatccaacctccctctccag

SEQ ID NO: 33474 - DNA, 300 bp, Homo sapiens
tatagattcaaagaaaccccaataaaaaatcccaacaaccagtttgttacaaatggactaaccaattattctggaaattcaaaggacctagaatagtcaaaacaacactaaaagcaaccataaatttggaggacatacattgcctgatttcttataataagaattatatatttatgtatttaatatataactacataaaatataaattttaaatttaatataaaagtatgataaaacgtaaatattttatattatgtaaatatgaaatgtttatatatgtaaatataattttaaaatata

SEQ ID NO: 33475 - DNA, 580 bp, Homo sapiens
agtggttctcaattttaggatgccaagactattggccaaacctcatctcttttcactttttcaggacattgtgtggctaagccagatttagtctctttactagagcaagagaaggagccctggatggtgaagcgagagctgacaggaagcctgttctcaggtgagtgcaggagagcctggtgtggaaaatctactgcaagagagagcggagcttttaccaaaaaggctgcatcctcactaatatacagtaggaaactttacccagggtctctgggtctggaaagaaaattgaactctgggagttccaaataattctttcctcctcctttgcccccttctctccagtaactgccatttccctgaagttccttcttttcttggccactgggacgtgtatcatccacttgcttccttaaatgatcttttctggaccctgatgcacttttgagctgacttccaaaggttttctcttctgtggttaaatggcctattgttttcatcatgcatccattcctgtgagaaccacaaattgaaagttatgggattgagccactctgctgagtattggcaggcgattgga

SEQ ID NO: 33476 - DNA, 4146 bp, Homo sapiens
  misc_feature (32)..(32): n is a, c, g, or t
ataaaaccaggccagagacagggaccggccantcgagcgcgctcgaaacgacgcgcgcggagggtgtggccaggggtgtgggtctgtgagggaccggtcggaagggcgtcgcgcggcctcgggtgacatgcggggggcggcgagcgcgagtgtccgcgagccgacgccgctcccgggtagaggcgccccccgcacaaagccccgggcgggccgaggcccgactgtagggactccagccaccttggccctccctgcccggggaaggccgcgctcaaggaatggcctcgcatccaaaggccagcgaggagcggcccctacggggcctgggcacagagctctgccttccagggacactgctcttccccaggagagaaacaagaagctggaggctgtggggacaggaattgaacctaaagccatgtcccagggcttggtgacatttggggatgtggctgtagatttctcccaagaggagtgggagtggctgaaccccattcagaggaacttgtacaggaaggtgatgttggagaactacaggaacctggcatcgctgggactttgtgtttctaagcccgatgtgatctcctcgttggaacaaggaaaagagccttggacagtgaagcgaaagatgacaagagcctggtgcccagacttgaaggctgtgtggaagatcaaggagttacctctcaagaaggacttctgcgaaggaaagctatcccaggcagtgataacagagagactcacaagctataatctggagtactctctgttaggggaacactgggattatgatgctctgtttgagacacagccgggcttggtgactatcaaaaacctggctgttgacttccgccagcagctacacccagctcagaagaatttctgtaagaatgggatatgggagaacaacagtgacctgggatcagcaggacattgtgtggctaagccagatttagtctctttactagagcaagagaaggagccctggatggtgaagcgagagctgacaggaagcctgttctcaggccagcgatctgtacatgagacccaggaattatttccaaagcaagattcatatgctgaaggggtaacagacagaacctcaaacactaaacttgattgttccagtttcagagaaaattgggattctgactatgtgtttggaaggaagcttgcagtaggtcaagagacacaattcaggcaagagccaattactcataacaaaaccctctctaaggaaagagaacgtacatataacaaatctggaagatggttctatttggacgattcagaagagaaagttcataatcgtgattcaattaaaaattttcaaaaaagttcagtggtaataaaacaaacaggcatctatgcaggaaaaaagcttttcaagtgtaatgaatgtaagaaaacttttacccagagctcatctcttactgttcatcagagaattcacactggagagaaaccttataaatgtaatgaatgtgggaaggcctttagtgacggctcatcctttgcccgacaccagagatgtcacactggcaagaagccctatgagtgcattgagtgtgggaaagctttcatacagaacacatcccttatccgtcactggagatactatcatactggggagaaaccctttgattgcatcgattgtgggaaagccttcagtgaccacatagggcttaatcaacacaggagaattcatactggagagaaaccttacaaatgtgatgtatgtcacaaatccttcaggtatggttcctcccttactgtacatcaaaggattcataccggagaaaaaccatatgaatgtgatgtttgcagaaaagccttcagccatcatgcatcactcactcaacatcaaagagtacattctggagaaaagccttttaagtgtaaagagtgcggaaaagcttttaggcagaatatacaccttgccagtcatttaaggattcatactggggagaagccttttgaatgtgcggagtgtggaaaatccttcagcatcagttctcagcttgccactcatcagagaatccatactggagagaagccctatgaatgtaaggtttgtagtaaagcgttcacccagaaggctcaccttgcacagcatcagaaaacccatacaggagagaaaccatatgagtgcaaggaatgcggtaaagccttcagccagaccacacacctcattcaacatcagagagttcacactggtgagaaaccctataaatgtatggaatgtgggaaggcctttggtgataactcatcctgtactcaacatcaaagactgcacactggccaaagaccttatgaatgtattgagtgtggaaaggcattcaagacaaaatcctcccttatttgtcatcgcagaagtcatactggagaaaaaccttatgaatgcagtgtgtgtggcaaagcctttagtcatcgtcaatcccttagtgtacatcagagaatccattctggaaagaaaccatatgaatgtaaggaatgtaggaaaaccttcatccaaattggacaccttaatcaacataagagagttcatactggagagagatcttataactataagaaaagcagaaaagtcttcaggcaaactgctcacttagctcatcatcagcgaattcatactggagagtcgtcaacatgcccctctttaccttccacgtcaaatcctgtggatctgtttcccaaatttctctggaatccatcctccctcccatcaccatagcctcgagacgtcatttctgtttgactactccagcagtttaaaaccccatctccctgcccttttgttttctttttgtcccttattagttagttcttcacataagtgtaaatgtaacttattcactcctcttgtaaaacttatagtttctttaaattggttaatgtgtgagatgtgctcagcacagtgcctggtccatagtaagtgctcagtaaacttagctgttttaaaaactttgtatttgaacattgaaaagttacagtagtcagctctgataaaaaaatgatgcagtagggtgagggtaggaaaaagcacattttctatcaggaacagaattctccagtagtgggtgaggttttgcctttgttggttttaaaacttgattctataatgccaagttagttttgtggctttccatctgaccctatgtgaatgtaaggtgatgtgaccttgttggtgagaaaattaaactttacatttgacttgatttgttttagaaagtctagggaccatgaatgaataggccagctgggacaaatgaatttaaaaaatcagaaaaatgcaagatttatatgcatgaagttaaaacaactgacgttactcaagaattagaaaactttgcaagatttgacttgtttaaaaatcacatttataagtgaaccgtattaaaacttttaaggaaccattcattgtgaggtaaactgatccagaataggggtcagcaaactatgactcatggccacagtctcactgactgtttttgtatggtccatgatctagaatttaaaaaaattttaaagggttgaaaaaagtgaaaagaatattttcaacatgaaaattatatgaaatttaagttttggtgtctgtaaataaagttttgttggcttcagccacacagtgatttacaccttgattgtgctgcttccaggctgtagcagcagagttgagcagttgtgacaggagaccatgtggcctgcagagcccaaatatctactgtctgatcctacacagaaaatgtgtgtgatccctgctatggagcagaggttatcaaactaaagcccatggaccaaatcctatctgctgcttgtttttgtaaatagagttttatcaaaccacagccatgcttacttgtttagctattgactatggctgctttagacaactgtgacagactatatggctcgcaaaactgcaaatatttcctatcctttaacagaaagtttgccaacctctgctctagagtagagaaaaatgtataaaagattttaattttatgagggcaatacaactgtcacatcagaaacaagaaaacaaatgataaaggaactcatttatcaatagaggtgaaaggaaattattaaactatattgaaaaataaagatgtcaataaaaggagaaatgatatttttctagat

SEQ ID NO: 33477 - DNA, 4086 bp, Homo sapiens
  misc_feature (32)..(32): n is a, c, g, or t
ataaaaccaggccagagacagggaccggccantcgagcgcgctcgaaacgacgcgcgcggagggtgtggccaggggtgtgggtctgtgagggaccggtcggaagggcgtcgcgcggcctcgggtgacatgcggggggcggcgagcgcgagtgtccgcgagccgacgccgctcccgggtagaggcgccccccgcacaaagccccgggcgggccgaggcccgactgtagggactccagccaccttggccctccctgcccggggaaggccgcgctcaaggaatggcctcgcatccaaaggccagcgaggagcggcccctacggggcctgggcacagagctctgccttccagggacactgctcttccccaggagagaaacaagaagctggaggctgtggggacaggaattgaacctaaagccatgtcccagggcttggtgacatttggggatgtggctgtagatttctcccaagaggagtgggagtggctgaaccccattcagaggaacttgtacaggaaggtgatgttggagaactacaggaacctggcatcgctgggactttgtgtttctaagcccgatgtgatctcctcgttggaacaaggaaaagagccttggacagtgaagcgaaagatgacaagagcctggtgcccagacttgaaggctgtgtggaagatcaaggagttacctctcaagaaggacttctgcgaaggaaagctatcccaggcagtgataacagagagactcacaagctataatctggagtactctctgttaggggaacactgggattatgatgctctgtttgagacacagccgggcttggtgactatcaaaaacctggctgttgacttccgccagcagctacacccagctcagaagaatttctgtaagaatgggatatgggagaacaacagtgacctgggatcagcaggacattgtgtggctaagccagatttagtctctttactagagcaagagaaggagccctggatggtgaagcgagagctgacaggaagcctgttctcaggccagcgatctgtacatgagacccaggaattatttccaaagcaagattcatatgctgaaggggtaacagacagaacctcaaacactaaacttgattgttccagtttcagagaaaattgggattctgactatgtgtttggaaggaagcttgcagtaggtcaagagacacaattcaggcaagagccaattactcataacaaaaccctctctaaggaaagagaacgtacatataacaaatctggaagatggttctatttggacgattcagaagagaaagttcataatcgtgattcaattaaaaattttcaaaaaagttcagtggtaataaaacaaacaggcatctatgcaggaaaaaagcttttcaagtgtaatgaatgtaagaaaacttttacccagagctcatctcttactgttcatcagagaattcacactggagagaaaccttataaatgtaatgaatgtgggaaggcctttagtgacggctcatcctttgcccgacaccagagatgtcacactggcaagaagccctatgagtgcattgagtgtgggaaagctttcatacagaacacatcccttatccgtcactggagatactatcatactggggagaaaccctttgattgcatcgattgtgggaaagccttcagtgaccacatagggcttaatcaacacaggagaattcatactggagagaaaccttacaaatgtgatgtatgtcacaaatccttcaggtatggttcctcccttactgtacatcaaaggattcataccggagaaaaaccatatgaatgtgatgtttgcagaaaagccttcagccatcatgcatcactcactcaacatcaaagagtacattctggagaaaagccttttaagtgtaaagagtgcggaaaagcttttaggcagaatatacaccttgccagtcatttaaggattcatactggggagaagccttttgaatgtgcggagtgtggaaaatccttcagcatcagttctcagcttgccactcatcagagaatccatactggagagaagccctatgaatgtaaggtttgtagtaaagcgttcacccagaaggctcaccttgcacagcatcagaaaacccatacaggagagaaaccatatgagtgcaaggaatgcggtaaagccttcagccagaccacacacctcattcaacatcagagagttcacactggtgagaaaccctataaatgtatggaatgtgggaaggcctttggtgataactcatcctgtactcaacatcaaagactgcacactggccaaagaccttatgaatgtattgagtgtggaaaggcattcaagacaaaatcctcccttatttgtcatcgcagaagtcatactggagaaaaaccttatgaatgcagtgtgtgtggcaaagctgaatgtaaggaatgtaggaaaaccttcatccaaattggacaccttaatcaacataagagagttcatactggagagagatcttataactataagaaaagcagaaaagtcttcaggcaaactgctcacttagctcatcatcagcgaattcatactggagagtcgtcaacatgcccctctttaccttccacgtcaaatcctgtggatctgtttcccaaatttctctggaatccatcctccctcccatcaccatagcctcgagacgtcatttctgtttgactactccagcagtttaaaaccccatctccctgcccttttgttttctttttgtcccttattagttagttcttcacataagtgtaaatgtaacttattcactcctcttgtaaaacttatagtttctttaaattggttaatgtgtgagatgtgctcagcacagtgcctggtccatagtaagtgctcagtaaacttagctgttttaaaaactttgtatttgaacattgaaaagttacagtagtcagctctgataaaaaaatgatgcagtagggtgagggtaggaaaaagcacattttctatcaggaacagaattctccagtagtgggtgaggttttgcctttgttggttttaaaacttgattctataatgccaagttagttttgtggctttccatctgaccctatgtgaatgtaaggtgatgtgaccttgttggtgagaaaattaaactttacatttgacttgatttgttttagaaagtctagggaccatgaatgaataggccagctgggacaaatgaatttaaaaaatcagaaaaatgcaagatttatatgcatgaagttaaaacaactgacgttactcaagaattagaaaactttgcaagatttgacttgtttaaaaatcacatttataagtgaaccgtattaaaacttttaaggaaccattcattgtgaggtaaactgatccagaataggggtcagcaaactatgactcatggccacagtctcactgactgtttttgtatggtccatgatctagaatttaaaaaaattttaaagggttgaaaaaagtgaaaagaatattttcaacatgaaaattatatgaaatttaagttttggtgtctgtaaataaagttttgttggcttcagccacacagtgatttacaccttgattgtgctgcttccaggctgtagcagcagagttgagcagttgtgacaggagaccatgtggcctgcagagcccaaatatctactgtctgatcctacacagaaaatgtgtgtgatccctgctatggagcagaggttatcaaactaaagcccatggaccaaatcctatctgctgcttgtttttgtaaatagagttttatcaaaccacagccatgcttacttgtttagctattgactatggctgctttagacaactgtgacagactatatggctcgcaaaactgcaaatatttcctatcctttaacagaaagtttgccaacctctgctctagagtagagaaaaatgtataaaagattttaattttatgagggcaatacaactgtcacatcagaaacaagaaaacaaatgataaaggaactcatttatcaatagaggtgaaaggaaattattaaactatattgaaaaataaagatgtcaataaaaggagaaatgatatttttctagat

SEQ ID NO: 33478 - DNA, 1445 bp, Homo sapiens
  misc_feature (32)..(32): n is a, c, g, or t
ataaaaccaggccagagacagggaccggccantcgagcgcgctcgaaacgacgcgcgcggagggtgtggccaggggtgtgggtctgtgagggaccggtcggaagggcgtcgcgcggcctcgggtgacatgcggggggcggcgagcgcgagtgtccgcgagccgacgccgctcccgggtagaggcgccccccgcacaaagccccgggcgggccgaggcccgactgtagggactccagccaccttggccctccctgcccggggaaggccgcgctcaaggaatggcctcgcatccaaaggccagcgaggagcggcccctacggggcctgggcacagagctctgccttccagggacactgctcttccccaggagagaaacaagaagctggaggctgtggggacaggaattgaacctaaagccatgtcccagggcttggtgacatttggggatgtggctgtagatttctcccaagaggagtgggagtggctgaaccccattcagaggaacttgtacaggaaggtgatgttggagaactacaggaacctggcatcgctgggactttgtgtttctaagcccgatgtgatctcctcgttggaacaaggaaaagagccttggacagtgaagcgaaagatgacaagagcctggtgcccagacttgaaggctgtgtggaagatcaaggagttacctctcaagaaggacttctgcgaaggaaagctatcccaggcagtgataacagagagactcacaagctataatctggagtactctctgttaggggaacactgggattatgatgctctgtttgagacacagccgggcttggtgactatcaaaaacctggctgttgacttccgccagcagctacacccagctcagaagaatttctgtaagaatgggatatgggagaacaacagtgacctgggatcagcaggacattgtgtggctaagccagatttagtctctttactagagcaagagaaggagccctggatggtgaagcgagagctgacaggaagcctgttctcaggtgagtgcaggagagcctggtgtggaaaatctactgcaagagagagcggagcttttaccaaaaaggctgcatcctcactaatatacagtaggaaactttacccagggtctctgggtctggaaagaaaattgaactctgggagttccaaataattctttcctcctcctttgcccccttctctccagtaactgccatttccctgaagttccttcttttcttggccactgggacgtgtatcatccacttgcttccttaaatgatcttttctggaccctgatgcacttttgagctgacttccaaaggttttctcttctgtggttaaatggcctattgttttcatcatgcatccattcctgtgagaaccacaaattgaaagttatgggattgagccactctgctgagtattggcaggcgattgga

SEQ ID NO: 33479 - DNA, 715 bp, Homo sapiens
  misc_feature (32)..(32): n is a, c, g, or t
ataaaaccaggccagagacagggaccggccantcgagcgcgctcgaaacgacgcgcgcggagggtgtggccaggggtgtgggtctgtgagggaccggtcggaagggcgtcgcgcggcctcgggtgacatgcggggggcggcgagcgcgagtgtccgcgagccgacgccgctcccgggtagaggcgccccccgcacaaagccccgggcgggccgaggcccgactgtagggactccagccaccttggccctccctgcccggggaaggccgcgctcaaggaatggcctcgcatccaaaggccagcgaggagcggcccctacggggcctgggcacagagctctgccttccagggacactgctcttccccaggagagaaacaagaagctggaggctgtggggacaggaattgaacctaaagccatgtcccagaaaaactttgctgacacctgaagtggaggttaagagcatggactgtggagtcagactcctgggttcaaaacccagctctacagctgactgtctgtgatcctgggcacattacagctcaatattttctcatctgtaaaatgggaatagtaatagtactgactattaggatcgttgtgaggattaaataagctaatatataagtatatagaattgcgtctgaagtgttgtaagtgctttcagctattgttattgctgttatttacagtaaaagacatttttaaaacaaaa

SEQ ID NO: 33480 - DNA, 521 bp, Homo sapiens
ttttttttttttgagagggtctttctctgcccaggctggagtgcagtggtatgatgactgctcactgcagcctcaacctcccgggctcaagtgatcctcttgcctcagcctcccaggtagctgggaccacaggcatatgccacaatgcctgactagtttttatttatttttatttttttatagagacagagtctcaccatgttgctaaggctggttttgaactcctgggctcaggcaatcctcctgcctcagcctcccaaagtgctgagattacaggcataagccaccgcgcccagcctgaaatgttcattttaagtgtttattgtcctgtatgttttgaaatttttactgactatatgtaacaaatttgtcactccatctaggcacaagtgttttaggtgagcataaatttttttttttgagacagagtctcgctttgtcaccaggctggagtgcaatggtgcgatcttggctcactgtaacctctgcctcccagattcaagcaattctcttgccttagc

SEQ ID NO: 33481 - DNA, 1238 bp, Homo sapiens
gggagatgtgctcagaggctggtgagcgtttaattgacctggttgtgagcacaatgggaatgcttttctgaaccttccatttgcctccaatttagaataactgcttagtcagcaacatgtctccaattaacatgacagattttttggaccacagatctctttgggaatcttatgtaagctgtgaaacttctcccttaaaaaacctacatatttaattctgtctgtaattttaggacttcacatatccccaaagaccattcatgatccaccagggttaaagacttgttttaagtaaagaaaatattcgcagcctctggagtagtagacatctccagagaaagtctggcattctttggtaactcatggcatttattacattagctttggatggaacaacccccaacccccaagtctgagcatgtggtttgatgctgcttcctttccattttcactctgctctcttggattctatgtagcaaaaaggtaccttttctagggtcacatgtccacttctcaaactctgtcttgcactggggatttgagggtggactatcagagcataatggaagaggcaggaaaggatagcactaattagagaacttgataggccttttgctactgataaagattctgtcctgtatcatccatgaggtttggatttgcacttctaaaaaatagctgtgtgtttttgacaatagccactccctttttgctcctttctggtctctttcctaaatgactttccaggatagtataaaataagcaatctatttagaggaacaaaacaaagaactacaccattagcattaaaatatttctagggtagtttaggtaacatagaactttgtagctcagcagtcttggaatcactagactctaagccccatgtagtcagagactgcctgcttttataattcatccccaacagcaggctattgcataacacattgttaccacccacaccattttgttgagtaaatgaatgaatgcatgaacgaatcagaggattctattgtctaaataaactttggaggtgacttagtcttctcttccctctgatgcttagatcttctttatctctcagttcaacatatattgctcaaatggttcctaggtgcaagggatctggaagttattaaaatgaaatagattttggaccatgaccttgacaaattatgatctactaggagagataatatggaaatcagtataatactacagagacagtaaaaaggaaa

SEQ ID NO: 33482 - DNA, 1818 bp, Homo sapiens
tccctaatggatggtacaggtcaacatttgccatctaatgacacttacattccagttttttccttttttgagtaactgggaaaagggtggcattactgctggcttcctaaaattgaaaagtatactagggtttttaaacctgtgtagaatacatgatatggtagcaaatgtgctgtaggaagaaaagcaatgaggaactactggcctgactaggaggcctagaagtccctcccaggcttgagttgttctgacttggcatgattacatagctgcggcaagtgacgtttccttcaagccttggttccctcatctgtaaaatagggaactaatacctacctcacaggattgtagttagaattaaggatgacttcattaaagcacctctagtggtggaagatgtcccatcctatcccccacccatagctgggagctatgtttggctcattcttcctgactcactggattacactgtgactcagttcaatttcacacatgctgctgctaaattagggtcttggtgagcctttgggaggacagctctgaggaatgaattgtagcactgcagccctgcctgaggaacatgatagaaacaggtggtaggcccagctcttgccttccacctactaagcagtttttctgtggttagctgtgtgacataaactatcggtgtattaatttgctttcactagattcccccccccccaacaacttagtccaagaacatacctgaattctttgcatttccttgccttagttgcttttgtagggtggacagcaggactgcatgagaatagctgtgcttctggaccctatggtgaaagctctagtgaactgcaattaggcccagggtcccggaggaagaaggggagagaaaaaggggggtagttttccaaaagataagtaggggacaaaaaagtccacggggcctatgagcggtgagactcctgccctgattgtggcaaagcacctggagatgatagaacttcctagggaaaaggctgcatggagtccccagggatgctgggccctggtcaccaaggctccctgggaaggtctcttgtacctggggcacacagaccaacacttctgaatttgcaagcttaagagcatgtatgagcagaacctgtgcagaccaaggcttagagggctcacctcaatgttttgcactgtgtgagaccccaggaccttttcgtgattctggagaggggaacaaaccataataacaacaaaccaggtagcaggatagagactcattctcatctattttggttaaaagaaaataaatgtatttcttccacacctgattttgtgattgcaaattcataactaatatccctcgtcagctccgctgactcatccctgccacagggaggttcacagcaagagcacagaaactagggccagtgcccggttgtgtgaccttgagtaagttctttttcccttgaacagggagagagacacaatggatcagagtgtctctgccagttctaacttggggattctagtgggttgaaccgaacggtagtccgtttccaaaagaggaagccaagaccagagggggagtggttccttcaagtttgcagaaccagtaagtggcagagcaggactcatatctagttagtggttcagagcatgggctccggagctagactgcctggatttgaaccctggctttgccacttgcctgttgggtgactttggacaagctgcttaaattatgtctccatttcctaatccacagaacaagtgtaatactagttatctgtttcatggagtgattgtgaggattaaataaagttaatataacacaaaaaaaaa

SEQ ID NO: 33483 - DNA, 440 bp, Homo sapiens
tgttctcccacggctctgccctcttcaggcacagtcactgcgtatgtgcatcctgctcttcacacctcattcacttcacaagctgagcaagctgtcccgtctgcactggggatggagctgggcactggagacacctccaagaaaaagcagatgagctccttgccttgtagtggaggcactttactaagaaataaatgaaatgacaaattgtaccagggctctgatgaaaatggggtgccctgacagagagtaaggggatggggggttcccaatttcaggacagtggtcagagaaggcccctttcgagagaaaccattgcattttagacctgcaggttgaaaacagtcagccccgccacttcgggggctagaagtaggaagtgacagtgacagcgtgtgcaaaggcactggggcgggaaggaggttggtgggtgagaagca

SEQ ID NO: 33484 - DNA, 383 bp, Homo sapiens
gtcgcccccagaggccggacgctgcggctcggccgacccccgcgcggtggcagccggagcgctagggaaacgagtggagccccggcccggatcctgctgcgggatccagaaggcccgagcacttcgcgtccccctgcccagcagttgagcagacgcccctggggcggaccccacccttcccaaacacacacacactggtctttgcatgggcaggacacagttaaacacccaccaggcctcccggttattgggttagagtatggaccgagcaggagtttactgccccattcaccaccgcccccaaccccacctaccccaaatagggatgcggagactatccctcctcccaccaagacttgaacagagcctctctttcaagccca

SEQ ID NO: 33485 - DNA, 490 bp, Homo sapiens
aaattcacgaaaggatttttttttctcatctcctttctccatttatttactccaactgcttttttagctaaagacaaaagatgctgtagtcatgggtggcagaaccatgcttttgtgtaggcagtgctcccaaagtttgtttacagtgcttttgcttgcacctcagatcatttttccagaatgttacggattttttttttcttcttcttctttttttttttcttttagaacactgttcacgatcactttttcatataccatgggactcaggcaaacccttttttaaattcctggttatatatttgttttaatgttcattagtatttgtttgtttgtttgtttgttttctttaacagccatcaaggctaggcatggtggctcacacttgtaatctcagcaatttgggaggctgagacaggaggatcacttgagtgcaggagttcaagagtagcctgggtaacagtgagataccatctctgggaaaaaaaaa

SEQ ID NO: 33486 - DNA, 697 bp, Homo sapiens
agatcgagcgaggagaggggctgctgcagggagaatgcctgacagtggattccttttcagcgaatacagctgggatggggtcatgtacgcacagatgtgttttcttccagggcaagggatgaattagcaccacagatgagtgtgcagtgggaaaaaggaaggagttgtctcattgcaccctatgagtactgcctgcctcatgtgccagttaaagacctcaaacaccagcaggagtctcccttggggtctgatggtaggaatgcatttacaaatcaagacccttcaggaagcccagacatgtttcgttccattcctttgctgcaccaaggacctgatcgtattgtctggcaagcacagtaaatgctgtagaaaaacaagtgggcattgtttcataatgggcccttctgccttctatgaggctagttgatacttctttgcctttgtctccctataaggcagaaaacacatctgtgcgtacatgaccccatcccagctgtattcgctgaaaaggaatccactgtcaggcattctccctgcagcagcccctctcctctcctgctcttgccatcctctgcttaagtagtggggcacccgggagtcctgtttacagctaattagattaggagtgtattcatctggaaagatatttgtagttcaataaagagagtatgaagactctctctcatggttccagaga

SEQ ID NO: 33487 - DNA, 332 bp, Homo sapiens
gagaatatattcttctttcatctgcctttttgttctttctgtgccctcagctgattggatgatgcccacccacattgagagcaggtattcctcactcagtccactgactcaaatgcctgtctctcctggaaacatccccacagacatgcccagaaataatgctttaccacatgtctatgtattcctcaatccagtcaaattgacacaaagttaactatcatggctgggcacagtgactcacccctgtaatcccagcactttgggaggctgaggtgggtggatcgctggagctcaagagcttgagaccagcctggcaacatggcgaaacaccg

SEQ ID NO: 33488 - DNA, 615 bp, Homo sapiens
catgctcaaggcagcactgacatgccagccttccaccttcttggcccactctgaactttgggcactgatgagcataagagggaagctgatggggggctgagggcagcttgcactgacctgcaggtgttccttgatatatacatcctgggtgccatgaaaggcagcaggaggcagacatgttcctgagtgcaagggggtgggcccctggtgaggccccaccttcaggccagggaggacctgaagggtgggaactggcctgccagtcctgcaaaccccaatgtgaacttgtggtgccttttccaggcctccccatggccacccatggaccagtcggcattcacttcctcccttctgcggcccataaaagccctgggttcaggcagagctgagcagacatcaggtgaccagctgcagaaaggagctacccactccagggcctcatctctgctgagagctgcagagatgaccagaagacctgcatccagagaggagcttcctgatccagggctattctgtcactcaataaagcttctctttgtcttgttctcgaaaaggcaaaacgaggaggcccggaggaacgggggggcgggccgagaattttcgccccgggggcca

SEQ ID NO: 33489 - DNA, 506 bp, Homo sapiens
actgttaatatattccaggtctagcatttctcattccttattagggaagagctaagagatcatgagaggaagagttgaaatgttggtaagttacaggtacttttgcatgtgcttttgtatatgcatagaaaaaaaagaacctcagacagttattacctcttggtttaaatttgggaaaaacgtggacttttgccctttacactgtgtagttatgtatattttgcattcttttccttatagcaggccttaacttttgaaataaaagaacatacaattgtaaagcattccatctttttttttttttaatcaagccataaagccagataaaaatataagagcatttatcacatttctagatggtggaagatatccaaagtttaataggtatataagaaattagaaagacagattttactgtgtgaaaagtttaaatttttgaatattaacagaaaaaaagaaaaacattaacagcaaataacttgggaaaaatatttgtggtaaatagg

SEQ ID NO: 33490 - DNA, 498 bp, Homo sapiens
tttttttaaaattcaggattttctacattgttgtggggaaggagagtaatgatcaagagataatagctattcaaaaaattattaatgggctatttgaagaaggtgttaaaagagatcccaagaagggaaagcatggtataatttcatgatactttaggacaatacaattatttcccaggttttagtagagtaggtgtaagtatattcgtatataacatacacttggctgtattgtgccataaagaatgaataagtcaagcaaccatatcataaatggcttgttaaaagttaaaacactgctatttatacgtaaaatttaactgctattttgatagatcatgtgtaggataactttaaaaaagtaaaactatgggggaaagggcaggtattattttcctaatggaatccaaataattccactagcctgaatttagagtttgacttcaagttcataatatttttaaattaaaaaaatgtgtgtgtgtatatatgttattc

SEQ ID NO: 33491 - DNA, 398 bp, Homo sapiens
gaatggcctgtgcaaaggtccagagaccagagcagacagcggcatcagggcgtctgcaggggacttgggcaatgcaggtgggctggtggcgagggacatctgtgtcgtgagtggggcttagacgtcctcttcacccagacgtggagtctctaacgcttggaattttttttagcagcagaacccattttttttcttttttttgaaacagaatcttgcgctgtcacccaggctggagtgcagtggctcaatctcagctcactgcaacctcagcctcccggcttcaaacaattctcctgcctcagcctcctgagcagctgggactacaggcatgggccaccacgcccagctaattagcagaacccattttttaaaatgaaatccctgcagccttgacatgt

SEQ ID NO: 33492 - DNA, 528 bp, Homo sapiens
ggctgtctgttacagattttatattctatatggtggtgttatttatttctgtcttatctccattctggattttaagttccttgacagctacaagaatggctttacatttttgtagcctccacaggccttgagcacagtgacattcacataatatgcattccaaaatcatctgctgaatcaaacaagggagataagacaagcttgtaacttaagcacaaaccatagtaacaaacataaacatgctggttacattatgaatataatgctgagtatatccataaatgcttaagtcgcaggagaaatacaaatgctttaaccttggagtgtcaggaacaattacatgaccagggacctactaaggtagggtaattttggtacagtacatggaggagattcagccttgaagagagaaaaagcttattttaaaatggaaaaaacaaaaacagaaaccccacagataggacttggtgtagaaagaggaggtgtttgtacagaccattgattctcaacccaggtttatgttggaat

SEQ ID NO: 33493 - DNA, 172 bp, Homo sapiens
attattaagaacctcatctgtgcctcgtcaccggcaatatggccttgaagagagaaaaagcttattttaaaatggaaaaaacaaaaacagaaaccccacagataggacttggtgtagaaagaggaggtgtttgtacagaccattgattctcaacccaggtttatgttggaat

SEQ ID NO: 33494 - DNA, 259 bp, Homo sapiens
gtaattcagctatctgggaggctgaggcaggagaatctcctgaacccgggagacggaggttgcagtcagccgagatcgcgccattacacttcagcctgggcaacaagagcaaaactctgtctcaaaaacagacaaacaaaaagccccgaaactctgtacctgtgaaatgctaactgcatttctgtcctcccctggcccctggcaatcaccacctattttctttttttttttttgagacagtctcactctgttgcccagg

SEQ ID NO: 33495 - DNA, 953 bp, Homo sapiens
ttcaggaagttccttggtgaaacaattgttgaggggggatctaggtaattggcagattctaaataatataatttccagatagtaattttaagagtactcatcgctcttgccaaataagttcagggtattcaaatcttggactagtcctgcaaggtataaagaataaaaatcccagtgagatacttggaaaccacagtttattattatttatctgggcaattattgtgtgtgtgaggatggaagggtagggaataatcgaacatctaaagccttgaataagagaatactaattgttttggtatgatgatactcagaaatggagatattataggaaaaagaaatcctttggaattttaactaaaatcactgcatatgggaaattaagagatccaggaccatatttgataagatttcctaaaaataatgtaattattaatgctaaagactgctcatgtatcttgatctaattactaaataattacatatttatttacctgataaatatgtatctagttctacaaggtcacatttatgtggaagtccaaagtcaagtccttaggggataattttgctttggctcagttgttccctgcttcctttttttttttttttttttgagatggagtctcgctctgttgcccaggctggagtgcagtggtgcgatctcagctcactgcatcctctgcctcccgggttcaagcaattctctgcctcagcctcccaagtagttgggattacaggcacctgccaccatgcctggctaattttttgtatttttagtagagacgggggtttcactatgttggctaggctggtcttgaactcctgacctcgtgatccacccgccttggcctcccaaagtgctgggattacaggcatgagccaccgcacctggccttccctgcttcctctctagaatccaattagggatgtttgttactactcatattgat

SEQ ID NO: 33496 - DNA, 457 bp, Homo sapiens
tagctggtaaatgaactacatattttaatcatacataatatttatcaatcgcttaacacaatgcctcatgttaagcagctactgtagacaagtgctgattattgttattagctatatatatatgttttatatgttattagccatatatatgttttatatgttatcagctatatatatatatatgttttacatttccttattcatgttctttctaaaccagatagatgtcccatgctggggctccatgatgcactaatctggctgtactcacattgggttgatcgttcttgaggttgtacatcagttcagatgacctgaatattaacgtgtgcaccacttctcaacctggagccttctggcatatccccagagcccattaaatctataaaaatctaaaatgtgttttcctatttataatactattaaagtaataaaaatactttctagaatccctgca

SEQ ID NO: 33497 - DNA, 449 bp, Homo sapiens
  misc_feature (20)..(20): n is a, c, g, or t
gaaaatgctacagaaccacnttaaaaacaaagaaatatagctagtaagtccaaaatgggaaacaaaatcaaatcactgtgcccagccatttgtttattttcttaggaaaaatgtctattcaaattatttgctgcctttggttcttcctttatcttattacgtgccagaaaccctccttgccccttgactttttcattcttccctcttcggaggtataatataaccattgtacagtggtttagagtttaggctactgtgatgtggcacctatttctacctcttattgtaccaactattgtatcttgggctagttacttaatcctgcagagcctcagttttcttgtctgtaaaacaaagatatcagtacttccctcacaactttgttgttttgaatgagatgttgtatgtaacatggttagaataggacctgacacccaccaggtattcca

SEQ ID NO: 33498 - DNA, 364 bp, Homo sapiens
tttttagcaaattgaagaaataaatgcaaaccatggagtcccactaatacattagatacttaatgcaaaggtgtcagagataatcttttgaaaaaattaacctaaaataaaggcactcagaaacagttgttttcccctcctttggaaaaaattcttccaagtgaaaatgtttgattcagactcaaatataaatatagaggttctgtggtttttacttgattcctgttaaaaaaaaaaaaaaagaaaaaagaaagaaaaaaaaaacctcttctttcctggaatgtgagtcacaaaagatattgtagacaaatttaatcacaatcacacatggcagttttctgtacattacattttagactaagca

SEQ ID NO: 33499 - DNA, 308 bp, Homo sapiens
tgtagagatgggttttctccttgttgcctaggccagttttaaactcttgggctcaagggatccacccattttggccccagcactttgggaggctgaggcgggcagatcacaaggtcaggagtttgagaccagcctggacaatatggtgaaacccagtctctactaaaaatacaaaaaaaattagctgggcgtggtggtgtgtgcctgtagtcccagctactcaggaggctgaggcaggagaatcgcttgaacccgggaggcggaagttacagtgagtcgagatcgcgccactgctctccagcctgggc

SEQ ID NO: 33500 - DNA, 305 bp, Homo sapiens
catgaatgactccaccaagtgtgtccgaatctactgcttagttctgatgatggcagaaataaatcaatgtgggtgtgtgtaataataatgtatattgttatttgcatgggttaccaatattaaaataatatttagagtgaagaccatgatatttgacaccttggtactcctgtccacatagaaaaattatttttaaagtggagagatagaaataaatcatttcccctcagtgaaaattgatttgttaattaaaaataattttgattagcttgtattcaattatttacaatgaagaataccaaata

SEQ ID NO: 33501 - DNA, 365 bp, Homo sapiens
gccttgattggcacaactgtggaggtcatcccagctctggagccccaacaggatcactcaggcctctgcttccaccacatctggcttcagcttccccctctgtggagtcctccctccctccctccttccccataggaaatgaccccagtgctcagcagtaacccccactgcgcgcagatctcagaacctccacctcaatctacagccacgtgccacaataagaagcagagttttaggccaggcgcggtggctcacgcctgtaatctcagtactttggaagaccaaggtgggaggatcacttgaagtcaggagttcgagaccagcctgcccaacatggtgaagccccgtctctaataaaaagaata

SEQ ID NO: 33502 - DNA, 383 bp, Homo sapiens
tatatataggtctaatgccctaaaatgattatggccttaatagtaaattgcaaaaatgtatgttgtactcatcttcattctgttacaagtgtaaaatgttgggatagaggtttgattattgctctactgaatgcttgactaaagtaattatatgacagcttttccttagaagtacttgcgttagcatccaaataaagtaatgatgaaatgaatactgccaaaataaagtatgaattgcatttaatgggtttacagaattttggaccattgcaaactttagtcatctggtgtcggatgtagtagtatagaatattaataaaagattttcttctatggaataccagtattatggaaaagcgaaattaaagtatatcactggacta

SEQ ID NO: 33503 - DNA, 718 bp, Homo sapiens
gcatgagccaccgcgcctggccattctttcatttgaggggaattgtcttactgatgttaaaactgggtctagagatgtggctctcacagtggagtgagtcccaaagccaggacaagaacttcaggtccccacctcctagcccaggacccaggcttcagatcaactttccgcaggggaaagaaataatggtagcaacaacagcttgctcagctcctttctatctatcgttttgatctttactgccttggccccaccctggtgctgcctattcacgcaggtgcgtgctacagatgcctcaggggcttctactcctgcctgatataaaagcaaagaggctgaattttaaatcaggtgtgagatctatgcttaaactcatctctgctgtttgcctgctgtgggaccctagatctctttttttctgaatttcagttatctcatctatagagtgggatgagggtaagaatacctcacagcactgttgcaaggatcagatgtgccttagttactataggttgagtgtctcttatccaaaatgggaccattttgacaatttccttccctcccttttcttttacccaccccaactcccttccacccccaagaaaacactttactctcctactcgagcatatagtcacgatagccatgggggcagacatctacagtggcagaagcacatggattttggattttttcggatttggggctatgtatatta

SEQ ID NO: 33504 - DNA, 366 bp, Homo sapiens
  misc_feature (1)..(2): n is a, c, g, or t
nntcccctgtggtggaccatggtcatgggtcactgctatggctagatgggggtgatctctttttttctgaatttcagttatctcatctatagagtgggatgagggtaagaatacctcacagcactgttgcaaggatcagatgtgccttagttactataggttgagtgtctcttatccaaaatgggaccattttgacaatttccttccctcccttttcttttacccaccccaactcccttccacccccaagaaaacactttactctcctactcgagcatatagtcacgatagccatgggggcagacatctacagtggcagaagcacatggattttggattttttcggatttggggctatgtatatta

SEQ ID NO: 33505 - DNA, 1184 bp, Homo sapiens
  misc_feature (1100)..(1100): n is a, c, g, or t
tgacgagctcttctcccatcacagccccatgaagaagggggagtcccagatcacaccccctttctctccatttgttggagcaggaaattggcaagaagtagaaaccagtgagcgagcgcactcagggccaagcaatgtgcggctctcccagctgacgccactcgggactgcccaagaccactgagcaataaccacgcctggtctggggtgtccagctcctgggatgcagatggctgaggttggggcacccttgggacagtgctctccagtccaacttgggccaagaaggtggcctggggtccttgctctgcctgcccccacctctactctctactagtcctgtggttgcgcctgtaccatctctgtcccccctcaagtgtgtgtactcactgcacccctattctgtccccctccctttcagaacctgtcttgtgtgtgagggcctcactcctctctcggaggtgcccagaggactgtgggaagaagggcaaagtctctttccagaggagcgtgcacagaccctcatctcccacgaccacacttttggggtgaacagggtgactttgttaggtcgattcttctgcagagatggtgaagtactctatctgcccacccacccactaaaagccatagctccgtccgcctggcctccccccagctctatagcaatagcccccttcccccttccctcctgggcatccagggtgtccagctaggggcccccaccgcactctggtcccagggatcttccagtggcctgcctgcttctcccgaagtgaccccatcagctccacccaactcccatccctcttccagcaaccacagataatgacaattgtttgtgaggtgcttggagatcccctagatgaaaggttctgggtgctggggcagctgactcactgactctcagctgaggtgctggaggtgcctgggaaaggaaataaggcaagctgggggagcacctgtagcagatacagggttccagttttcacagaaattcccctcctccgcccctctctggaaataatggaaacccctccacccgcctgcacagaaccctctgtgcagcagaactcgatgtgaacctttggcatctgctnagtgattttggccaggttctgccctttcttgccaatgatgaaacggtgaagccagagaggggcggagcagggggatcctgtagt

SEQ ID NO: 33506 - DNA, 419 bp, Homo sapiens
ttttttttgagacagagtctcgctctatcacccaggctggagtgtattggcacaatctccactcactgcaacctctgcctcccaggtttaagcaattctcctgcctcagcctccccagtagctggaactacaggcgtgcgccaccatgcccggctaatttttgtatttttagtagagacggggtttcaccatgttggccaggccagttgtgatgactcacgcctgtaataccagcactgtgggaggccgaggcgggcggatcacttgaggtcaggagctcgagctgcaggttatttttagcaaactaacacaagaacagaataccaaataacacatgttctcacctataagtgtgagctaaatgatgagaacaaatcatttctgtgtaacaaattatccctgaacttaagataaaagtt

SEQ ID NO: 33507 - DNA, 303 bp, Homo sapiens
cgcggccggcatttctcctcgcagctcgctgcctcctctatccctgcctccctctcccccctctgtttttctcccttccttccctctccgaccctcttcctctccctcccgatcctttccctcctcctctcatctttcccctgtctctccgttctagctcgtcccccaccccaccttttcttctttctcctcctctccttcctctccccctctcctctgtctccttccaccgtctcccctgcctccctgtctttcagtccctgtttttcagccccgtctccctctcggtttctctcccccacc

SEQ ID NO: 33508 - DNA, 619 bp, Homo sapiens
ctgccacttactagctgtggagacgtggggaaatccattgacttctctgatcctcagtttcctcacccatcaaatggggtaaatagctcctacctctcagaatagccatgtcttttaaatgagatgtcattttctacaaaaagacttacaacagcccttagcacatacagattctgcaattaatagagaactcattttttgggaatttcaggcaggaagggtgtattttgaggctggagatcaggggcacaaggttgccctcatctatgtcaatatatgttgacatacattctccccatggagtggggaggccctatttggcctgaggctggctgcaggaacaagacattgcattcttgagacaggcagtggccttgagccctgttcccttctcatactgtcaccagcaatccctggctgcaaggcctctgagctcaagggaaggttggctgaccaaataagatagctcttatctccatgaagttgcccttggtgggcctggctatgtcctcataactgactccctcacaaggcaagaagcaggagtgtagctcaccagggcatggtttccctgggaagtgtgtcttgggtgactagggatgcccttccagactggacc

SEQ ID NO: 33509 - DNA, 423 bp, Homo sapiens
gtatatgtagcaaccaaacagtttcttctttcctaaaactcaaagtgagtcagacttcttaggcttgtagatgttgaggactaagctttgctctttatcttctctttatggatttccctttggaagcagggataagaagagggaaggtctcccagatgtaaatttctcataaatatttgagctccatttcagtaattctttcattctctgatctgttgcctaatcttctatttagcaagtactttccatgaaatagaaggctttaattgatagaattactaatttgaatagcttagcacagctcagcttgtaaaaaaaaaggaaaaccactatccccattaaattctcatcttgtaaaaccagccatcagcacctccctgtctttttactaaagtttcccttctttggtctttagtgctaagt

SEQ ID NO: 33510 - DNA, 3311 bp, Homo sapiens
gcccccgctccgccgcggagtttctgcatgactgtcacaaagatgtcctggcgtccgcaataccgtagctccaagttccggaatgtctacgggaaggtggccaaccgggagcactgcttcgatgggatccccatcaccaagaatgtgcacgacaaccacttctgtgccgtcaacacccgcttcctggccatcgtcaccgagagcgcagggggcggctccttcctcgtcatccccctggagcagacaggcaggattgaacccaactaccccaaggtctgcggccaccagggcaatgtgctggatatcaaatggaaccccttcatcgacaacatcattgcctcgtgctcggaggacacgtcggtgcggatctgggagatccccgagggcgggctgaagcggaacatgacggaggcgctcctggagctgcacgggcacagccggcgtgtggggctggtcgagtggcaccccaccaccaacaacatcctgttcagcgctggctacgactacaaggtcctcatctggaacctggatgtgggtgagccggtgaagatgattgactgccacacggatgtgatcctctgcatgtccttcaacacggacggcagcctgctcaccaccacgtgcaaggacaagaagctgcgtgtgattgagccccgctctggccgtgttctgcaggaggccaactgcaaaaaccacagagtgaaccgggtggtgttcctggggaacatgaagcggctcctcacgacaggggtctccaggtggaacacaagacagattgccctctgggaccaggaggacctctccatgcccctgatcgaagaggaaattgatgggctctctggcctcctgttccccttctatgatgctgacacccacatgctctacctggctggaaagggtgatggaaacatccggtactacgagatcagcactgagaagccctacctgagttacctcatggagttccgctccccagccccgcagaaaggcctaggggtcatgcccaagcacgggctggatgtgtcagcctgcgaggtgttccgcttctacaagctggtgactctcaagggcctgatcgagcccatctccatgatcgtgccccggaggtcagattcctaccaggaagacatttacccaatgacaccaggcacggagccagcactgaccccggatgaatggctgggaggcatcaaccgagatcccgtgctgatgtctttgaaagaaggctataagaagtcctcaaaaatggtatttaaggctcccatcaaagaaaagaagagtgttgtggtcaacggaatagatttattagaaaatgtcccacccaggacagagaatgagctccttcgaatgttcttccggcagcaggatgagattcgacggttgaaagaggagctggcccagaaggacatccgcattcggcagctccagctggaactgaaaaacttgcgcaacagccccaagaactgttagctccccagctgggctgttttctaagccgatctctccgtcgtttctactcatcccttaacttctcccttaccagtgaccccagagacagagccaggacaggagtgggggccagcctgaggacccccgcctaccacctcgagaactggaagccaacctctaacctcctgacctcatgctaataaaagtccccagcttctggagaccccctgccggcagcccctttccctgccaccccaggagccaggcttcccctcagctgggtgaagactacagactccctggggttggcaggggctccatctcagtggaccaggaagcaagaggggaagcgggatcccagctagacttagaacttggacttttcccctgtgaagggggctgccaggacatctcagcactcccgcctggagctctcagcatcactgaaggtaccacagtgtaagtgctggactgcaggctgcagtgatccctctttcgtcccaccccctcttccctcagcagccccggaagcctgcctcacccgacgaggacagcgagcggcccggctcctttctgtctcttcccttcccgccctcttgtcttcagggaattcagaggattgctctccaaggccataatgaccccttgccttccccatgattctctacaaagctcttgcacacccttttcccattcaatttgtgagccaggcagggtagggattagtgtccccctttgacaaatgacagaactgagggttgcaatggggaaatgacttataaagtcacccagcaggtcaacaatgggcccacgaccaagaccctgggtgttcagaccccaaggccagggcctttcccgctgcatcaagatgccaatccctttgtgggcttcaccagtgcccaagtctctatggagaatgagaactggaagccactgctaccgtctacccagcaccagtagtgccgatgtgccacactgcccagttgaggcccctcacgctctgtgcccctagatccttcaggtccccaccctcagctgtcaccaccaccctccccaggggactccatctgagatgaggcctcgtcctcctggaagctgaggctgagaagggtggagcttggccctggggaaggcagaccagggtctgatggcttctagggatgctctgcgtgtgtctcagcaccgctatctcagccactttcagccttatgcacgtagaatgaccacagccactcgcatccgtatagcactttaaagtttctgcagtcctttgacacataggatctcatggagcctcacgtctactcccttctgcagatgaggaaaccgagagaagtggcccaaggtcacgcaactctgagatgccacatttcatttgatcttgtacacattttcttttattccttcttttttcctcctttcatttcccactacgcacaaagagtttataaacactgttctcagaagagtcacagtttggggtgagatctggaaatcaagaaatgggtgtccactcttttctttcattagctaggatctactagatgcattatactccatacctgcttttcccatggccgccctacggaaaatcccatccacagaggccagggctacccaagcccctccaggtgagctgggcctttcctttatgaacctccatcctcccagccagctacagtagggcctcctcaccccgtaccccacagctagacagtgtcagcactcatctcctcctcccacatttctggagcttttttttttccttccccattgacctttgtggtcttctgtgattatttatgctgcctcccaaggatagaattgaaataaaatgttttcaacttatcaaaaaaaaaata

SEQ ID NO: 33511 - DNA, 3727 bp, Homo sapiens
agcggagtaatgagggaggcagggctagagggtgactagcagccaggcctcccaggctcccaggcctctcagatgcctggaatttcggagctagaaggtagtcagattcccgttatcttgactgctgcagcggggtctctgggatggtgatgtgagtgcctcctgcacccgtggcccccatgtggcataactccttgggcgctattcatccacacggcccatctgtgcagggtacagccttcatggtcttagctggcagccctgacaacttggatgtgcaaagaagatacaagtttgtttcctctgaagcttgtctggtgtcatccaggagccccacctgagtctcattctgttgcccaagctggagtgcagtggcgcgatctcggctcactgcaacctctgccgtctgggttcaagcaattctcctgcttcagcctcccgatcagctgggattacagatgtcctggcgtccgcaataccgtagctccaagttccggaatgtctacgggaaggtggccaaccgggagcactgcttcgatgggatccccatcaccaagaatgtgcacgacaaccacttctgtgccgtcaacacccgcttcctggccatcgtcaccgagagcgcagggggcggctccttcctcgtcatccccctggagcagacaggcaggattgaacccaactaccccaaggtctgcggccaccagggcaatgtgctggatatcaaatggaaccccttcatcgacaacatcattgcctcgtgctcggaggacacgtcggtgcggatctgggagatccccgagggcgggctgaagcggaacatgacggaggcgctcctggagctgcacgggcacagccggcgtgtggggctggtcgagtggcaccccaccaccaacaacatcctgttcagcgctggctacgactacaaggtcctcatctggaacctggatgtgggtgagccggtgaagatgattgactgccacacggatgtgatcctctgcatgtccttcaacacggacggcagcctgctcaccaccacgtgcaaggacaagaagctgcgtgtgattgagccccgctctggccgtgttctgcaggaggccaactgcaaaaaccacagagtgaaccgggtggtgttcctggggaacatgaagcggctcctcacgacaggggtctccaggtggaacacaagacagattgccctctgggaccaggaggacctctccatgcccctgatcgaagaggaaattgatgggctctctggcctcctgttccccttctatgatgctgacacccacatgctctacctggctggaaagggtgatggaaacatccggtactacgagatcagcactgagaagccctacctgagttacctcatggagttccgctccccagccccgcagaaaggcctaggggtcatgcccaagcacgggctggatgtgtcagcctgcgaggtgttccgcttctacaagctggtgactctcaagggcctgatcgagcccatctccatgatcgtgccccggaggtcagattcctaccaggaagacatttacccaatgacaccaggcacggagccagcactgaccccggatgaatggctgggaggcatcaaccgagatcccgtgctgatgtctttgaaagaaggctataagaagtcctcaaaaatggtatttaaggctcccatcaaagaaaagaagagtgttgtggtcaacggaatagatttattagaaaatgtcccacccaggacagagaatgagctccttcgaatgttcttccggcagcaggatgagattcgacggttgaaagaggagctggcccagaaggacatccgcattcggcagctccagctggaactgaaaaacttgcgcaacagccccaagaactgttagctccccagctgggctgttttctaagccgatctctccgtcgtttctactcatcccttaacttctcccttaccagtgaccccagagacagagccaggacaggagtgggggccagcctgaggacccccgcctaccacctcgagaactggaagccaacctctaacctcctgacctcatgctaataaaagtccccagcttctggagaccccctgccggcagcccctttccctgccaccccaggagccaggcttcccctcagctgggtgaagactacagactccctggggttggcaggggctccatctcagtggaccaggaagcaagaggggaagcgggatcccagctagacttagaacttggacttttcccctgtgaagggggctgccaggacatctcagcactcccgcctggagctctcagcatcactgaaggtaccacagtgtaagtgctggactgcaggctgcagtgatccctctttcgtcccaccccctcttccctcagcagccccggaagcctgcctcacccgacgaggacagcgagcggcccggctcctttctgtctcttcccttcccgccctcttgtcttcagggaattcagaggattgctctccaaggccataatgaccccttgccttccccatgattctctacaaagctcttgcacacccttttcccattcaatttgtgagccaggcagggtagggattagtgtccccctttgacaaatgacagaactgagggttgcaatggggaaatgacttataaagtcacccagcaggtcaacaatgggcccacgaccaagaccctgggtgttcagaccccaaggccagggcctttcccgctgcatcaagatgccaatccctttgtgggcttcaccagtgcccaagtctctatggagaatgagaactggaagccactgctaccgtctacccagcaccagtagtgccgatgtgccacactgcccagttgaggcccctcacgctctgtgcccctagatccttcaggtccccaccctcagctgtcaccaccaccctccccaggggactccatctgagatgaggcctcgtcctcctggaagctgaggctgagaagggtggagcttggccctggggaaggcagaccagggtctgatggcttctagggatgctctgcgtgtgtctcagcaccgctatctcagccactttcagccttatgcacgtagaatgaccacagccactcgcatccgtatagcactttaaagtttctgcagtcctttgacacataggatctcatggagcctcacgtctactcccttctgcagatgaggaaaccgagagaagtggcccaaggtcacgcaactctgagatgccacatttcatttgatcttgtacacattttcttttattccttcttttttcctcctttcatttcccactacgcacaaagagtttataaacactgttctcagaagagtcacagtttggggtgagatctggaaatcaagaaatgggtgtccactcttttctttcattagctaggatctactagatgcattatactccatacctgcttttcccatggccgccctacggaaaatcccatccacagaggccagggctacccaagcccctccaggtgagctgggcctttcctttatgaacctccatcctcccagccagctacagtagggcctcctcaccccgtaccccacagctagacagtgtcagcactcatctcctcctcccacatttctggagcttttttttttccttccccattgacctttgtggtcttctgtgattatttatgctgcctcccaaggatagaattgaaataaaatgttttcaacttatcaaaaaaaaaata

SEQ ID NO: 33512 - DNA, 3247 bp, Homo sapiens
gcccccgctccgccgcggagtttctgcatgactgtcacaaagatgtcctggcgtccgcaataccgtagctccaagttccggaatgtctacgggaaggtggccaaccgggagcactgcttcgatgggatccccatcaccaagaatgtgcacgacaaccacttctgtgccgtcaacacccgcttcctggccatcgtcaccgagagcgcagggggcggctccttcctcgtcatccccctggagcagacaggcaggattgaacccaactaccccaaggtctgcggccaccagggcaatgtgctggatatcaaatggaaccccttcatcgacaacatcattgcctcgtgctcggaggacacgtcggtgcggatctgggagatccccgagggcgggctgaagcggaacatgacggaggcgctcctggagctgcacgggcacagccggcgtgtggggctggtcgagtggcaccccaccaccaacaacatcctgttcagcgctggctacgactacaaggtcctcatctggaacctggatgtgggtgagccggtgaagatgattgactgccacacggatgtgatcctctgcatgtccttcaacacggacggcagcctgctcaccaccacgtgcaaggacaagaagctgcgtgtgattgagccccgctctggccgtgttctgcaggaggccaactgcaaaaaccacagagtgaaccgggtggtgttcctggggaacatgaagcggctcctcacgacaggggtctccaggtggaacacaagacagattgccctctgggaccaggaggacctctccatgcccctgatcgaagaggaaattgatgggctctctggcctcctgttccccttctatgatgctgacacccacatgctctacctggctggaaagggtgatggaaacatccggtactacgagatcagcactgagaagccctacctgagttacctcatggagttccgctccccagccccgcagaaaggcctaggggtcatgcccaagcacgggctggatgtgtcagcctgcgaggtgttccgcttctacaagctggtgactctcaagggcctgatcgagcccatctccatgatcgtgccccggaggtcagattcctaccaggaagacatttacccaatgacaccaggcacggagccagcactgaccccggatgaatggctgggaggcatcaaccgagatcccgtgctgatgtctttgaaagaaggctataagaagtcctcaaaaatggtatttaaggctcccatcaaagaaaagaagagtgttgtggtcaacggaatagatttattagaaaatgtcccacccaggacagagaatgagctccttcgaatgttcttccggcagcaggatgagattcgacggttgaaagaggagctggcccagaaggacatccgcattcggcagctccagctggaactgaaaaacttgcgcaacagccccaagaactgttagctccccagctgggctgttttctaagccgatctctccgtcgtttctactcatcccttaacttctcccttaccagtgaccccagagacagagccaggacaggagtgggggccagcctgaggacccccgcctaccacctcgagaactggaagccaacctctaacctcctgacctcatgctaataaaagtccccagcttctggagaccccctgccggcagcccctttccctgccaccccaggagccaggcttcccctcagctgggtgaagactacagactccctggggttggcaggggctccatctcagtggaccaggaagcaagaggggaagcgggatcccagctagacttagaacttggacttttcccctgtgaagggggctgccaggacatctcagcactcccgcctggagctctcagcatcactgaaggtaccacagtgtaagtgctggactgcaggctgcagtgatccctctttcgtcccaccccctcttccctcagcagccccggaagcctgcctcacccgacgaggacagcgagcggcccggctcctttctgtctcttcccttcccgccctcttgtcttcagggaattcagaggattgctctccaaggccataatgaccccttgccttccccatgattctctacaaagctcttgcacacccttttcccattcaatttgtgagccaggcagggtagggattagtgtccccctttgacaaatgacagaactgagggttgcaatggggaaatgacttataaagtcacccagcaggtcaacaatgggcccacgaccaagaccctgggtgttcagaccccaaggccagggcctttcccgctgcatcaagatgccaatccctttgtgggcttcaccagtgcccaagtctctatggagaatgagaactggaagccactgctaccgtctacccagcaccagtagtgccgatgtgccacactgcccagttgaggcccctcacgctctgtgcccctagatccttcaggtccccaccctcagctgtcaccaccaccctccccaggggactccatctgagatgaggcctcgtcctcctggaagctgaggctgagaagggtggagcttggccctggggaaggcagaccagggtctgatggcttctagggatgctctgcgtgtgtctcagcaccgctatctcagccactttcagccttatgcacgtagaatgaccacagccactcgcatccgtatagcactttaaagtttctgcagtcctttgacacataggatctcatggagcctcacgtctactcccttctgcagatgaggaaaccgagagaagtggcccaaggtcacgcaactctgagatgccacatttcatttgatcttgtacacattttcttttattccttcttttttcctcctttcatttcccactacgcacaaagagtttataaacactgttctcagaagagtcacagtttggggtgagatctggaaatcaagaaatgggtgtccactcttttctttcattagctaggatctactagatgcattatactccatacctgcttttcccatggccgccctacggaaaatctccatcctcccagccagctacagtagggcctcctcaccccgtaccccacagctagacagtgtcagcactcatctcctcctcccacatttctggagcttttttttttccttccccattgacctttgtggtcttctgtgattatttatgctgcctcccaaggatagaattgaaataaaatgttttcaacttatcaaaaaaaaaata

SEQ ID NO: 33513 - DNA, 2469 bp, Homo sapiens
gcccccgctccgccgcggagtttctgcatgactgtcacaaagatgtcctggcgtccgcaataccgtagctccaagttccggaatgtctacgggaaggtggccaaccgggagcactgcttcgatgggatccccatcaccaagaatgtgcacgacaaccacttctgtgccgtcaacacccgcttcctggccatcgtcaccgagagcgcagggggcggctccttcctcgtcatccccctggagcagacaggcaggattgaacccaactaccccaaggtctgcggccaccagggcaatgtgctggatatcaaatggaaccccttcatcgacaacatcattgcctcgtgctcggaggacacgtcggtgcggatctgggagatccccgagggcgggctgaagcggaacatgacggaggcgctcctggagctgcacgggcacagccggcgtgtggggctggtcgagtggcaccccaccaccaacaacatcctgttcagcgctggctacgactacaaggtcctcatctggaacctggatgtgggtgagccggtgaagatgattgactgccacacggatgtgatcctctgcatgtccttcaacacggacggcagcctgctcaccaccacgtgcaaggacaagaagctgcgtgtgattgagccccgctctggccgtgttctgcaggaggccaactgcaaaaaccacagagtgaaccgggtggtgttcctggggaacatgaagcggctcctcacgacaggggtctccaggtggaacacaagacagattgccctctgggaccaggaggacctctccatgcccctgatcgaagaggaaattgatgggctctctggcctcctgttccccttctatgatgctgacacccacatgctctacctggctggaaagggtgatggaaacatccggtactacgagatcagcactgagaagccctacctgagttacctcatggagttccgctccccagccccgcagaaaggcctaggggtcatgcccaagcacgggctggatgtgtcagcctgcgaggtgttccgcttctacaagctggtgactctcaagggcctgatcgagcccatctccatgatcgtgccccggaggtcagattcctaccaggaagacatttacccaatgacaccaggcacggagccagcactgaccccggatgaatggctgggaggcatcaaccgagatcccgtgctgatgtctttgaaagaaggctataagaagtcctcaaaaatggtatttaaggctcccatcaaagaaaagaagagtgttgtggtcaacggaatagatttattagaaaatgtcccacccaggacagagaatgagctccttcgaatgttcttccggcagcaggatgagattcgacggttgaaagaggagctggcccagaaggacatccgcattcggcagctccagctggaactgaaaaacttgcgcaacagccccaagaactgttagctccccagctgggctgttttctaagccgatctctccgtcgtttctactcatcccttaacttctcccttaccagtgaccccagagacagagccaggacaggagtgggggccagcctgaggacccccgcctaccacctcgagaactggaagccaacctctaacctcctgacctcatgctaataaaagtccccagcttctggagaccccctgccggcagcccctttccctgccaccccaggagccaggcttcccctcagctgggtgaagactacagactccctggggttggcaggggctccatctcagtggaccaggaagcaagaggggaagcgggatcccagctagacttagaacttggacttttcccctgtgaagggggctgccaggacatctcagcactcccgcctggagctctcagcatcactgaaggtaccacagtgtaagtgctggactgcaggctgcagtgatccctctttcgtcccaccccctcttccctcagcagccccggaagcctgcctcacccgacgaggacagcgagcggcccggctcctttctgtctcttcccttcccgccctcttgtcttcagggaattcagaggattgctctccaaggccataatgaccccttgccttccccatgattctctacaaagctcttgcacacccttttcccattcaatttgtgagccaggcagggtagggattagtgtccccctttgacaaatgacagaactgagggttgcaatggggaaatgacttataaagtcacccagcaggtcaacaatgggcccacgaccaagaccctgggtgttcagaccccaaggccagggcctttcccgctgcatcaagatgccaatccctttgtgggcttcaccagtgcccaagtctctatggagaatgagaactggaagccactgctaccgtctacccagcaccagtagtgcgctcagtgacatagtccagcgtcaggccattgggcatgtgatcttggcccactgctt

SEQ ID NO: 33514 - DNA, 273 bp, Homo sapiens
gctgggaggcatcaaccgaggtaccacagcggggggctccacagagcacaggcggctgcagcctttgccttcagcgcagctcaccccagttctccttgtctgtccccctgtttgaacttccctcccacccagcctgctggaccatcacctgacagtccatgggatcgtcagtgagagcgtttcccttgccttctttagatcccgtgctgatgtctttgaaagaaggctataagaagtcctcaaaaatggtatttaaggctcccatcaaagaaa

SEQ ID NO: 33515 - DNA, 117 bp, Homo sapiens
tgaagagtaggggctttcccagcagccccccatgtgtcctctcttctgctcctcccactgtagtcagattcctaccaggaagacatttacccaatgacaccaggcacggagccagca

SEQ ID NO: 33516 - DNA, 330 bp, Homo sapiens
tggtactggcataaggatgaccatacagacccgtggaccggaattgagaatccagaaataaatgcatactttcacaacccatcaatttttggcagcggtgttaagacagtttattggcaaaagaataggtttttccacaggtgatgctgggacaactgaatatccacatgaaaagaatgaagttggaaccttatcttatgtcataaacaaaaataactcaaaatggatcaaaaacctaaacttcaaaactcttagggaaaaaaatagatatgtcttggattccagaatgatttcttaaatatgacaccaaaagcacaagcaaccaaagga

SEQ ID NO: 33517 - DNA, 520 bp, Homo sapiens
ggagacacaaacaaatggaaagacatccatgaattggaagacttaatattgttaaaatgtccatactgcctaaagtggtcttaccgattcagtgaaatttctatcaaaattccaatgggattttttgcagaaatagaaaaattctgaacttcatatggaatcacagagaacccttaatacccaaaacagtctgaggaaggaagaacaaagctggaagcaccacacttccaaacttcaaaatacgatacaaaagtacagtagttaaaacatcagctgggttcagtggctcacacccgtaatgccagcacttggggaggctgaggcaggcaaatcacttgagcccatgagtttgagaccagcctgggcaacatggcaaaaccctatctctactaaaaatacaaaaattagcccgggcatggtggtgcttgcttgtagtcccagctacttgggaggtgaggtgggaggaccacctgagctggggaggtcaaggctgcagtgagccatgatcataccactgcac

SEQ ID NO: 33518 - DNA, 474 bp, Homo sapiens
tcggacaccctcacggattactcaataacagccttaaaactcagattaaaaataaaacttaacaaaccttggtttaagttccagctccaccatctggtaactgtgagatcttagtaaagccacttaaaacactctgaacctttgtttcctcatatgtaaaataagaatactatactatttcttctgcctatctcatataaggaagcgcaggaggaataaaacctacccacattgccagtatgttttctattccttctggacagaaaaggtcaactcatataaacagctcacatcagaaaaagaccaaaatgtaacaatcttgtcatcatttttaaatgaaaaagaatttaacctacgtttgaacatttactacacagatataacacatctgttattacaacaaactgaggaaataaagggataaaagattcatgctctctcaaggtatgtgtgtgttgaggtaatccgtgaggg

SEQ ID NO: 33519 - DNA, 384 bp, Homo sapiens
tttttttttttagagatggggtctcgctatgtctgaagtagactggctattcacaggagcgatcatagtacaccctcaagcaatcctccagcctcagtctctaaggtagctgaaattacagtacatgccactgcttctggctgtattcagtgtaattttctcacaatctttgtttaaattaagcgtccgtgtgaatatttagtatttagatactactcagtgtcaggacaagcagacaataggactatggactctttctcaccctacatataggctatcatatttttttctactttctagactcttttccctcaactgctccaaaatctgtcacatctgaatattttccatatgctcaaatgcatcagatactgtttttctctg

SEQ ID NO: 33520 - DNA, 430 bp, Homo sapiens
caaaaaaataaataaataaaaacaaataaataaataaaaaaaatgaagtgaacactaaaccatctaatagataaaccattcagactattcctgttactgcactcagtagttttagttacaaatgatgacaatcaaagttatgttccatggttgagtgcactttgtcttatttgtatgtgaaaactcacacagtaggaagaagttctgtattggttaactgagttctcaactggagacagcactgacttccccatttccctttgcgggtaggtggcattccagattatgtggtggtaagcttttcttttgcggggagagaagacagggcagtactcctgatacctaataactatagagcagacatgttaaacaccctgtaattatcaggccacttccccaactgcagaattgcccatctcacgtgcacaca

SEQ ID NO: 33521 - DNA, 417 bp, Homo sapiens
gccatcgaaatctgtactttcaaagctgtgtgtttatggtttcctttgctttatcacctgacaaacagttcttacatcttgcatgtgatacaagaggtgtatccatttgtatgttaattgaactaggcctgggaaaagatggtatcaactaggagccatgcatgaacccattgttgtaatccatgcctggaaagagacgatttcacattcccattgctgatcctcaaaccacccaaatgcaacaacaggcttttgacctcacttggagataaccaaaatgatatcatcaaatatagacatgcttactacactcttccaaataattactggtatcagccccatttttatttttaaataattgtaatctaattgaataactaatgtatatttcagtgtgggaaatttggaaaatacaca

SEQ ID NO: 33522 - DNA, 483 bp, Homo sapiens
catcaaggggaggagaaggtttgagaataacgttttctacatactgagtttgagaggcctcttgcatattcaagtccacatgtttaatgggtaggtggaaacatgaacctcgatcccaggggagagatctggtgaaagatgtaaatttcagagtcatctttgtgaaactgagagtagaagtcatgtaataaagagatcacccagatggtatgtcgacatgtaaaagagagacaaggatgaaacctcaacagatatcgatattagctcagagaaaagaagaaaagcaaacatgggttttcacggaggcagaaggaggagcagaggaatacagcgacctgggggtcaagattgcaaagcacttcaaggatggaggcccatcatgccaacccttcaaagcaactgtgttgaagaaatgaaaagatgagtcaatggtaaggtcatggttgaccttgacacatgtcctgatggaagttgatttgcaat

SEQ ID NO: 33523 - DNA, 404 bp, Homo sapiens
ggactacttaatcagaaacaatcagaggtaaacatgactgccattagtgctttttaaattatggcctcaaaagatatgtatctgggctgtggatgaatgtttaaaattatgtaagaatgggccaggcacagtggctcacgtctgtaatcccaccactttgggaggctgtggcgggtggatcacctgaggtcaggaatttgagaccagcctggccaacatggtaaaacccagtctctactaaaaatacaaaaaaattagccaggcttggtggcaggtgcctgtaagtcaagcagctcaggaggctgaggcaagagaatcgcttgaacccagaagtcggaggttgcagtgagctgagattgcgccactgcaccccagcctgggcaacagagtgggactctgtctca

SEQ ID NO: 33524 - DNA, 720 bp, Homo sapiens
atgccttccccgagccctgtgaggatacggtctcctatttgaccttatggccatagacagacttgagctaagaatatgaagagagcgttttgatggatattttgacagctttggggtgaatgtctcagttagctattgctgcaatactgctgtgtaacaaaccaccccaaaaccagaggcttaacatgacagtaatttattcccatccacacatttgtgatttagctgggggagtgctatgctggatgcaactttaactagtacttactgtattagctcatgataaggagttttgtaatccagttgttaaacacagccattagtaagaattaaattctgtaagtttacaaataaagaaattatattaaaatagaagatactaaatattcagactccattgcttcctaactatgctgctgtgctctgtgcttgaggttgcttctgcccatcgtgtctctatggtggaaatacttgaggggggtgccactgtgcagctcttcccaccttcgttcagtgacgtcatgataataccttgacattgaccatggtgaaattggtatctacaccacagaaattgcaaatgctacaaatcagggctttaaaacaacaacaaaaacaaatagatgattgtgaagcatttacccacatacccctgactgggagtcgctgatctagactgggcacagttgggcttgaatccagggtgcaggtcagtgaggg

SEQ ID NO: 33525 - DNA, 155 bp, Homo sapiens
aggagtatgtaaactgtggagagaagtagggctattttctacagcagtggtcttcaaattttttaattgggtaccttaccagaaaacatttgaatagaaaacctcaatataagtatgtctaattataaatcatatgtataaatatatatactatt

SEQ ID NO: 33526 - DNA, 857 bp, Homo sapiens
cttgccattttgtttttattcagttcaacttccttgccgctctgtagtttccagaggagtaaagtaaaaattatgagttctgagaaagcaaatttgcttgccataactccatttgagggtgactgcgattttgttagcataagattgaagctaatctcctaaagagtatatctgattctgtgtcttaatcatttttcacaagaaaaaaaaatcgggacatataggtatatgtagagtaacataaagccaccaattgtagaactgatgtgatgtgaattgtactgagggttggcatgaatgcttttctttttcacgtgtaacattaggttcagacatatatgtgtgcagtgcattgctgtaatgtgtgcagatggtaagaacacatatgtctcaataccatgctttatcgctcaatagcctgacagatgtatatgggtgaattcattcattgccctctctgttgattagtagcactttgaaaatgatgtcgtaatttggcaaactaaatcctggtcggggagcagtactgaaagtattgaagaaatgacacgattatagtttgatccttgtacttagaaccttcatcaaatataaggttttaggtcttctgtaatgttaaaaaaaggaaaggaaaaagagctagttttacatatgatgcagaatttgaaaaatttgtctttttattggcaaatgctgatttaaaagtccctgaatcatttcagaatctgtagagaatgagatgtggtattatatgtgatatcacattaaaaagtaaaagttcagtctgtggacaaagtctattaaaatgtttttaatatagtagaggacctcgtaacatgagccactgttagtaaaaa

SEQ ID NO: 33527 - DNA, 661 bp, Homo sapiens
agaccctgttactacaaaaaaaaaaaaatttaaaaattaaccaggtgtggtggcacacacccttctctctcttgctccttctttcgccatgtgataggcctgctcccctttagccttctgccatgattggaagcttcttgagaccctcaccagaagcagatgctggcaccatactccctgtacagcctgcagaaccgtgaaccaaaataaatatcttttctttataaattacccagcctcaggtattccttaacagcaacacaaacggacttacacattgctataaaagataacaagctcaggtcaaagagaaatgaacttgagaccagagaactctcctaagacagcacaagtttacctttgtgaggcttcctagcccaagtctgtttttcttctttaaattttttattgagcagcacttaaaacctgttactgtaaacctccacccactttattttagtactgaaccaaaaagcaaatacatgcctcaaaaaatcactgaatctaaataacaaactaaggttttgaagaaattagcagttctctaatattcaagcaactatgcccaaatcagcattagcccatttaaatatccctgatcagctggattccaaagacctgtcaactatttctttaaaatatctagcacaaataatcatat

SEQ ID NO: 33528 - DNA, 627 bp, Homo sapiens
ggacgcgtgggtcgacccacgcgttcggacccacgcgtccgcctaactgcagaccatgaagtaaattatgtaactaggtttttgcttctccagtggtgaccacccccccccatccccgctcacaacttgggttcttctcagcggggcgagctgagaagcggtcatgagcacctggggattttagtaagtgtgtcttcctagaattcgaaggctctctctttctagaggtgctacatagttggtaatgcttggaatggcaatagggtagaatgattaatcaaaggcatatcttctatatctgaagagtatccttccttcagggtttaatagactgagtcagatgggtctgatattaatcaaaattgtctcttctgaggaccgctgataagcattgacttgctgtcccctaaggaaatccgagcggctacaaagcgtttctttacttttcacttcaattaatgctgcgcttcgcttggtgagtgcgtactttttctacctgtacacattcctgcattcatgtattttgttttttttgactaaagctatgttacatggaaaggattttgaagccttttgtttcccttgctttgttttaataaacagtatattctttggttgtgaatccta

SEQ ID NO: 33529 - DNA, 285 bp, Homo sapiens
cctggccctctctggaaattattttaataagtggaaaaagaacattaacctctccccatcttctcagtgtgtctttttattatttctttgctgaaataatgtagaattgtgttttttaggtaaatattgcagattttcaagagaatcagtgggtgacttgtttccaggagtctgctgaagctatccttggacaaaatgctgcttatcttggggaattaaaagacaagggtatgttagtggtttttggttagagagggagagagggtcaggcagagagggtccagg

SEQ ID NO: 33530 - DNA, 2875 bp, Homo sapiens
cgcacgtcgggggcgggagcggtgcgcgcaacttctcgggccaataactgcgcagcgcgcgggacccgggtggggaagctggagctgttgcggggtccgcggggaagtcttggcggtggagccatggtcggccagctgagcgagggggccattgcggccatcatgcagaagggggatacaaacataaagcccatcctccaagtcatcaacatccgtcccattactacggggaatagtccgccgcgttatcgactgctcatgagtgatggattgaacactctatcctctttcatgttggcgacacagttgaaccctctcgtggaggaagaacaattgtccagcaactgtgtatgccagattcacagatttattgtgaacactctgaaagacggaaggagagtagttatcttgatggaattagaagttttgaagtcagctgaagcagttggagtgaagattggcaatccagtgccctataatgaaggactcgggcagccgcaagtagctcctccagcgccagcagccagcccagcagcaagcagcaggccccagccgcagaatggaagctcgggaatgggttctactgtttctaaggcttatggtgcttcaaagacatttggaaaagctgcaggtcccagcctgtcacacacttctgggggaacacagtccaaagtggtgcccattgccagcctcactccttaccagtccaagtggaccatttgtgctcgtgttaccaacaaaagtcagatccgtacctggagcaactcccgaggggaagggaagcttttctccctagaactggttgacgaaagtggtgaaatccgagctacagctttcaatgagcaagtggacaagttctttcctcttattgaagtgaacaaggtgtattatttctcgaaaggcaccctgaagattgctaacaagcagttcacagctgttaaaaatgactacgagatgaccttcaataacgagacttccgtcatgccctgtgaggacgaccatcatttacctacggttcagtttgatttcacggggattgatgacctcgagaacaagtcgaaagactcacttgtagacatcatcgggatctgcaagagctatgaagacgccactaaaatcacagtgaggtctaacaacagagaagttgccaagaggaatatctacttgatggacacatccgggaaggtggtgactgctacactgtggggggaagatgctgataaatttgatggttctagacagcccgtgttggctatcaaaggagcccgagtctctgatttcggtggacggagcctctccgtgctgtcttcaagcactatcattgcgaatcctgacatcccagaggcctataagcttcgtggatggtttgacgcagaaggacaagccttagatggtgtttccatctctgatctaaagagcggcggagtcggagggagtaacaccaactggaaaaccttgtatgaggtcaaatccgagaacctgggccaaggcgacaagccggactactttagttctgtggccacagtggtgtatcttcgcaaagagaactgcatgtaccaagcctgcccgactcaggactgcaataagaaagtgattgatcaacagaatggattgtaccgctgtgagaagtgcgacaccgaatttcccaatttcaagtaccgcatgatcctgtcagtaaatattgcagattttcaagagaatcagtgggtgacttgtttccaggagtctgctgaagctatccttggacaaaatgctgcttatcttggggaattaaaagacaagaatgaacaggcatttgaagaagttttccagaatgccaacttccgatctttcatattcagagtcagggtcaaagtggagacctacaacgacgagtctcgaattaaggccactgtgatggacgtgaagcccgtggactacagagagtatggccgaaggctggtcatgagcatcaggagaagtgcattgatgtgagaggagcagtgccaatcgggcagaagtttgcaaataggcagaatggaatcgatttcctcccacctccgtgtgacgatcccatgttagctacacagtgcagaggctcttgatggtggactaagcaatttcctccctcgtgcgcatctcagaacccatcggtaggcaaaggaaaatacgctcaggtggttgtggtgtagactgtgtcaggcctacggagtcagccagtggctagcgcaagaccagtcactccctctgccttcaggcttctgtcaatttcattatcatcaagcaggaattatgtcgtaagtcactgaccctaactgcagaccatgaagtaaattatgtaactaggtttttgcttctccagtggtgaccacccccccccatccccgctcacaacttgggttcttctcagcggggcgagctgagaagcggtcatgagcacctggggattttagtaagtgtgtcttcctagaattcgaaggctctctctttctagaggtgctacatagttggtaatgcttggaatggcaatagggtagaatgattaatcaaaggcatatcttctatatctgaagagtatccttccttcagggtttaatagactgagtcagatgggtctgatattaatcaaaattgtctcttctgaggaccgctgataagcattgacttgctgtcccctaaggaaatccgagcggctacaaagcgtttctttacttttcacttcaattaatgctgcgcttcgcttggtgagtgcgtactttttctacctgtacacattcctgcattcatgtattttgttttttttgactaaagctatgttacatggaaaggattttgaagccttttgtttcccttgctttgttttaataaacagtatattctttggttgtgaatccta

SEQ ID NO: 33531 - DNA, 2861 bp, Homo sapiens
cgcgagcggagagcgaaccccgagtagagcccgtgtaggcagctcgctctagccggccgtccggccggcgctagttatcgcatcatagccccgtagtagcccaagttaccgaaggcgggcactcagggtgaccattacatgcgcaagcggtgagtcacagcgacggccgaggaccactacctacgacgtcatcaacatccgtcccattactacggggaatagtccgccgcgttatcgactgctcatgagtgatggattgaacactctatcctctttcatgttggcgacacagttgaaccctctcgtggaggaagaacaattgtccagcaactgtgtatgccagattcacagatttattgtgaacactctgaaagacggaaggagagtagttatcttgatggaattagaagttttgaagtcagctgaagcagttggagtgaagattggcaatccagtgccctataatgaaggactcgggcagccgcaagtagctcctccagcgccagcagccagcccagcagcaagcagcaggccccagccgcagaatggaagctcgggaatgggttctactgtttctaaggcttatggtgcttcaaagacatttggaaaagctgcaggtcccagcctgtcacacacttctgggggaacacagtccaaagtggtgcccattgccagcctcactccttaccagtccaagtggaccatttgtgctcgtgttaccaacaaaagtcagatccgtacctggagcaactcccgaggggaagggaagcttttctccctagaactggttgacgaaagtggtgaaatccgagctacagctttcaatgagcaagtggacaagttctttcctcttattgaagtgaacaaggtgtattatttctcgaaaggcaccctgaagattgctaacaagcagttcacagctgttaaaaatgactacgagatgaccttcaataacgagacttccgtcatgccctgtgaggacgaccatcatttacctacggttcagtttgatttcacggggattgatgacctcgagaacaagtcgaaagactcacttgtagacatcatcgggatctgcaagagctatgaagacgccactaaaatcacagtgaggtctaacaacagagaagttgccaagaggaatatctacttgatggacacatccgggaaggtggtgactgctacactgtggggggaagatgctgataaatttgatggttctagacagcccgtgttggctatcaaaggagcccgagtctctgatttcggtggacggagcctctccgtgctgtcttcaagcactatcattgcgaatcctgacatcccagaggcctataagcttcgtggatggtttgacgcagaaggacaagccttagatggtgtttccatctctgatctaaagagcggcggagtcggagggagtaacaccaactggaaaaccttgtatgaggtcaaatccgagaacctgggccaaggcgacaagccggactactttagttctgtggccacagtggtgtatcttcgcaaagagaactgcatgtaccaagcctgcccgactcaggactgcaataagaaagtgattgatcaacagaatggattgtaccgctgtgagaagtgcgacaccgaatttcccaatttcaagtaccgcatgatcctgtcagtaaatattgcagattttcaagagaatcagtgggtgacttgtttccaggagtctgctgaagctatccttggacaaaatgctgcttatcttggggaattaaaagacaagaatgaacaggcatttgaagaagttttccagaatgccaacttccgatctttcatattcagagtcagggtcaaagtggagacctacaacgacgagtctcgaattaaggccactgtgatggacgtgaagcccgtggactacagagagtatggccgaaggctggtcatgagcatcaggagaagtgcattgatgtgagaggagcagtgccaatcgggcagaagtttgcaaataggcagaatggaatcgatttcctcccacctccgtgtgacgatcccatgttagctacacagtgcagaggctcttgatggtggactaagcaatttcctccctcgtgcgcatctcagaacccatcggtaggcaaaggaaaatacgctcaggtggttgtggtgtagactgtgtcaggcctacggagtcagccagtggctagcgcaagaccagtcactccctctgccttcaggcttctgtcaatttcattatcatcaagcaggaattatgtcgtaagtcactgaccctaactgcagaccatgaagtaaattatgtaactaggtttttgcttctccagtggtgaccacccccccccatccccgctcacaacttgggttcttctcagcggggcgagctgagaagcggtcatgagcacctggggattttagtaagtgtgtcttcctagaattcgaaggctctctctttctagaggtgctacatagttggtaatgcttggaatggcaatagggtagaatgattaatcaaaggcatatcttctatatctgaagagtatccttccttcagggtttaatagactgagtcagatgggtctgatattaatcaaaattgtctcttctgaggaccgctgataagcattgacttgctgtcccctaaggaaatccgagcggctacaaagcgtttctttacttttcacttcaattaatgctgcgcttcgcttggtgagtgcgtactttttctacctgtacacattcctgcattcatgtattttgttttttttgactaaagctatgttacatggaaaggattttgaagccttttgtttcccttgctttgttttaataaacagtatattctttggttgtgaatccta

SEQ ID NO: 33532 - DNA, 3157 bp, Homo sapiens
cgcacgtcgggggcgggagcggtgcgcgcaacttctcgggccaataactgcgcagcgcgcgggacccgggtggggaagctggagctgttgcggggtccgcggggaagtcttggcggtggagccatggtcggccagctgagcgagggggccattgcggccatcatgcagaagggggatacaaacataaagcccatcctccaagtcatcaacatccgtcccattactacggggaatagtccgccgcgttatcgactgctcatgagtgatggattgaacactctatcctctttcatgttggcgacacagttgaaccctctcgtggaggaagaacaattgtccagcaactgtgtatgccagattcacagatttattgtgaacactctgaaagacggaaggagagtagttatcttgatggaattagaagttttgaagtcagctgaagcagttggagtgaagattggcaatccagtgccctataatgaaggactcgggcagccgcaagtagctcctccagcgccagcagccagcccagcagcaagcagcaggccccagccgcagaatggaagctcgggaatgggttctactgtttctaaggcttatggtgcttcaaagacatttggaaaagctgcaggtcccagcctgtcacacacttctgggggaacacagtccaaagtggtgcccattgccagcctcactccttaccagtccaagtggaccatttgtgctcgtgttaccaacaaaagtcagatccgtacctggagcaactcccgaggggaagggaagcttttctccctagaactggttgacgaaagtggtgaaatccgagctacagctttcaatgagcaagtggacaagttctttcctcttattgaagtgaacaaggtgtattatttctcgaaaggcaccctgaagattgctaacaagcagttcacagctgttaaaaatgactacgagatgaccttcaataacgagacttccgtcatgccctgtgaggacgaccatcatttacctacggttcagtttgatttcacggggattgatgacctcgagaacaagtcgaaagactcacttgtagacatcatcgggatctgcaagagctatgaagacgccactaaaatcacagtgaggtctaacaacagagaagttgccaagaggaatatctacttgatggacacatccgggaaggtggtgactgctacactgtggggggaagatgctgataaatttgatggttctagacagcccgtgttggctatcaaaggagcccgagtctctgatttcggtggacggagcctctccgtgctgtcttcaagcactatcattgcgaatcctgacatcccagaggcctataagcttcgtggatggtttgacgcagaaggacaagccttagatggtgtttccatctctgatctaaagagcggcggagtcggagggagtaacaccaactggaaaaccttgtatgaggtcaaatccgagaacctgggccaaggcgacaagccggactactttagttctgtggccacagtggtgtatcttcgcaaagagaactgcatgtaccaagcctgcccgactcaggactgcaataagaaagtgattgatcaacagaatggattgtaccgctgtgagaagtgcgacaccgaatttcccaatttcaagtaccgcatgatcctgtcagtaaatattgcagattttcaagagaatcagtgggtgacttgtttccaggagtctgctgaagctatccttggacaaaatgctgcttatcttggggaattaaaagacaagaatgaacaggcatttgaagaagttttccagaatgccaacttccgatctttcatattcagagtcagggtcaaagtggagacctacaacgacgagtctcgaattaaggccactgtgatggacgtgaagcccgtggactacagagagtatggccgaaggctggtcatgagcatcaggagaagtgcattgatgtgagaggagcagtgccaatcgggcagaagtttgcaaataggcagaatggaatcgatttcctcccacctccgtgtgacgatcccatgttagctacacagtgcagaggctcttgatggtggactaagcaatttcctccctcgtgcgcatctcagaacccatcggtaggcaaaggaaaatacgctcaggtggttgtggtgtagactgtgtcaggcctacggagtcagccagtggctagcgcaagaccagtcactccctctgccttcaggcttctgtcaatttcattatcatcaagcaggaattatgtcgtaagtcactgaccctaactgcagaccatgaagtaaattatgtaactaggtttttgcttctccagtggtgaccacccccccccatccccgctcacaacttgggttcttctcagcggggcgagctgagaagcggtcatgagcacctggggattttagtaagtgtgtcttcctagaattcgaaggctctctctttctagaggtgctacatagttggtaatgcttggaatggcaatagggtagaatgattaatcaaaggcatatcttctatatctgaagagtatccttccttcagggtttaatagactgagtcagatgggtctgatattaatcaaaattgtctcttctgaggaccgctgataagcattgacttgctgtcccctaaggaaatccgagcggctacaaagcgtttctttacttttcacttcaattaatgctgcgcttcgcttggtgagtgcgtactttttctacctgtacacattcctgcattcatgtattttgttttttttgactaaagctatgttacatggaaaggattttgaagccttttgtttcccttgctttgttttaataaacagtatattctttggttgtgaatcctaaaaaaaaaaaaaaaaaaaaaaaaaaaaaaaaaaaaaaaaaaaaaaggggggggggggaaagagatatcccccgagggggggcacacagtaatttatgcgccggtaaccacgaggttttgtgtgtggcagaaagaggggggccccataatagggaaggatctacaataaaagcgacacgagcactggggacgcgagtttataaaaaggcgtccggaagggggaaaacagctgatgcagagtggggaaacttggggaagaaagaaacacacatatcgcggggga

SEQ ID NO: 33533 - DNA, 3392 bp, Homo sapiens
cgcacgtcgggggcgggagcggtgcgcgcaacttctcgggccaataactgcgcagcgcgcgggacccgggtggggaagctggagctgttgcggggtccgcggggaagtcttggcggtggagccatggtcggccagctgagcgagggggccattgcggccatcatgcagaagggggatacaaacataaagcccatcctccaagtcatcaacatccgtcccattactacggggaatagtccgccgcgttatcgactgctcatgagtgatggattgaacactctatcctctttcatgttggcgacacagttgaaccctctcgtggaggaagaacaattgtccagcaactgtgtatgccagattcacagatttattgtgaacactctgaaagacggaaggagagtagttatcttgatggaattagaagttttgaagtcagctgaagcagttggagtgaagattggcaatccagtgccctataatgaaggactcgggcagccgcaagtagctcctccagcgccagcagccagcccagcagcaagcagcaggccccagccgcagaatggaagctcgggaatgggttctactgtttctaaggcttatggtgcttcaaagacatttggaaaagctgcaggtcccagcctgtcacacacttctgggggaacacagtccaaagtggtgcccattgccagcctcactccttaccagtccaagtggaccatttgtgctcgtgttaccaacaaaagtcagatccgtacctggagcaactcccgaggggaagggaagcttttctccctagaactggttgacgaaagtggtgaaatccgagctacagctttcaatgagcaagtggacaagttctttcctcttattgaagtgaacaaggtgtattatttctcgaaaggcaccctgaagattgctaacaagcagttcacagctgttaaaaatgactacgagatgaccttcaataacgagacttccgtcatgccctgtgaggacgaccatcatttacctacggttcagtttgatttcacggggattgatgacctcgagaacaagtcgaaagactcacttgtagacatcatcgggatctgcaagagctatgaagacgccactaaaatcacagtgaggtctaacaacagagaagttgccaagaggaatatctacttgatggacacatccgggaaggtggtgactgctacactgtggggggaagatgctgataaatttgatggttctagacagcccgtgttggctatcaaaggagcccgagtctctgatttcggtggacggagcctctccgtgctgtcttcaagcactatcattgcgaatcctgacatcccagaggcctataagcttcgtggatggtttgacgcagaaggacaagccttagatggtgtttccatctctgatctaaagagcggcggagtcggagggagtaacaccaactggaaaaccttgtatgaggtcaaatccgagaacctgggccaaggcgacaagccggactactttagttctgtggccacagtggtgtatcttcgcaaagagaactgcatgtaccaagcctgcccgactcaggactgcaataagaaagtgattgatcaacagaatggattgtaccgctgtgagaagtgcgacaccgaatttcccaatttcaagtaccgcatgatcctgtcagtaaatattgcagattttcaagagaatcagtgggtgacttgtttccaggagtctgctgaagctatccttggacaaaatgctgcttatcttggggaattaaaagacaagaatgaacaggcatttgaagaagttttccagaatgccaacttccgatctttcatattcagagtcagggtcaaagtggagacctacaacgacgagtctcgaattaaggccactgtgatggacgtgaagcccgtggactacagagagtatggccgaaggctggtcatgagcatcaggagaagtgcattgatgtgagaggagcagtgccaatcgggcagaagtttgcaaataggcagaatggaatcgatttcctcccacctccgtgtgacgatcccatgttagctacacagtgcagaggctcttgatggtggactaagcaatttcctccctcgtgcgcatctcagaacccatcggtaggcaaaggaaaatacgctcaggtggttgtggtgtagactgtgtcaggcctacggagtcagccagtggctagcgcaagaccagtcactccctctgccttcaggcttctgtcaatttcattatcatcaagcaggaattatgtcgtaagtcactgaccctaactgcagaccatgaagtaaattatgtaactaggtttttgcttctccagtggtgaccacccccccccatccccgctcacaacttgggttcttctcagcggggcgagctgagaagcggtcatgagcacctggggattttagtaagtgtgtcttcctagaattcgaaggctctctctttctagaggtgctacatagttggtaatgcttggaatggcaatagggtagaatgattaatcaaaggcatatcttctatatctgaagagtatccttccttcagggtttaatagactgagtcagatgggtctgatattaatcaaaattgtctcttctgaggaccgctgataagcattgacttgctgtcccctaaggaaatccgagcggctacaaagcgtttctttacttttcacttcaattaatgctgcgcttcgcttggtgagtgcgtactttttctacctgtacacattcctgcattcatgtattttgttttttttgactaaagctatgttacatggaaaggattttgaagccttttgtttcccttgctttgttttaataaacagtatattctttggttgtgaatcctactttctttgaatgcaaagagttcctataactggaaagcaattaattagccttcataataaatgttcacttgggggggatgttaactcattataaacccgaagattagtccaaggcatggagatccttcttcctagtgtttgcagccctgaaatgcatctttcaaagcatgaaaacactaaaaacaaaaagccattttgcctgaggatgctgatgatctggcacttgggattttattgatgtttacgcagcagtctaacaccaaccacgctttgaaatgtgtacagacagtgagctggtaagaaaacagtaattatgctagtgggcctttcagtcagcaaaagcatgctcgctctgtgtgttcctaatcatattaattatctatccggtggctgcaacacaccgcctgccattggccgcacatctcgccgtcgtaccccggcagtgcggcggtcactctgcagccagaggacctgctgttcatcactgcacatgccgcctgcggaggctttttggata

SEQ ID NO: 33534 - DNA, 2559 bp, Homo sapiens
ttacattacgagagggttaaacccgggagttgttctagggtggtaactgactctcgtccctgcagtggcaaaagcacctggcgtctttcgtaggtgctatatcccgcaggaccttactcataatctcaggctctcagttccttgctgatgggccttgaaggtccagttgattactcagtgccttccctatctatcatgtaagggttctcatacccaacacacctcctgaatagtcgggcgactggatgtaatagagctttgcaatctatggtgcaccatgcaaaggagtcagtccctcacctggctctgccaaaacaggcatgcagcttggaggagagaagtttatacagtccaaagtggtgcccattgccagcctcactccttaccagtccaagtggaccatttgtgctcgtgttaccaacaaaagtcagatccgtacctggagcaactcccgaggggaagggaagcttttctccctagaactggttgacgaaagtggtgaaatccgagctacagctttcaatgagcaagtggacaagttctttcctcttattgaagtgaacaaggtgtattatttctcgaaaggcaccctgaagattgctaacaagcagttcacagctgttaaaaatgactacgagatgaccttcaataacgagacttccgtcatgccctgtgaggacgaccatcatttacctacggttcagtttgatttcacggggattgatgacctcgagaacaagtcgaaagactcacttgtagacatcatcgggatctgcaagagctatgaagacgccactaaaatcacagtgaggtctaacaacagagaagttgccaagaggaatatctacttgatggacacatccgggaaggtggtgactgctacactgtggggggaagatgctgataaatttgatggttctagacagcccgtgttggctatcaaaggagcccgagtctctgatttcggtggacggagcctctccgtgctgtcttcaagcactatcattgcgaatcctgacatcccagaggcctataagcttcgtggatggtttgacgcagaaggacaagccttagatggtgtttccatctctgatctaaagagcggcggagtcggagggagtaacaccaactggaaaaccttgtatgaggtcaaatccgagaacctgggccaaggcgacaagccggactactttagttctgtggccacagtggtgtatcttcgcaaagagaactgcatgtaccaagcctgcccgactcaggactgcaataagaaagtgattgatcaacagaatggattgtaccgctgtgagaagtgcgacaccgaatttcccaatttcaagtaccgcatgatcctgtcagtaaatattgcagattttcaagagaatcagtgggtgacttgtttccaggagtctgctgaagctatccttggacaaaatgctgcttatcttggggaattaaaagacaagaatgaacaggcatttgaagaagttttccagaatgccaacttccgatctttcatattcagagtcagggtcaaagtggagacctacaacgacgagtctcgaattaaggccactgtgatggacgtgaagcccgtggactacagagagtatggccgaaggctggtcatgagcatcaggagaagtgcattgatgtgagaggagcagtgccaatcgggcagaagtttgcaaataggcagaatggaatcgatttcctcccacctccgtgtgacgatcccatgttagctacacagtgcagaggctcttgatggtggactaagcaatttcctccctcgtgcgcatctcagaacccatcggtaggcaaaggaaaatacgctcaggtggttgtggtgtagactgtgtcaggcctacggagtcagccagtggctagcgcaagaccagtcactccctctgccttcaggcttctgtcaatttcattatcatcaagcaggaattatgtcgtaagtcactgaccctaactgcagaccatgaagtaaattatgtaactaggtttttgcttctccagtggtgaccacccccccccatccccgctcacaacttgggttcttctcagcggggcgagctgagaagcggtcatgagcacctggggattttagtaagtgtgtcttcctagaattcgaaggctctctctttctagaggtgctacatagttggtaatgcttggaatggcaatagggtagaatgattaatcaaaggcatatcttctatatctgaagagtatccttccttcagggtttaatagactgagtcagatgggtctgatattaatcaaaattgtctcttctgaggaccgctgataagcattgacttgctgtcccctaaggaaatccgagcggctacaaagcgtttctttacttttcacttcaattaatgctgcgcttcgcttggtgagtgcgtactttttctacctgtacacattcctgcattcatgtattttgttttttttgactaaagctatgttacatggaaaggattttgaagccttttgtttcccttgctttgttttaataaacagtatattctttggttgtgaatccta

SEQ ID NO: 33535 - DNA, 2948 bp, Homo sapiens
  misc_feature (2905)..(2905): n is a, c, g, or t
cgcacgtcgggggcgggagcggtgcgcgcaacttctcgggccaataactgcgcagcgcgcgggacccgggtggggaagctggagctgttgcggggtccgcggggaagtcttggcggtggagccatggtcggccagctgagcgagggggccattgcggccatcatgcagaagggggatacaaacataaagcccatcctccaagtcatcaacatccgtcccattactacggggaatagtccgccgcgttatcgactgctcatgagtgatggattgaacactctatcctctttcatgttggcgacacagttgaaccctctcgtggaggaagaacaattgtccagcaactgtgtatgccagattcacagatttattgtgaacactctgaaagacggaaggagagtagttatcttgatggaattagaagttttgaagtcagctgaagcagttggagtgaagattggcaatccagtgccctataatgaaggactcgggcagccgcaagtagctcctccagcgccagcagccagcccagcagcaagcagcaggccccagccgcagaatggaagctcgggaatgggttctactgtttctaaggcttatggtgcttcaaagacatttggaaaagctgcaggtcccagcctgtcacacacttctgggggaacacagtccaaagtggtgcccattgccagcctcactccttaccagtccaagtggaccatttgtgctcgtgttaccaacaaaagtcagatccgtacctggagcaactcccgaggggaagggaagcttttctccctagaactggttgacgaaagtggtgaaatccgagctacagctttcaatgagcaagtggacaagttctttcctcttattgaagtgaacaaggtgtattatttctcgaaaggcaccctgaagattgctaacaagcagttcacagctgttaaaaatgactacgagatgaccttcaataacgagacttccgtcatgccctgtgaggacgaccatcatttacctacggttcagtttgatttcacggggattgatgacctcgagaacaagtcgaaagactcacttgtagacatcatcgggatctgcaagagctatgaagacgccactaaaatcacagtgaggtctaacaacagagaagttgccaagaggaatatctacttgatggacacatccgggaaggtggtgactgctacactgtggggggaagatgctgataaatttgatggttctagacagcccgtgttggctatcaaaggagcccgagtctctgatttcggtggacggagcctctccgtgctgtcttcaagcactatcattgcgaatcctgacatcccagaggcctataagcttcgtggatggtttgacgcagaaggacaagccttagatggtgtttccatctctgatctaaagagcggcggagtcggagggagtaacaccaactggaaaaccttgtatgaggtcaaatccgagaacctgggccaaggcgacaagccggactactttagttctgtggccacagtggtgtatcttcgcaaagagaactgcatgtaccaagcctgcccgactcaggactgcaataagaaagtgattgatcaacagaatggattgtaccgctgtgagaagtgcgacaccgaatttcccaatttcaagtaccgcatgatcctgtcagtaaatattgcagattttcaagagaatcagtgggtgacttgtttccaggagtctgctgaagctatccttggacaaaatgctgcttatcttggggaattaaaagacaagaatgaacaggcatttgaagaagttttccagaatgccaacttccgatctttcatattcagagtcagggtcaaagtggagacctacaacgacgagtctcgaattaaggccactgtgatggacgtgaagcccgtggactacagagagtatggccgaaggctggtcatgagcatcaggagaagtgcattgatgtgagaggagcagtgccaatcgggcagaagtttgcaaataggcagaatggaatcgatttcctcccacctccgtgtgacgatcccatgttagctacacagtgcagaggctcttgatggtggactaagcaatttcctccctcgtgcgcatctcagaacccatcggtaggcaaaggaaaatacgctcaggtggttgtggtgtagactgtgtcaggcctacggagtcagccagtggctagcgcaagaccagtcactccctctgccttcaggcttctgtcaatttcattatcatcaagcaggaattatgtcgtaagtcactgaccctaactgcagaccatgaagtaaattatgtaactaggtttttgcttctccagtggtgaccacccccccccatccccgctcacaacttgggttcttctcagcggggcgagctgagaagcggtcatgagcacctggggattttagtaagtgtgtcttcctagaattcgaaggctctctctttctagaggtgctacatagttggtaatgcttggaatggcaatagggtagaatgattaatcaaaggcatatcttctatatctgaagagtatccttccttcagggtttaatagactgagtcagatgggtctgatattaatcaaaattgtctcttctgaggaccgctgataagcattgacttgctgtcccctaaggaaatccgagcggctacaaagcgtttctttacttttcacttcaattaatgctgcgcttcgcttggtgagtgcgtactttttctacctgtacacattcctgcattcatgtattttgtttaagtttagtagtaaaagactggttaatgataacaatgcatcgtaaaaccttcagaaggaaaggagaatgttttgtggaccactttggttttcttttttgcgtgtggcagttttaagttattagttttnaaaatcagtactttttaatggaaacaacttgacaaaaaattgt

SEQ ID NO: 33536 - DNA, 2831 bp, Homo sapiens
cgcacgtcgggggcgggagcggtgcgcgcaacttctcgggccaataactgcgcagcgcgcgggacccgggtggggaagctggagctgttgcggggtccgcggggaagtcttggcggtggagccatggtcggccagctgagcgagggggccattgcggccatcatgcagaagggggatacaaacataaagcccatcctccaagtcatcaacatccgtcccattactacggggaatagtccgccgcgttatcgactgctcatgagtgatggattgaacactctatcctctttcatgttggcgacacagttgaaccctctcgtggaggaagaacaattgtccagcaactgtgtatgccagattcacagatttattgtgaacactctgaaagacggaaggagagtagttatcttgatggaattagaagttttgaagtcagctgaagcagttggagtgaagattggcaatccagtgccctataatgaaggactcgggcagccgcaagtagctcctccagcgccagcagccagcccagcagcaagcagcaggccccagccgcagaatggaagctcgggaatgggttctactgtttctaaggcttatggtgcttcaaagacatttggaaaagctgcaggtcccagcctgtcacacacttctgggggaacacagtccaaagtggtgcccattgccagcctcactccttaccagtccaagtggaccatttgtgctcgtgttaccaacaaaagtcagatccgtacctggagcaactcccgaggggaagggaagcttttctccctagaactggttgacgaaagtggtgaaatccgagctacagctttcaatgagcaagtggacaagttctttcctcttattgaagtgaacaaggtgtattatttctcgaaaggcaccctgaagattgctaacaagcagttcacagctgttaaaaatgactacgagatgaccttcaataacgagacttccgtcatgccctgtgaggacgaccatcatttacctacggttcagtttgatttcacggggattgatgacctcgagaacaagtcgaaagactcacttgtagacatcatcgggatctgcaagagctatgaagacgccactaaaatcacagtgaggtctaacaacagagaagttgccaagaggaatatctacttgatggacacatccgggaaggtggtgactgctacactgtggggggaagatgctgataaatttgatggttctagacagcccgtgttggctatcaaaggagcccgagtctctgatttcggtggacggagcctctccgtgctgtcttcaagcactatcattgcgaatcctgacatcccagaggcctataagcttcgtggatggtttgacgcagaaggacaagccttagatggtgtttccatctctgatctaaagagcggcggagtcggagggagtaacaccaactggaaaaccttgtatgaggtcaaatccgagaacctgggccaaggcgacaagccggactactttagttctgtggccacagtggtgtatcttcgcaaagagaactgcatgtaccaagcctgcccgactcaggactgcaataagaaagtgattgatcaacagaatggattgtaccgctgtgagaagtgcgacaccgaatttcccaatttcaagtaccgcatgatcctgtcagtaaatattgcagattttcaagagaatcagtgggtgacttgtttccaggagtctgctgaagctatccttggacaaaatgctgcttatcttggggaattaaaagacaagatctttcatattcagagtcagggtcaaagtggagacctacaacgacgagtctcgaattaaggccactgtgatggacgtgaagcccgtggactacagagagtatggccgaaggctggtcatgagcatcaggagaagtgcattgatgtgagaggagcagtgccaatcgggcagaagtttgcaaataggcagaatggaatcgatttcctcccacctccgtgtgacgatcccatgttagctacacagtgcagaggctcttgatggtggactaagcaatttcctccctcgtgcgcatctcagaacccatcggtaggcaaaggaaaatacgctcaggtggttgtggtgtagactgtgtcaggcctacggagtcagccagtggctagcgcaagaccagtcactccctctgccttcaggcttctgtcaatttcattatcatcaagcaggaattatgtcgtaagtcactgaccctaactgcagaccatgaagtaaattatgtaactaggtttttgcttctccagtggtgaccacccccccccatccccgctcacaacttgggttcttctcagcggggcgagctgagaagcggtcatgagcacctggggattttagtaagtgtgtcttcctagaattcgaaggctctctctttctagaggtgctacatagttggtaatgcttggaatggcaatagggtagaatgattaatcaaaggcatatcttctatatctgaagagtatccttccttcagggtttaatagactgagtcagatgggtctgatattaatcaaaattgtctcttctgaggaccgctgataagcattgacttgctgtcccctaaggaaatccgagcggctacaaagcgtttctttacttttcacttcaattaatgctgcgcttcgcttggtgagtgcgtactttttctacctgtacacattcctgcattcatgtattttgttttttttgactaaagctatgttacatggaaaggattttgaagccttttgtttcccttgctttgttttaataaacagtatattctttggttgtgaatccta

SEQ ID NO: 33537 - DNA, 1751 bp, Homo sapiens
aatctagacgatccccacctcctaccccacgaatatctacttgatggacacatccgggaaggtggtgactgctacactgtggggggaagatgctgataaatttgatggttctagacagcccgtgttggctatcaaaggagcccgagtctctgatttcggtggacggagcctctccgtgctgtcttcaagcactatcattgcgaatcctgacatcccagaggcctataagcttcgtggatggtttgacgcagaaggacaagccttagatggtgtttccatctctgatctaaagagcggcggagtcggagggagtaacaccaactggaaaaccttgtatgaggtcaaatccgagaacctgggccaaggcgacaagccggactactttagttctgtggccacagtggtgtatcttcgcaaagagaactgcatgtaccaagcctgcccgactcaggactgcaataagaaagtgattgatcaacagaatggattgtaccgctgtgagaagtgcgacaccgaatttcccaatttcaagtaccgcatgatcctgtcagtaaatattgcagattttcaagagaatcagtgggtgacttgtttccaggagtctgctgaagctatccttggacaaaatgctgcttatcttggggaattaaaagacaagaatgaacaggcatttgaagaagttttccagaatgccaacttccgatctttcatattcagagtcagggtcaaagtggagacctacaacgacgagtctcgaattaaggccactgtgatggacgtgaagcccgtggactacagagagtatggccgaaggctggtcatgagcatcaggagaagtgcattgatgtgagaggagcagtgccaatcgggcagaagtttgcaaataggcagaatggaatcgatttcctcccacctccgtgtgacgatcccatgttagctacacagtgcagaggctcttgatggtggactaagcaatttcctccctcgtgcgcatctcagaacccatcggtaggcaaaggaaaatacgctcaggtggttgtggtgtagactgtgtcaggcctacggagtcagccagtggctagcgcaagaccagtcactccctctgccttcaggcttctgtcaatttcattatcatcaagcaggaattatgtcgtaagtcactgaccctaactgcagaccatgaagtaaattatgtaactaggtttttgcttctccagtggtgaccacccccccccatccccgctcacaacttgggttcttctcagcggggcgagctgagaagcggtcatgagcacctggggattttagtaagtgtgtcttcctagaattcgaaggctctctctttctagaggtgctacatagttggtaatgcttggaatggcaatagggtagaatgattaatcaaaggcatatcttctatatctgaagagtatccttccttcagggtttaatagactgagtcagatgggtctgatattaatcaaaattgtctcttctgaggaccgctgataagcattgacttgctgtcccctaaggaaatccgagcggctacaaagcgtttctttacttttcacttcaattaatgctgcgcttcgcttggtgagtgcgtactttttctacctgtacacattcctgcattcatgtattttgttttttttgactaaagctatgttacatggaaaggattttgaagccttttgtttcccttgctttgttttaataaacagtatattctttggttgtgaatccta

SEQ ID NO: 33538 - DNA, 1200 bp, Homo sapiens
  misc_feature (18)..(18): n is a, c, g, or t
  misc_feature (20)..(20): n is a, c, g, or t
ctgggatgcagggaattngnacgagcatgtgggtgacttgtttccaggagtctgctgaagctatccttggacaaaatgctgcttatcttggggaattaaaagacaagaatgaacaggcatttgaagaagttttccagaatgccaacttccgatctttcatattcagagtcagggtcaaagtggagacctacaacgacgagtctcgaattaaggccactgtgatggacgtgaagcccgtggactacagagagtatggccgaaggctggtcatgagcatcaggagaagtgcattgatgtgagaggagcagtgccaatcgggcagaagtttgcaaataggcagaatggaatcgatttcctcccacctccgtgtgacgatcccatgttagctacacagtgcagaggctcttgatggtggactaagcaatttcctccctcgtgcgcatctcagaacccatcggtaggcaaaggaaaatacgctcaggtggttgtggtgtagactgtgtcaggcctacggagtcagccagtggctagcgcaagaccagtcactccctctgccttcaggcttctgtcaatttcattatcatcaagcaggaattatgtcgtaagtcactgaccctaactgcagaccatgaagtaaattatgtaactaggtttttgcttctccagtggtgaccacccccccccatccccgctcacaacttgggttcttctcagcggggcgagctgagaagcggtcatgagcacctggggattttagtaagtgtgtcttcctagaattcgaaggctctctctttctagaggtgctacatagttggtaatgcttggaatggcaatagggtagaatgattaatcaaaggcatatcttctatatctgaagagtatccttccttcagggtttaatagactgagtcagatgggtctgatattaatcaaaattgtctcttctgaggaccgctgataagcattgacttgctgtcccctaaggaaatccgagcggctacaaagcgtttctttacttttcacttcaattaatgctgcgcttcgcttggtgagtgcgtactttttctacctgtacacattcctgcattcatgtattttgttttttttgactaaagctatgttacatggaaaggattttgaagccttttgtttcccttgctttgttttaataaacagtatattctttggttgtgaatccta

SEQ ID NO: 33539 - DNA, 2276 bp, Homo sapiens
cgcacgtcgggggcgggagcggtgcgcgcaacttctcgggccaataactgcgcagcgcgcgggacccgggtggggaagctggagctgttgcggggtccgcggggaagtcttggcggtggagccatggtcggccagctgagcgagggggccattgcggccatcatgcagaagggggatacaaacataaagcccatcctccaagtcatcaacatccgtcccattactacggggaatagtccgccgcgttatcgactgctcatgagtgatggattgaacactctatcctctttcatgttggcgacacagttgaaccctctcgtggaggaagaacaattgtccagcaactgtgtatgccagattcacagatttattgtgaacactctgaaagacggaaggagagtagttatcttgatggaattagaagttttgaagtcagctgaagcagttggagtgaagattggcaatccagtgccctataatgaaggactcgggcagccgcaagtagctcctccagcgccagcagccagcccagcagcaagcagcaggccccagccgcagaatggaagctcgggaatgggttctactgtttctaaggcttatggtgcttcaaagacatttggaaaagctgcaggtcccagcctgtcacacacttctgggggaacacagtccaaagtggtgcccattgccagcctcactccttaccagtccaagtggaccatttgtgctcgtgttaccaacaaaagtcagatccgtacctggagcaactcccgaggggaagggaagcttttctccctagaactggttgacgaaagtggtgaaatccgagctacagctttcaatgagcaagtggacaagttctttcctcttattgaagtgaacaaggtgtattatttctcgaaaggcaccctgaagattgctaacaagcagttcacagctgttaaaaatgactacgagatgaccttcaataacgagacttccgtcatgccctgtgaggacgaccatcatttacctacggttcagtttgatttcacggggattgatgacctcgagaacaagtcgaaagactcacttgtagacatcatcgggatctgcaagagctatgaagacgccactaaaatcacagtgaggtctaacaacagagaagttgccaagaggaatatctacttgatggacacatccgggaaggtggtgactgctacactgtggggggaagatgctgataaatttgatggttctagacagcccgtgttggctatcaaaggagcccgagtctctgatttcggtggacggagcctctccgtgctgtcttcaagcactatcattgcgaatcctgacatcccagaggcctataagcttcgtggatggtttgacgcagaaggacaagccttagatggtgtttccatctctgatctaaagagcggcggagtcggagggagtaacaccaactggaaaaccttgtatgaggtcaaatccgagaacctgggccaaggcgacaagccggactactttagttctgtggccacagtggtgtatcttcgcaaagagaactgcatgtaccaagcctgcccgactcaggactgcaataagaaagtgattgatcaacagaatggattgtaccgctgtgagaagtgcgacaccgaatttcccaatttcaagtaccgcatgatcctgtcagtaaatattgcagattttcaagagaatcagtgggtgacttgtttccaggagtctgctgaagctatccttggacaaaatgctgcttatcttggggaattaaaagacaagaatgaacaggcatttgaagaagttttccagaatgccaacttccgatctttcatattcagagtcagggtcaaagtggagacctacaacgacgagtctcgaattaaggccactgtgatggacgtgaagcccgtggactacagagagtatggccgaaggctggtcatgagcatcaggagaagtgcattgatgtgagaggagcagtgccaatcgggcagaagtttgcaaataggcagaatggaatcgatttcctcccacctccgtgtgacgatcccatgttagctacacagtgcagaggctcttgatggtggactaagcaatttcctccctcgtgcgcatctcagaacccatcggtaggcaaaggaaaatacgctcaggtggttgtggtgtagactgtgtcaggcctacggagtcagccagtggctagcgcaagaccagtcactccctctgccttcaggctttggtccctgccgggatcctcagaatcgcggacgaag

SEQ ID NO: 33540 - DNA, 621 bp, Homo sapiens
  misc_feature (592)..(592): n is a, c, g, or t
cgcacgtcgggggcgggagcggtgcgcgcaacttctcgggccaataactgcgcagcgcgcgggacccgggtggggaagctggagctgttgcggggtccgcggggaagtcttggcggtggagccatggtcggccagctgagcgagggggccattgcggccatcatgcagaagggggatacaaacataaagcccatcctccaagtcatcaacatccgtcccattactacggggaatagtccgccgcgttatcgactgctcatgagtgatggattgaacactctatcctctttcatgttggcgacacagttgaaccctctcgtggaggaagaacaattgtccagcaactgtgtatgccagattcacagatttattgtgaacactctgaaagacggaaggagagtagttatcttgatggaattagaagttttgaagtcagctgaagcagttggagtgaagattggcaatccagtgccctataatgaagaagctgaaaaaaaagtcattacttcagataattctagagaaaggcaaaaagaatcttcaaatcactggccccattaaaggaaaggattgtttgcccttacaccaagtncaaaacataaaagcctcatttgacaccaa

SEQ ID NO: 33541 - DNA, 1165 bp, Homo sapiens
gcctgcgcgcgcgtgcgtcgtagccgaacgctgtggcggggcaggcgaggcggtcgcttcgagcgcgctagtcagctccctgaagggagtgacggcggttgggtgcccgcggccacttttgccttcccggggagatgtcctttgcttctcagatgtaaatgcactttaagtttgttattcaacagtgaaaatgagtcatacagaggttaaattaaaaataccttttggaaataaattactagatgctgtttgtttggtacctaacaagagcttaacatatggaataattcttacacatggagcatcaggagatatgaatcttcctcatttgatgtcactggcatcccatcttgcatctcatgggtttttctgcctgagatttacctgtaaaggccttaatattgtacatagaattaaggcgtataaatcagttttgaattacctgaagacatcaggagaatacaaacttgcaggtgtttttcttggaggtcgttcaatgggctcaagagcagctgcttctgtaatgtgtcacattgagccagatgatggtgatgattttgttcggggtctcatttgtatttcttacccactgcaccatccaaagcagcagcataaactcagagatgaagacctctttcgtttaaaagagcctgtactgtttgtgtcaggctcagcagatgaaatgtgtgaaaagaacttgttggagaaagtggcacagaaaatgcaagctccccataaaatccactggattgagaaggcaaatcattccatggcagtgaaaggacggtcgacaaatgatgttttcaaagaaataaatacacagattttgttttggatccaagaaattactgaaatggacaagaaatgtcattagttaaaagccatgttatcttgagtacacatacagttaatttgataaagaagagtatgcctctcagcattgtgagatatatttcagactaatttgatgttctttaatgttcccttatttttgaaacacgttttaaatgtgaaattaatgtccttcacaaaatgtcttttgaaagcactgttacagttgtataaagatgatgtaaaaatattgaaggtggtctacatataatttattttcattagtatagttaagttttgaaaaaaattaaacatctgaattttgttacaaaaa

SEQ ID NO: 33542 - DNA, 1692 bp, Homo sapiens
ccaaccctgcacctggccctctaaccaattctgagtgcccgtagaaaaatgtacatgtaaagacaccagattttagggaagtaattctaaatgtttattttagctactgaatgtgttcattcatagtttttgtgtcatatccatgtctgccaactcacctttcacaacagaatcttcttttcagggagatgtcctttgcttctcagatgtaaatgcactttaagtttgttattcaacagtgaaaatgagtcatacagaggtaatattttcgtatgttctgcatcttcagggttcctgggttttttgtttgtttgtaattatgtggcttcagagtaattttattttcaactttcactgtggggaggcagtataggcataagtggttaagagcgaggaatctagagcagactaccctgagtttaaatcctagctagcggctatataaccttgggcaagttacttaatctgctgtgccttatctataaaatggggataatgatagtgcttgcctcacagaattgttagaaaagtgaaataagttaatacatataaagcacttataataatacccgacacagtaagcacttaactactattattaatatcactactttttatttggaggctatgacttgaattatgagcctcacagagcaaacatatatatagctgttcagttgtcttaataggcaagaaagtaatttttgatccctttattctcttgaattccaggttaaattaaaaataccttttggaaataaattactagatgctgtttgtttggtacctaacaagagcttaacatatggaataattcttacacatggagcatcaggagatatgaatcttcctcatttgatgtcactggcatcccatcttgcatctcatgggtttttctgcctgagatttacctgtaaaggccttaatattgtacatagaattaaggcgtataaatcagttttgaattacctgaagacatcaggagaatacaaacttgcaggtgtttttcttggaggtcgttcaatgggctcaagagcagctgcttctgtaatgtgtcacattgagccagatgatggtgatgattttgttcggggtctcatttgtatttcttacccactgcaccatccaaagcagcagcataaactcagagatgaagacctctttcgtttaaaagagcctgtactgtttgtgtcaggctcagcagatgaaatgtgtgaaaagaacttgttggagaaagtggcacagaaaatgcaagctccccataaaatccactggattgagaaggcaaatcattccatggcagtgaaaggacggtcgacaaatgatgttttcaaagaaataaatacacagattttgttttggatccaagaaattactgaaatggacaagaaatgtcattagttaaaagccatgttatcttgagtacacatacagttaatttgataaagaagagtatgcctctcagcattgtgagatatatttcagactaatttgatgttctttaatgttcccttatttttgaaacacgttttaaatgtgaaattaatgtccttcacaaaatgtcttttgaaagcactgttacagttgtataaagatgatgtaaaaatattgaaggtggtctacatataatttattttcattagtatagttaagttttgaaaaaaattaaacatctgaattttgttacaaaaa

SEQ ID NO: 33543 - DNA, 1090 bp, Homo sapiens
gcctgcgcgcgcgtgcgtcgtagccgaacgctgtggcggggcaggcgaggcggtcgcttcgagcgcgctagtcagctccctgaagggagtgacggcggttgggtgcccgcggccacttttgccttcccgggttaaattaaaaataccttttggaaataaattactagatgctgtttgtttggtacctaacaagagcttaacatatggaataattcttacacatggagcatcaggagatatgaatcttcctcatttgatgtcactggcatcccatcttgcatctcatgggtttttctgcctgagatttacctgtaaaggccttaatattgtacatagaattaaggcgtataaatcagttttgaattacctgaagacatcaggagaatacaaacttgcaggtgtttttcttggaggtcgttcaatgggctcaagagcagctgcttctgtaatgtgtcacattgagccagatgatggtgatgattttgttcggggtctcatttgtatttcttacccactgcaccatccaaagcagcagcataaactcagagatgaagacctctttcgtttaaaagagcctgtactgtttgtgtcaggctcagcagatgaaatgtgtgaaaagaacttgttggagaaagtggcacagaaaatgcaagctccccataaaatccactggattgagaaggcaaatcattccatggcagtgaaaggacggtcgacaaatgatgttttcaaagaaataaatacacagattttgttttggatccaagaaattactgaaatggacaagaaatgtcattagttaaaagccatgttatcttgagtacacatacagttaatttgataaagaagagtatgcctctcagcattgtgagatatatttcagactaatttgatgttctttaatgttcccttatttttgaaacacgttttaaatgtgaaattaatgtccttcacaaaatgtcttttgaaagcactgttacagttgtataaagatgatgtaaaaatattgaaggtggtctacatataatttattttcattagtatagttaagttttgaaaaaaattaaacatctgaattttgttacaaaaa

SEQ ID NO: 33544 - DNA, 884 bp, Homo sapiens
gcctgcgcgcgcgtgcgtcgtagccgaacgctgtggcggggcaggcgaggcggtcgcttcgagcgcgctagtcagctccctgaagggagtgacggcggttgggtgcccgcggccacttttgccttcccgggttaaattaaaaataccttttggaaataaattactagatgctgtttgtttggtacctaacaagagcttaacatatggaataattcttacacatggagcatcaggagatatgaatcttcctcatttgatgtcactggcatcccatcttgcatctcatgggtttttctgcctgagatttacctgtaaaggccttaatattgtacatagaattaaggcgtataaatcagttttgaattacctgaagacatcaggagaatacaaacttgcaggtgtttttcttggagaacttgttggagaaagtggcacagaaaatgcaagctccccataaaatccactggattgagaaggcaaatcattccatggcagtgaaaggacggtcgacaaatgatgttttcaaagaaataaatacacagattttgttttggatccaagaaattactgaaatggacaagaaatgtcattagttaaaagccatgttatcttgagtacacatacagttaatttgataaagaagagtatgcctctcagcattgtgagatatatttcagactaatttgatgttctttaatgttcccttatttttgaaacacgttttaaatgtgaaattaatgtccttcacaaaatgtcttttgaaagcactgttacagttgtataaagatgatgtaaaaatattgaaggtggtctacatataatttattttcattagtatagttaagttttgaaaaaaattaaacatctgaattttgttacaaaaa

SEQ ID NO: 33545 - DNA, 342 bp, Homo sapiens
taggcaggggagagaggaccttttattaaatatcaacagaacattagtctagtatcctcttctttttctctttagaacttgttggagaaagtggcacagaaaatgcaagctccccataaaatccactggattgagaaggcaaatcattccatggcagtgaaaggacggtcgacaaatgatgttttcaaagaaataaatacacagattttgttttggatccaagaaattaccatcagcaggagtggtacgcagcagttccttttcagttccttaagagctcttcagtggaatgctaattagggattcagtaccataaagcttggaaagatctattaactagag

SEQ ID NO: 33546 - DNA, 1440 bp, Homo sapiens
gcctgcgcgcgcgtgcgtcgtagccgaacgctgtggcggggcaggcgaggcggtcgcttcgagcgcgctagtcagctccctgaagggagtgacggcggttgggtgcccgcggccacttttgccttcccggggagatgtcctttgcttctcagatgtaaatgcactttaagtttgttattcaacagtgaaaatgagtcatacagaggttaaattaaaaataccttttggaaataaattactagatgctgtttgtttggtacctaacaagagcttaacatatggaataattcttacacatggagcatcaggagatatgaatcttcctcatttgatgtcactggcatcccatcttgcatctcatgggtttttctgcctgagatttacctgtaaaggccttaatattgtacatagaattaaggcgtataaatcagttttgaattacctgaagacatcaggagaatacaaacttgcaggtgtttttcttggaggtcgttcaatgggctcaagagcagctgcttctgtaatgtgtcacattgagccagatgatggtgatgattttgttcggggtctcatttgtatttcttacccactgcaccatccaaagcagcagcataaactcagagatgaagacctctttcgtttaaaagagcctgtactgtttgtgtcaggctcagcagatgaaatgtgtgaaaagaacttgttggagaaagtggcacagaaaatgcaagctccccataaaatccactggattgagaaggcaaatcattccatggcagtgaaaggacggtcgacaaatgatgttttcaaagaaataaatacacagattttgttttggatccaagaaattactgaaatggacaagaaatgtcattagttaaaagccatgttatcttgagtacacatacagttaatttgataaagaagagtatgcctctcagcattgtgagatatatttcagactaatttgatgttctttaatgttcccttatttttgaaacacgttttaaatgtgaaattaatgtccttcacaaaatgtcttttgaaagcactgttacagttgtataaagatgatgtaaaaatattgaaggtggtctacatataatttattttcattagtatagttaagttttgaaaaaaattaaacatctgaattttgttacaaaaaaaaaaaaaaaaaaaaaaaaaaaaaaaaaaaaaaaaaaagaaaaaaaaaaaaaaaaaaaagagagaggggggcggcgcgccccaaaaaaatccccccgggggggccccactgcacacggcacacccacaagttcttggaaaaaaagaaggggcccccaaaaaggggcgcgacaatatcaaacagacgagcgcggggacgccgagataaaacaacgcgaggagggaaaaacacgatcacggggcacaccttggaaaaaaaaaccaacaccgcgggga

SEQ ID NO: 33547 - DNA, 1083 bp, Homo sapiens
gcctgcgcgcgcgtgcgtcgtagccgaacgctgtggcggggcaggcgaggcggtcgcttcgagcgcgctagtcagctccctgaagggagtgacggcggttgggtgcccgcggccacttttgccttcccggggagatgtcctttgcttctcagatgtaaatgcactttaagtttgttattcaacagtgaaaatgagtcatacagaggttaaattaaaaataccttttggaaataaattactagatgctgtttgtttggtacctaacaagagcttaacatatggaataattcttacacatggagcatcaggagatatgaatcttcctcatttgatgtcactggcatcccatcttgcatctcatgggtttttctgcctgagatttacctgtaaaggccttaatattgtacatagaattaaggcgtataaatcagttttgaattacctgaagacatcaggagaatacaaacttgcaggtgtttttcttggaggtcgttcaatgggctcaagagcagctgcttctgtaatgtgtcacattgagccagatgatggtgatgattttgttcggggtctcatttgtatttcttacccactgcaccatccaaagcagcagcataaactcagagatgaagacctctttcgtttaaaagagcctgtactgtttgtgtcaggctcagcagatgaaatgtgtgaaaagaacttgttggagaaagtggcacagaaaatgcaagctccccataaaatccactggattgagaaggcaaatcattccatggcagtgaaaggacggtcgacaaatgatgttttcaaagaaataaatacacagattttgttttggatccaagaaattactgaaatggacaagaaatgtcattagttaaaagccatgttatcttgagtacacatacagttaatttgataaagaagagtatgcctctcagcattgtgagatatatttcagactaatttgatgttctttaatgttcccttatttttgaaacacgttttaaatgtgaaattaatgtccttcacaaaatgtcttttgaaagcactgttacagttgtataaagatgatgtaaaaatatt

SEQ ID NO: 33548 - DNA, 1386 bp, Homo sapiens
gcctgcgcgcgcgtgcgtcgtagccgaacgctgtggcggggcaggcgaggcggtcgcttcgagcgcgctagtcagctccctgaagggagtgacggcggttgggtgcccgcggccacttttgccttcccggggagatgtcctttgcttctcagatgtaaatgcactttaagtttgttattcaacagtgaaaatgagtcatacagaggttaaattaaaaataccttttggaaataaattactagatgctgtttgtttggtacctaacaagagcttaacatatggaataattcttacacatggagcatcaggagatatgaatcttcctcatttgatgtcactggcatcccatcttgcatctcatgggtttttctgcctgagatttacctgtaaaggccttaatattgtacatagaattaaggcgtataaatcagttttgaattacctgaagacatcaggagaatacaaacttgcaggtgtttttcttggaggtcgttcaatgggctcaagagcagctgcttctgtaatgtgtcacattgagccagatgatggtgatgattttgttcggggtctcatttgtatttcttacccactgcaccatccaaagcagcagcataaactcagagatgaagacctctttcgtttaaaagagcctgtactgtttgtgtcaggctcagcagatgaaatgtgtgaaaagaacttgttggagaaagtggcacagaaaatgcaagctccccataaaatccactggattgagaaggcaaatcattccatggcagtgaaaggacggtcgacaaatgatgttttcaaagaaataaatacacagattttgttttggatccaagaaattactgaaatggacaagaaatgtcattagttaaaagccatgttatcttgagtacacatacagttaatttgataaagaagagtatgcctctcagcattgtgagatatatttcagactaatttgatgttctttaatgttcccttatttttgaaacacgttttaaatgtgaaattaatgtccttcacaaaatgtcttttgaaagcactgttacagttgtataaagatgatgtaaaaatattgaaggtggtctacatataatttattttcattagtatagttaagttttgaaaaaaattaaacatctgaattttgttacaaaaaggtggcttttgtcttattgataggcaactgagaaattttgcagagcagcgttatcttcagaaaaggaaaacattatggttaatctagtcagagatttatagaatgcacacatctcttcaccttatcttttaataaatcacaatgaaaggataggagtggacatatgtttcaaatatggggaccctgaagattttttagaatgaaataaagatctttaattc

SEQ ID NO: 33549 - DNA, 1093 bp, Homo sapiens
tccgctaagttcggtgcccgcgggcaccagccggtgggggcttcgtccgctttgccggggagatgtcctttgcttctcagatgtaaatgcactttaagtttgttattcaacagtgaaaatgagtcatacagaggttaaattaaaaataccttttggaaataaattactagatgctgtttgtttggtacctaacaagagcttaacatatggaataattcttacacatggagcatcaggagatatgaatcttcctcatttgatgtcactggcatcccatcttgcatctcatgggtttttctgcctgagatttacctgtaaaggccttaatattgtacatagaattaaggcgtataaatcagttttgaattacctgaagacatcaggagaatacaaacttgcaggtgtttttcttggaggtcgttcaatgggctcaagagcagctgcttctgtaatgtgtcacattgagccagatgatggtgatgattttgttcggggtctcatttgtatttcttacccactgcaccatccaaagcagcagcataaactcagagatgaagacctctttcgtttaaaagagcctgtactgtttgtgtcaggctcagcagatgaaatgtgtgaaaagaacttgttggagaaagtggcacagaaaatgcaagctccccataaaatccactggattgagaaggcaaatcattccatggcagtgaaaggacggtcgacaaatgatgttttcaaagaaataaatacacagattttgttttggatccaagaaattactgaaatggacaagaaatgtcattagttaaaagccatgttatcttgagtacacatacagttaatttgataaagaagagtatgcctctcagcattgtgagatatatttcagactaatttgatgttctttaatgttcccttatttttgaaacacgttttaaatgtgaaattaatgtccttcacaaaatgtcttttgaaagcactgttacagttgtataaagatgatgtaaaaatattgaaggtggtctacatataatttattttcattagtatagttaagttttgaaaaaaattaaacatctgaattttgttacaaaaa

SEQ ID NO: 33550 - DNA, 1110 bp, Homo sapiens
cgaccccgaggagacgcggcccacgctgggagggagcagccaggacaaaagccggtcgtcgtggggtcccgcctgggagatgtcctttgcttctcagatgtaaatgcactttaagtttgttattcaacagtgaaaatgagtcatacagaggttaaattaaaaataccttttggaaataaattactagatgctgtttgtttggtacctaacaagagcttaacatatggaataattcttacacatggagcatcaggagatatgaatcttcctcatttgatgtcactggcatcccatcttgcatctcatgggtttttctgcctgagatttacctgtaaaggccttaatattgtacatagaattaaggcgtataaatcagttttgaattacctgaagacatcaggagaatacaaacttgcaggtgtttttcttggaggtcgttcaatgggctcaagagcagctgcttctgtaatgtgtcacattgagccagatgatggtgatgattttgttcggggtctcatttgtatttcttacccactgcaccatccaaagcagcagcataaactcagagatgaagacctctttcgtttaaaagagcctgtactgtttgtgtcaggctcagcagatgaaatgtgtgaaaagaacttgttggagaaagtggcacagaaaatgcaagctccccataaaatccactggattgagaaggcaaatcattccatggcagtgaaaggacggtcgacaaatgatgttttcaaagaaataaatacacagattttgttttggatccaagaaattactgaaatggacaagaaatgtcattagttaaaagccatgttatcttgagtacacatacagttaatttgataaagaagagtatgcctctcagcattgtgagatatatttcagactaatttgatgttctttaatgttcccttatttttgaaacacgttttaaatgtgaaattaatgtccttcacaaaatgtcttttgaaagcactgttacagttgtataaagatgatgtaaaaatattgaaggtggtctacatataatttattttcattagtatagttaagttttgaaaaaaattaaacatctgaattttgttacaaaaa

SEQ ID NO: 33551 - DNA, 959 bp, Homo sapiens
gcctgcgcgcgcgtgcgtcgtagccgaacgctgtggcggggcaggcgaggcggtcgcttcgagcgcgctagtcagctccctgaagggagtgacggcggttgggtgcccgcggccacttttgccttcccggggagatgtcctttgcttctcagatgtaaatgcactttaagtttgttattcaacagtgaaaatgagtcatacagaggttaaattaaaaataccttttggaaataaattactagatgctgtttgtttggtacctaacaagagcttaacatatggaataattcttacacatggagcatcaggagatatgaatcttcctcatttgatgtcactggcatcccatcttgcatctcatgggtttttctgcctgagatttacctgtaaaggccttaatattgtacatagaattaaggcgtataaatcagttttgaattacctgaagacatcaggagaatacaaacttgcaggtgtttttcttggagaacttgttggagaaagtggcacagaaaatgcaagctccccataaaatccactggattgagaaggcaaatcattccatggcagtgaaaggacggtcgacaaatgatgttttcaaagaaataaatacacagattttgttttggatccaagaaattactgaaatggacaagaaatgtcattagttaaaagccatgttatcttgagtacacatacagttaatttgataaagaagagtatgcctctcagcattgtgagatatatttcagactaatttgatgttctttaatgttcccttatttttgaaacacgttttaaatgtgaaattaatgtccttcacaaaatgtcttttgaaagcactgttacagttgtataaagatgatgtaaaaatattgaaggtggtctacatataatttattttcattagtatagttaagttttgaaaaaaattaaacatctgaattttgttacaaaaa

SEQ ID NO: 33552 - DNA, 1114 bp, Homo sapiens
gcctgcgcgcgcgtgcgtcgtagccgaacgctgtggcggggcaggcgaggcggtcgcttcgagcgcgctagtcagctccctgaagggagtgacggcggttgggtgcccgcggccacttttgccttcccggggagatgtcctttgcttctcagatgtaaatgcactttaagtttgttattcaacagtgaaaatgagtcatacagaggttaaattaaaaataccttttggaaataaattactagatgctgtttgtttggtacctaacaagagcttaacatatggaataattcttacacatggagcatcaggagatatgaatcttcctcatttgatgtcactggcatcccatcttgcatctcatgggtttttctgcctgagatttacctgtaaaggccttaatattgtacatagaattaaggcgtataaatcagttttgaattacctgaagacatcaggagaatacaaacttgcaggtgtttttcttggaggtcgttcaatgggctcaagagcagctgcttctgtaatgtgtcacattgagccagatgatggtgatgattttgttcggggtctcatttgtatttcttacccactgcaccatccaaagcagcagcataaactcagagatgaagacctctttcgtttaaaagagcctgtactgtttgtgtcaggctcagcagatgaaatgtgtgaaaagtggattgagaaggcaaatcattccatggcagtgaaaggacggtcgacaaatgatgttttcaaagaaataaatacacagattttgttttggatccaagaaattactgaaatggacaagaaatgtcattagttaaaagccatgttatcttgagtacacatacagttaatttgataaagaagagtatgcctctcagcattgtgagatatatttcagactaatttgatgttctttaatgttcccttatttttgaaacacgttttaaatgtgaaattaatgtccttcacaaaatgtcttttgaaagcactgttacagttgtataaagatgatgtaaaaatattgaaggtggtctacatataatttattttcattagtatagttaagttttgaaaaaaattaaacatctgaattttgttacaaaaa

SEQ ID NO: 33553 - DNA, 877 bp, Homo sapiens
gcctgcgcgcgcgtgcgtcgtagccgaacgctgtggcggggcaggcgaggcggtcgcttcgagcgcgctagtcagctccctgaagggagtgacggcggttgggtgcccgcggccacttttgccttcccggggagatgtcctttgcttctcagatgtaaatgcactttaagtttgttattcaacagtgaaaatgagtcatacagaggttaaattaaaaataccttttggaaataaattactagatgctgtttgtttggtacctaacaagagcttaacatatggaataattcttacacatggagcatcaggagatatgaatcttcctcatttgatgtcactggcatcccatcttgcatctcatgggtttttctgcctgagatttacctgtaaaggccttaatattgtacatagaattaaggcgtataaatcagttttgaattacctgaagacatcaggagaatacaaacttgcaggtgtttttcttggagaacttgttggagaaagtggcacagaaaatgcaagctccccataaaatccactggattgagaaggcaaatcattccatggcagtgaaaggacggtcgacaaatgatgttttcaaagaaataaatacacagattttgttttggatccaagaaattactgaaatggacaagaaatgtcattagttaaaagccatgttatcttgagtacacatacagttaatttgataaagaagagtatgcctctcagcattgtgagatatatttcagactaatttgatgttctttaatgttcccttatttttgaaacacgttttaaatgtgaaattaatgtccttcacaaaatgtcttttgaaagcactgttacagttgtataaagatgatgtaaaaatatt

SEQ ID NO: 33554 - DNA, 1180 bp, Homo sapiens
gcctgcgcgcgcgtgcgtcgtagccgaacgctgtggcggggcaggcgaggcggtcgcttcgagcgcgctagtcagctccctgaagggagtgacggcggttgggtgcccgcggccacttttgccttcccggggagatgtcctttgcttctcagatgtaaatgcactttaagtttgttattcaacagtgaaaatgagtcatacagaggttaaattaaaaataccttttggaaataaattactagatgctgtttgtttggtacctaacaagagcttaacatatggaataattcttacacatggagcatcaggagatatgaatcttcctcatttgatgtcactggcatcccatcttgcatctcatgggtttttctgcctgagatttacctgtaaaggccttaatattgtacatagaattaaggcgtataaatcagttttgaattacctgaagacatcaggagaatacaaacttgcaggtgtttttcttggagaacttgttggagaaagtggcacagaaaatgcaagctccccataaaatccactggattgagaaggcaaatcattccatggcagtgaaaggacggtcgacaaatgatgttttcaaagaaataaatacacagattttgttttggatccaagaaattactgaaatggacaagaaatgtcattagttaaaagccatgttatcttgagtacacatacagttaatttgataaagaagagtatgcctctcagcattgtgagatatatttcagactaatttgatgttctttaatgttcccttatttttgaaacacgttttaaatgtgaaattaatgtccttcacaaaatgtcttttgaaagcactgttacagttgtataaagatgatgtaaaaatattgaaggtggtctacatataatttattttcattagtatagttaagttttgaaaaaaattaaacatctgaattttgttacaaaaaggtggcttttgtcttattgataggcaactgagaaattttgcagagcagcgttatcttcagaaaaggaaaacattatggttaatctagtcagagatttatagaatgcacacatctcttcaccttatcttttaataaatcacaatgaaaggataggagtggacatatgtttcaaatatggggaccctgaagattttttagaatgaaataaagatctttaattc

SEQ ID NO: 33555 - DNA, 294 bp, Homo sapiens
aggctcctctgtgagcgctctgccccttctcagctgctgaactccagtctcaagataggtgaccctggggctcaagactgtctctcccttcccccttcaggttcctttggagtcaggagtgcctggagtccaggcatgacttccccctggcttatctcctctttacctgtgtcctgggaacacctgaaagaagctgggggagacaatcatttctgcagacacagggttacccccatgtgaagcaagcagcaaattgatcttatcacatgcctctgaccggttagggaggcgagt

SEQ ID NO: 33556 - DNA, 331 bp, Homo sapiens
tataaatttaaatgttgacattttaaaagtttgccattgatagtgatctttaaaaaaacaactttcagattgaaatattcaattaaagcaataatcggttgctgttggttctttgtatgtcacgctaattacagattttctcctacttatatcaagatgtttaattcagtacctagtttatcttgattataaatttagattcttttcctgaaccatggaagttgaatataaaactgtcagaagatatttatgtactttatttagacataatttatataattaattctaattggtactatagttgttagagagaaactagttaaaagcaaaa

SEQ ID NO: 33557 - DNA, 1108 bp, Homo sapiens
taggcattcaatttcttggacttgtttttctttattattgctttttagcagtcaatattgctatatctctaccatcttatgcatttattccaaaatgattgattgagccacccagtgttgaaaaggtagatgttattgttgtttccttgtttggtcagttttattggtaattgtatcccctagcctgttctcaaggaggtcacagatgctggggttgggccccgggcagttgcagcacagtgcaatgagtgccatgacaggggaggcagagtgctttgtacactcatcgggagtccctcatgcaaacttaggagaagcccaagtggaaggctttgggaagaactaagtgacacctcagctgaaacttgatggctgagtaggaatgtctgacaggtgtgaagaactgacgagagtggggctcagaagagtgatatgggtggaggaaattcctgtaccaaagctgagaggactagagaaggtttcccgtgttccagaaaacattaaaaagattcattgtggctggggagaagagcacaagtaggagagtggccagagtgggagggagacatagacatcctgcggcaatgagaaactgctgcagaggaagaaagtgatcagatttgggtgatttccaaaagttagttgcagtcaagattttagtaaacaaaagaacacaggaggcaagccaggatagcagcccctgctttgcaggatgacattaataaggcatagttattacctttatggcatctatactttggccttggaaatccaaaaaaagaaatgtagataaccattcacctatgccctttgtacttgcaaagggtcattctttctagaagcagagcctgtcaggacagggacaaggcttgcagagaacactgtgaaaaaaaaaagactaaaaagctccaggctccaaaggcaaagtgggttccaggagtgtgtaagtggtgcaggaaatatatcacccaatctgacttgagaggctttgctgagcccccagccagtgaccctgcagacagggatgataaccagctgagggaacgtctgcggcagactctgagagaggagctctggctgccaggcctgactcatgctgagtcttcca

SEQ ID NO: 33558 - DNA, 393 bp, Homo sapiens
tagtgctggactttccagagacagggtttctacatagtagctcacaactgttccaaggagtaggagaaacacattatatgtctggtaattttttttttaaagacagagtctcactctgctgcccaaactagagtattgtggcataatcgtagattactgcagcctcagtctcctgggctgaagccatcctcctgcctcagcctcccaagtagctggaactacaggcacatgccaccatgccaggctaattttttttttcttttttttaatagagacagggtcttgctatgttgcctagtctggtttcaaactccccagctcaagcaatccacccacctcagcttcccaaagtgctgggattacaggcctagaaccacgaacctggacctgcta

SEQ ID NO: 33559 - DNA, 399 bp, Homo sapiens
gagattggctaaggcagtaaataaaacttagaaatgctcaaatttattgtaaattgcttttataatcattgatatataaagcatgctactgctaatcaattagttttatgtattaagacctatcagcatgtcttttttttagtatctggttgacttaaacatgatgttctctgtaccatttaacattttcaagacatattctccccaagcaaattctgttggaaccaagtgtttccagttctagaagtttacttctagagtcttcatatgaaatttacagttgggctttcatagggttttaatttgcactgaatccttccttctgaaagatgacttatgtttaaagtataatgtagcagtgcttttgtcttacaattaaactcttacagcactcatgca

SEQ ID NO: 33560 - DNA, 414 bp, Homo sapiens
gagtcaggagcccgagggtgctcggtgagtacgtggtgactgattgttactttacacttaagcctgaggaaacccagccaagattcagaggcacttgttcattcaaatcccaagtcaagaggttgagagtcaaccagggaggggggaaaaacaccatggctcaggtgggcttggcagcacacaggtgcccaaagcagagggcttcccctccaagaaacttcaggagataaggaaaaatcagaaagtaaagggcttcagcttgagcattttatatgcaaacagaagggaggacaaaataaggataggggcaaaaagaggagaccactgcagctgtactccctctcagaagagatgggactgcttctgagagttgagccaggcagagatggacaggccattcaacgtgagatctgg

SEQ ID NO: 33561 - DNA, 436 bp, Homo sapiens
gaggaaactgggaaggtttgtctcatccttcagcccaaactttaaaaccaatggtgttgaatttttgatacacaaatcaatgcattaacatcatgcttttacttggcagaagtaatatcatggattgccatggatatagcaagttggcccaaagaggagaggactggagacttggaagctaggggagcatattttttggggtcacatgggtgatctggaacagccctgaggtgggtgctctgcagggatccggacgaacataggccttgcatcaagaacatctacagtatctctaggacacaggcaggagaagcatggtaagagagagtggtagaagtagggtctgactgtgggtaccaggttgaagtcctagagggcaagcctcaggcatcacagagattgagctgtacatctttatggttgaggcaaaaaaaaa

SEQ ID NO: 33562 - DNA, 280 bp, Homo sapiens
tgagacagggtctctctctgtcacccagattggactgcagtggcaggaacacggctcactgatgcctcgacctcctgggctcaagtgatcctcacgcctcagcttcccaagtagctaggactacagatgtgagccaccacgggcccgctaattttcaaattttttgtagagacagggtagtgcccaggttggtcactgcgaattctctagccaagaaatgtctaagtaaagtgacaatgcttatagtcatcaactatttacttaggggagtcccagagca

SEQ ID NO: 33563 - DNA, 300 bp, Homo sapiens
gctcgacggagccactgcactccagcctgggcgacagagccagactccgtctcaaaaaaaaaaaaaaaaaaataacatttgggtatcaatcaggaaggctggagatatggacacagggcaaataaagccaaacagacacagagatatgatttacactgttttgaaatcactgccatgttcaaattttcatatggccaacttctgctcataattagaattattaaaaagaaaactggttcaatcgagaccatcctggctaacagggtgaaaccccgtctctactaaaatacaaaaaaaaaa

SEQ ID NO: 33564 - DNA, 2624 bp, Homo sapiens
aagaatgtatagtggcttaggttatttgaggttttcgttttgaatatatatgttgttattttgatgtagatacgttagcagatggagaggttctaagagattggatactttggaatgtctttatataggaaatagacctcccatttcttaagcaagttgcttctggaattgatgcaacagggatattagctgtagtttaatggataagttgttctatgagctgctgctatcagtatttttttccacattttccattgatatttgtgatgcttgaaaaatccaaacttcacttggatacatttaattttatgcctttttctctctacctcccacttttcctaggcacccttgcacattttgttactgtgaaggactattgccctgttacctcactgataagaaatctcaactgtattcattcagaatgctttaagcttagtcataaactacatttgcctatggacctttggttattttgttaatgttgtcattatatttaagacttattgtaggaagtaattttaaatctatttcataacctgttttgatctgtctgcatactgctatatgttaatttattacggccttttacaattcacttgtcatctgagattgttctagaaactgatgaggaaagagtcgtactaaccaaaatgaatgggcaattgacataacattctatttcaggtttccttgtacttggggagccaaagcacaagatctaaggaaatcttattcacatttgtccctcagagcatcttaccctaagccacagaggtataaatagtaagatgagaattgctcattgtctgactccttgcacagcatgaatttaattctagttggaaacaaagttagtgttgactactggttaccttaaagtattcaccatactatatatttattagaccatctttcctctttgtttattcaagactatgtacttataaaagagaacctataagaatgtgtagagtgaccaaatagggacaaagtgacatacctagagtttgctgctcaaatttttccactagcgtaaccctaaagcagaggggcatgatgaagggggaaggggttctgagagcaaaatcagaatcagcctaccactgacatgaagtgtgttctgtctttaaaatgtaagtgaattttgcattctctataataaaacttttaatataaaaatgatatgtttaatctttactgaaacttatgccaccacaaaggagcaccatgttcatcacgtggctgctcagttttctcccccagtgccctcacccccagtggaggcaagtccttgagctacacacactggctgtagtgcaagatatataaacataggccgggctcggtggctcatgcctgtaatcctagcactttgggaggccgaagcaggtggatcatctgaggtcgggagattgagactagcctgaccgacatggagaaaccctgtgtccactaaaaatacaaaattagccgggtgtggtggcacatgcctgtaatcccagctactcgggaggctgaggcaggagaatcacttgaacccaggaggtggaggttgtggtgagccaagatcgcgccgttgcactccagcctgggcaacaagagtgaaactccatctcaaaaaaaaaaaaaaaaaaaagatatataaacatagaacatatccagactatttcctgcccttggaatctgaccttcagaaggattaacgccaaactaaactgacctgaaacagttttgttactattggcattccttgactaaaaaggaccacctgatgctcagtcccgagagtaggaatcgtggtttattatttttcatatccataccacctagttcagtacctgttatagagtgtttaattgctgatactaggaattaagggattttttaaaagtagcaaatagtttaaggaacaatcaaaaaatgaattttctaattcagttttttcaatgaagtcccatcactgaactttataatgtaatgtttattaagcagacatccccttaaatactcagtttctttggagagagcaaagcatatctctctgtggaaattatatataatgcctggtattttacactcaaagcaaggtgttggccaggaaggtaaagaaatggtgtctatgtagacttaatatcactagtctaagtgtcattttgagcctagtagcactaccttccaagtgagtcacaacaaatttgatcctatttggtatgtttttgtccactgttatgattcatcatgtatcttacaagagccactcaagcaagactctgcttctatgtatggtgaggccttgttgttctaggctagaataaactctttgtatgcctcattgaatatgccaggtaaaatatatgcagtcaagaatgaattatttttctgactaaagtgtgtagcagtagttcaaaattgtgcccttgttttaacagtttctgtcaacatcttctcatttttccctacaaaaacaccagggtgtattataagtactgcctgtgagaatttgcactttatgtatttgtgtgtggatttcttgtggttttagccaaatgaagtgttatcagtaataaacaggtctcttcatagaaaaaaaagtcgacgcggccgcgaatttagtagtagta

SEQ ID NO: 33565 - DNA, 2570 bp, Homo sapiens
aagaatgtatagtggcttaggttatttgaggttttcgttttgaatatatatgttgttattttgatgtagatacgttagcagatggagaggttctaagagattggatactttggaatgtctttatataggaaatagacctcccatttcttaagcaagttgcttctggaattgatgcaacagggatattagctgtagtttaatggataagttgttctatgagctgctgctatcagtatttttttccacattttccattgatatttgtgatgcttgaaaaatccaaacttcacttggatacatttaattttatgcctttttctctctacctcccacttttcctaggcacccttgcacattttgttactgtgaaggactattgccctgttacctcactgataagaaatctcaactgtattcattcagaatgctttaagcttagtcataaactacatttgcctatggacctttggttattttgttaatgttgtcattatatttaagacttattgtaggaagtaattttaaatctatttcataacctgttttgatctgtctgcatactgctatatgttaatttattacggccttttacaattcacttgtcatctgagattgttctagaaactgatgaggaaagagtcgtactaaccaaaatgaatgggcaattgacataacattctatttcaggtttccttgtacttggggagccaaagcacaagatctaaggaaatcttattcacatttgtccctcagagcatcttaccctaagccacagaggtataaatagtaagatgagaattgctcattgtctgactccttgcacagcatgaatttaattctagttggaaacaaagttagtgttgactactggttaccttaaagtattcaccatactatatatttattagaccatctttcctctttgtttattcaagactatgtacttataaaagagaacctataagaatgtgtagagtgaccaaatagggacaaagtgacatacctagagtttgctgctcaaatttttccactagcgtaaccctaaagcagaggggcatgatgaagggggaaggggttctgagagcaaaatcagaatcagcctaccactgacatgaagtgtgttctgtctttaaaatgtaagtgaattttgcattctctataataaaacttttaatataaaaatgatatgtttaatctttactgaaacttatgccaccacaaaggagcaccatgttcatcacgtggctgctcagttttctcccccagtgccctcacccccagtggaggcaagtccttgagctacacacactggctgtagtgcaagatatataaacataggccgggctcggtggctcatgcctgtaatcctagcactttgggaggccgaagcaggtggatcatctgaggtcgggagattgagactagcctgaccgacatggagaaaccctgtgtccactaaaaatacaaaattagccgggtgtggtggcacatgcctgtaatcccagctactcgggaggctgaggcaggagaatcacttgaacccaggaggtggaggttgtggtgagccaagatcgcgccgttgcactccagcctgggcaacaagagtgaaactccatctcaaaaaaaaaaaaaaaaaaaagatatataaacatagaacatatccagactatttcctgcccttggaatctgaccttcagaaggattaacgccaaactaaactgacctgaaacagttttgttactattggcattccttgactaaaaaggaccacctgatgctcagtcccgagagtaggaatcgtggtttattatttttcatatccataccacctagttcagtacctgttatagagtgtttaattgctgatactaggaattaagggattttttaaaagtagcaaatagtttaaggaacaatcaaaatgtaatgtttattaagcagacatccccttaaatactcagtttctttggagagagcaaagcatatctctctgtggaaattatatataatgcctggtattttacactcaaagcaaggtgttggccaggaaggtaaagaaatggtgtctatgtagacttaatatcactagtctaagtgtcattttgagcctagtagcactaccttccaagtgagtcacaacaaatttgatcctatttggtatgtttttgtccactgttatgattcatcatgtatcttacaagagccactcaagcaagactctgcttctatgtatggtgaggccttgttgttctaggctagaataaactctttgtatgcctcattgaatatgccaggtaaaatatatgcagtcaagaatgaattatttttctgactaaagtgtgtagcagtagttcaaaattgtgcccttgttttaacagtttctgtcaacatcttctcatttttccctacaaaaacaccagggtgtattataagtactgcctgtgagaatttgcactttatgtatttgtgtgtggatttcttgtggttttagccaaatgaagtgttatcagtaataaacaggtctcttcatagaaaaaaaagtcgacgcggccgcgaatttagtagtagta

SEQ ID NO: 33566 - DNA, 706 bp, Homo sapiens
tctctctccagcctgggcccctaccctgagctctagatgctgatgatacacaactactgcctgacatccaaatcactggcaggcaccttacatttaaatcatttgaactggagcagctagctcaggccacaaatccaagtcacctttagtttctctttttcttcacatcccatgatcagatcatcagtagatcctgtttgctctccctgtaaaacatatcctgactccatctcttttcaccacctttgctgctaataacctggtccaagccaccacagtgctggacagtgctgtgacagcctcatgaccattcttcttatttccatagttcctcctgagtcccacagagaataatgtttttaaaacatatcccagctctaaaccatccagcagtttccattagaataatatccccagaccttaccatggtctataaggccatctgtactccatttgctacctgattacatctgatgcatctcctacccgtctccctactctgccattccatccacacaagttttcttgcttttcctgaaatatgtggtgcccctttccatttcaggaccttggcacttgctgttactatgaatttgagtagaataacccctgccaaagacctctgcctgcttaacctactcagtctagaagtctgtctcccattcttctccctggtagtctctaaccctatctttatctttcttca

SEQ ID NO: 33567 - DNA, 453 bp, Homo sapiens
aaagtgtccataataatttctcatttttaaagataaattttggcatgactgtggtaaccgtatcagaaaattttggtagcaatgttagagaaagacttagaagtgaatctctaacatatataaccacacagcattagccagaccttttaaagaaatatgagaaaaaggttaaaggcttaatcgactcagccaaatttatccaacaggatgatagaactaggttttttgtatttctagttttagtgctatttcttttggataattttgcctttttggttttaaaagaaaatgttcactagcctctgctctctcattttagtaaccagagggatgggttacctgagatctgttgttaactagacagaatgtgagtaatggagtgggggtggcctctagaaccagtcttttctcagataactcaattcttcctcaactatgaataggaaaaaaaaa

SEQ ID NO: 33568 - DNA, 397 bp, Homo sapiens
tctgggaggtgaggagcatctctgcccagccgccccgtctgagaagtgaggagaccctccgcctggcaaccgccctgtctgagaagtgaggagcccctccgcccggcagccaccccatctgggaagagggaagagtgaatataagtgtggcctgagtgaaaaggagattcagacacgtctgtaagctggtgaggccgggcatcggaaaccctatttacgcgactctgaggagcctcctgagaagccaagctctgtgccgatgggatcagacaccactgaacatgtccacggtgcttgggggcttggacaacagcagtctgacactgagacacctgcaggcacggagttcatcgtcccaggggaagtttgttacagtaaatgtacatcacagttttgt

SEQ ID NO: 33569 - DNA, 362 bp, Homo sapiens
gatgtgacccatgcccacctctttattctcccttccattattcttccatgatatgggacttcttatagctcccctgctgccacttagatattgttcagaaggtgctgttgagctgtaagatacattacattgaatattgcctttgtgttgcccattccctttgttagtattaaatataataggaaagataaaacgcaagttttaaaaactcagaaaatgagtaaatgataaacaacagctgagattttaaaaattcaacagatgtctgtaggaacaaagagggctctacttgaattaaagtgggtgagtacagcttacaaatgttctatgcatttaccttagttttagtatttcacattttt

SEQ ID NO: 33570 - DNA, 304 bp, Homo sapiens
aagtctaggaggtagacaagggtcagtcgattcttcaaatgtatgatcttgtaatgatctggttttatttcaacaaggtgttttaagtactttcacacttaaaacaaaatacaagttattatgttgagtatcttaatgctatctctataatggtctcaagcatctgtagaaaaatggcacgtgtaatagcacagctgaaacagagtctcaaaatatacaattgcaaatttaaaaacatattttacttggtgtaataaatcttatacccagtgtaatgaaattataatattggtaatcaacagtc

SEQ ID NO: 33571 - DNA, 1345 bp, Homo sapiens
ccaccacgctgggctgttttacaccagttcttttggcactggggacatagacacattagaatggaaataactcactgatatgattgagggctttctgggcaactccgtaagtcttagcacagcctttataaattttcccacaattgtcatctcacacaaagaagtgagacaatttaaggcctggacagggccgtctggtaagtaccttcatctctcccagatttcttatctgcacagtgaggattatatagctactattttgtagtgaagatcaaatgcattcatacatgtacagcacttagattactgactgacacataaataatcaataattattagttgttaatataccatttattctttacacggatgcagagtatccactttatagatgagaacaaaaaagaaatctcatactgtataaatgatttgtcccaaaccacaaggctagacaaagtcagagatggactcatgcctggtcaaggtgtgtagggtgagtggaggagaggatgaactcagtttccaccaggtgagctccactacactttacctgcaggagccagtttggagagaggaaagttatttgaccaaggaacagtggctatgaaaccaggcagaccttgtttaaaatttatctttatcagctactagctgtgtgggccttggcaagtcacttaacaattccaggtacgtgtttcataatttgtgaagtagagctaataatgctgggctcctaaaattgctatctggtaaaagaaaatatcatagcctgtctatctctctctctatctatccatctacctgtctgtgtgtctgtctgtctattatctatctatctatctatctatctatctatctatctatctatggtatctatctactaattatctactattatctatctatttatctgtctgtctatctttctatcaatctattatctatctcctatcacctatctacctacttacctatcatctatcttcctatctactctcctatctacctacctatttaccagtctattatctacctatctacctacctattatctatttatttatctatctaatctagctatcatctatcttccataaacttactcagaaactagcacttacagctgctcaagataaatgtctttttcttgtcctgccctcaatttgtatagcctatggctgggtgagtttccctttgccccatgcaccatgactgccctgtggacaaggaagtgtctggtccacccacatctctcagacaagttcagtgaatatggtgtacccaaattgttggttgggttgcagcaaattctagggggcaaagggatatcttctgtgacctgcta

SEQ ID NO: 33572 - DNA, 727 bp, Homo sapiens
atctcgaaggggaaaaaaaaaaagaatgttgtatatgatagataagttcctaggcgggcctccaaaggctcatttaatctttctacagttacttatacgaacttttgattttccctctatttaatagactattaggggctatatctcattcatgtagcacctactcatgtggcttacagatcataggaactaggtgtcttaaatcttaaattcttttttgaacaaactgtactgtaaaatatatatctgtagaggaaagaagttaattcagtgtttgttcatttgaattgaaggtgaagctaaaagaacaacccccttcttatattacaaaaactgcattctcttgtgtatgatgagaaggaagtgcaaaatgcgtagggacaaggaatcgcctcttccctgctcaaatggttaagcgtgcatcagaaaggaatttcttggccgggcacggtggctcatgcctgtaatcccagcactttcggaggctgaggtgggtggatcacttgaggtcaggagtttgagaccagcctggccaacatggtgaaaccctgtctctaccaaaaatacaaaaattagctgggcatggtggcgggtgcctgtaatcccagctactcggaaggttgaggcaggagaatcacttgcacccaggaggcggaggttgcagtgagccaagattgtaccattacactccagcctaagtgacgagcaaaactgtctcaaaaaaaaa

SEQ ID NO: 33573 - DNA, 216 bp, Homo sapiens
ttttctgtttgaagagggcttttattgttgtactcaagagcgttgtttctggagacaaagctgcctgtactttaatagacagattctgaaaaaaatttgaaacataagccataaaattttatattaataaattcaagacaaagcagaaagcatagatttgctttcagcattctcaaggagcttagttttttattagccaccttattaaaataattt

SEQ ID NO: 33574 - DNA, 398 bp, Homo sapiens
ctttttaaatagagcttcttaaattcaaagttaatgttactttctacagcttgttgtctccttagaaaatagtacaaggtaatacgtaatcaagtcctaaagtatttggtataacttgtcatgaaggagaatgatcactgtgggctgagttagtgcaagaatgcttcagagacatttccttgacactaacctcctaagaactgcatcttgagatatgctgccctgatctgtgttgtttttgctacacagctgaggaaaagaggtacatatcctcctctaaagagctggcacaggaactcaccaaagggcattttgtacatattgaaaaacagcacctcataagaccaactacatttagacttctccagaaatcccatttatgcccctttttgcagagg

SEQ ID NO: 33575 - DNA, 1695 bp, Homo sapiens
  misc_feature (1059)..(1059): n is a, c, g, or t
gaaacacaaaaggagattacagagagatcagagataagaggtgtacctctctgtgttccttgtcacatagcgcgcgcgcgcacatacacacgcatctgtacacacatgcatgctcagccgtacacgcacgcgttccttgctactgccatctaaatatatgcaccgacactctatgccctgcaacgtggccggtgtgtttgtcctgatcctacataaaggtaggcaggtatgtgggagagtccaggcaggaacaaacagccacgcgcaatttaactgcagccaaactcaaagagaccttgagcctgccgaattgtttcactcagccaggtgccccccagaaaccggctattctgcaatcagttgtggaatcctgcaattattcataaaatgtgctgaaaatgtattttaggaaacgtaatcttgctatatatggcaaggtaaaggcgaacctgaaggatgaatgtgtttctgctttttaatgtcatacgtgtagccatctgaccactttttattgggtgacatatcatatgagcactttggtgtaggcttggaaaaactacagccagaggtaaggctggaaattccataagagttaagggtgctgaaaatggatgctggatagtccagcatgaaagatggcataccgctttaggtttgaaatagggggaaatacatgtgaatatttatacatgaaggccattggggagggctgagtcttggcctgagtatctgtgcaggtaagtcattcataagaaaactaattacctgtgcatgtacttggacttgtttaattgaataagctgcatgtgtgcatacttgctgttctttcagggtttgcaattatagattgagtcttttttaaatgatagcttgggggaattaaaaggtggaaaaaagccatcgtgctgcatagctatattgccaagaaagagaatccgatcctataaacaagattaccattgcttgaaatctaactcaaggcctgtatattttaagccacatcaactggtttaatatagccaattgttttatttgtgtatttgctttcatttcaaagtnaggaatcaaggatgcttttcagtcaagataatgtgccttgtttccagccatattaagataaaaatgaaactcagtaaattttgaatgcagccaataaggtacaacatacaacatggttgaaaatgtcttccttgcagaaggctgtccattgctgtgtctacccattttaaaatatatatatttttttcaataagaaatgctagaaagcaatagggcggggaatgccgcacctctcaggcaatcagcacaaaaattatttagaaatctttggaatcacttcacttatacatacattatctcgaaagcactggccccgaactgtgtttctgctaatatgaagttaattagacaatcaaactttgagccttgagcgatgggcactacagcccatcaaggtatgtcaagaaagaaaaaaaaatgtgtattttcctttatgaccaaaccaggaggttatacagctggcattgcatacatgacagatgtgcatatttgtaaccttaaataaacagaagcagggaggtaactgtgtatattatctagcaagagacagcagcagacactcgccaaaaaagacagaaagggacaagagagacacatagacataataaaataacaacaataaaaatcctccaaaaa

SEQ ID NO: 33576 - DNA, 348 bp, Homo sapiens
ttttgtatttttagtagagatggagtttcactgtgttagccaggatggtcttgatctcctgacctcattatccacccagcttggcctcccaaagtgctgggattacaggcatgagccaccgtgcccagccggaaataattcttaaaagctgtttaaaggaggattctgatcagccaggttcagaaatcagtgtatcagatcagagaataagagtttgtccctgttctcctatggccacttaaatccagaccttttcatctgaaatgcaaatatgtttggcatttttcatacacattcctgtcttttttcccccttctgctgtcttatgtagatactgagaatattaaa

SEQ ID NO: 33577 - DNA, 356 bp, Homo sapiens
gcttaccaacaattcttctatttcatattaaagatacttcctgctaggtttagaataaaaataacttattcaattctgtccaaagaggattagttaatttttcaagggaattccttaagaagtgtagctatcttcattcaatgcttttaagcttagctatgataatagggggtcttgttccacttctgcttatcagtagaaattttctatttgtatgacatttccctagcagagcattgtgattgacactgcttgtaagacaagtaaaatgttagccgagcaatgtcagttgaaactctagaattcactgttgatctttttaaaataaataaactgacaatgacagcactttctca

SEQ ID NO: 33578 - DNA, 726 bp, Homo sapiens
agccaacaagtagcagagatgggattccagagacagaaatcttgctgttccttctattttattagaagtggtccagatatgaagatatatatatgctttttaaataagatttttgacaggataagatgtgtgataaggtgaaggcttaggaactacacagttaagctgtacaaagacacaaaatacctaagtagatgaaacatgaactttcctcccaaatcagaatgcagtctgtaataggtactttctgaataataagagttttagaaaagcagaaagtaacaacttttacaatagtatgttttacaataaaaatatagtttttcaatagttttacaataaaagtgtagttttacaataaaagtgttacttttattagtcacctttaaagagtgaatagtaaaagtgtatttcccgaagttacaaaggttaaaaatattaaaatggccgggcacggtggctcaagcctgtaatcccagcacttcaggaggccgaggtgggcggatcacgaggtcaggagcccgagaccagcctggccaatatggtgacactgcatctttattaaaaatacaaaaattagccaggcgtggtggcacatgcctgtagtcccggctacttgggaggctgaggcagaagaatcgcttgaacccaggaggcggaggttgcagtgagccaagatcatgccgctgcagtccagcctgggcaacagagcgagactccatctca

SEQ ID NO: 33579 - DNA, 463 bp, Homo sapiens
ttactttcagtttctgtcacataggtttgggattggcaggatagtttaatgtttaataagagtgtggcagataaacatgtctgccacctactagctttgtgactttgcacaaatcccttaacctccccgaaacctcagtttcttcttctgtaaaattgatataattataatacctacttcacaggattgttgtgaggattaaatgaaataatgtatgaaaagcataattttggccacacactgtaaaggaagagctcagtgtgcaagaatagttatgcttatttttgccatttttggatatttcagttctcattcatagcttcaccagaaagtgatcatggaaagagatacaacaacacatgggcattatgtatagataataaaatcagcgttataataatagaagtatttagaaagtaccagggaacacagggatgaaatccaccgatcttatttatgccct

SEQ ID NO: 33580 - DNA, 363 bp, Homo sapiens
ttctaacactgaagccaatttgtactacatccacatagtaatccaaaattgaattcagggctttaaaaatatccacagttcctgcttcaaacactacttctagaaatactaaaaaagtgatcctcaatatggaaagcatttatgcacaaaatacttatttatattatctaaaaaccagaaacacaccaaatgttcaaatacaggagaatggttaagttaatgacaatttattcactcaatgaaatactataaagccattaaaaatgatgctgtagaacactatttaatgatataaccaaatattcatgagatatggttctgttgggaagcaggatttggccaggtgcagcggcacactcctgt

SEQ ID NO: 33581 - DNA, 471 bp, Homo sapiens
cggatcagaggctgggggagccgacagtctgccttgcagtgaaggaggcatgtgatcaccatcaaagtcttctgctctgggaaggatcacacagtcgtccttcagcctgcctggggcgcagtgttttctttcctcagaccgaaactgcatgaagagagattccagcaaggaagatagagcatgccccgtacactcctctctggttttcttcctcaaaggaaatttatgcatgtaatccacaagccgaagaacccatgtttttctttggaaaaggctacgccctttcagggtttccttttctcggctgtgttgccttcccatcagaagctgtctcttgccctccccattatgggatgtgcgaaatgaaggaaaacagagacactgctgggcatttgtctccatgagttgatccaatcagaaatctttgacttttcagatatgtgtccaaaaatgagtgaaggctcctcacag

SEQ ID NO: 33582 - DNA, 489 bp, Homo sapiens
gaagcagatgtcagaaaagatgctatgctgctggccttgatcatggagggaggccatgagccaaggaatgcaggcagcctctagaagccaaaaaaggccagggaacggcttctcccctagagcctgcagggggaagcaggcctcccaccaccttgccttgcagcccagggagactgacttcagacttctgccctccagaactgtaagataataaacttgggttatttgtgctgacttgccacagcagcaatgagaaactaatacattcttcggtgccttgatgggccctggacttcatggttccggctgtgcttaggaccagtcaggaaaacagtgacctgggagggtcagtgaaacaaaccagcccaggtttcacagcaaggcagccctgaggaagagtgggccacaatccagccccaccagggcctggccttccagaaagccagctctgatcttgccgagagcattgcaggacgccagagcaggaag

SEQ ID NO: 33583 - DNA, 517 bp, Homo sapiens
caatagtaactcttatgctcaggtttttactatagggcaatggggcagttagactggacactatctgtgagtggggtcttgtgtccagattcacacaggagcccctatgttagagaagatttaactaatgcataaatatttgaaactgtattatcaactcagctcaggtagcagtttcctttttttattcagaatacttacacggagacacactgaagaacagacagacgtacacatcccccatgcacaccccacaaaactttctgatgtctagctaaaatgaaactaaagaccttggttgtttcaaatcaaggtctctggtagtaatttccagtaattgttttaaaatatctcttttaagtcaggagaactggggaagacctgttttgccctggctcatgcttttagcagttacatttctcagctttttattcagaaatatcttgattttcaatttccaaagtggagacttaggcttcaagaagtcttttcaggtggtacaagggcctggtagtat

SEQ ID NO: 33584 - DNA, 392 bp, Homo sapiens
acatttaggtggtttccacttcttgtgagttgtaaatagcaacgccgtcaacactcatgaactggtttttgagttcctgttttcagttcttttgggtacacgcctggggctggtggtgctgggtcatgtagtagttctgcgtttaatgctttggggacccccgtctgtgcgtctcaggtcacccacagcaccgtgtccatgcactccctgcctccgtgacacttgctggcctcaactgcagagtggacggttagcctgcgcgttaaacccacactcgccgagaggcgggagagtggacggttagcctgcgtgtttaacccacactcgccgagaggcgggagagtggacggttagcctgcgcgttaaacccacactcgccgagaggcgggcat

SEQ ID NO: 33585 - DNA, 403 bp, Homo sapiens
catctagagtttgaccatccttagaaatgactgtgggtagattcttattctcaagtgctagaggttcttgttctctttttacattggattttgatggtgaccaacatgactgtgaaaaggaattgtaccacatgaagagatacacttatagaattacaaattggtcagtgccccttttctagtattccagaattatctgactaaaatgattttgtttagttccattttctaaaagttaaaacacaaaatacaatggacgtaggcttctgaagtgttctgagtcacccacgtgaaaagtcatggctaagattgtttatgtccctggcacataatatgtcgtcagtaaagatttctagaatgaataaataacttttccaaataaatgctctgttttatcaattac

SEQ ID NO: 33586 - DNA, 575 bp, Homo sapiens
attttcttactgaactgtctctgacagtaccctgtggggatttgaagtgccacatcacagtctggtaggagtgggagtgttggctgcctaccttgcccttggctggtgtaggggagaagtggtgtcacagtgtcttccctgatatttaactggagtagagtggttacaatctaaaagtttgctgtttttttttttttttttcagctgcccctttaaagcaggcttttctttggggctttttgaattgcctgctttagcagcatgtatttcatgcctagaatatatgaggcaaaaaagaaaacccagaaaactcacctccatgttgttacttgagtcctgacatccctaggtagtctgtcttctttatgcctgtcagagtcaccttatgtttgctttgtatataatttccagagttcttaatatactcagtgggaggaacaaggaaaaatatgcctacttcatcttcccagaatcagaagtttcactcacaaaattttacctccaacctaaatcttttctccatggtccagaaatgagtaccctcattttaatctgcatttgtatgtctcaaagcc

SEQ ID NO: 33587 - DNA, 323 bp, Homo sapiens
ctcttctaaaaaatgattttattttaatttacagatacttgccagaactaatacagctgatgaaatacctgaccttttctgctccaggtaaataattttttactttataaaaatatcaggttctaggagaattcagagtttgtataaaaatacctatttaggcatgcaaagtaatataaatccagaccctaaagaaatgatccctttaataaataagttttattagtttataaaaaataatgacttatgttattgagtcaacttacagcagaatcaccttgagcattttattttattctattttattttattttttcgagaca

SEQ ID NO: 33588 - DNA, 522 bp, Homo sapiens
tttttatccatcatctttaataatttggtgtagacatgtaaaatgtgttttacctaagaagatgagagttgaaatactgagttgaatgtgtatgtctatcttcctggtaatgcagggagtaggaagaatagacaggatgactaggggaggatgtcacatatctgaattaaagtagtagtacctttctgcttaatagttagaaatgagattataaaacactgacattgatttttcttgtgactgattaaatgagtcacactagtttatattcatatcatatatgtatagcattccagagtaaaactcttagacatgtttcaaaggggagtggaacatttgttaaaatcctggttcctcactgggaagttggaaaggccagaattggagctaacagtgaatctaagaggtagaactagaccgggaaccaagtgtcaagttgattgtaagaactgacagcagtggtcaggcagaggggtaggtcaggtacaggagatgcttggaggccggtggtgaaaaaaaaaa

SEQ ID NO: 33589 - DNA, 808 bp, Homo sapiens
aggttggtaagtatccctagtcttcccccaataccagcagcatccccgcccccacctagcattgtcacagccagaagaaatagccctcacaaacttccatagggccataccatccccactgagaaccactgatctaaatcaaattttgtaaacttaggtaaacttagttttgggtaaaacacaatctctgtaataaagcaatctgacaagtaaagtccttatctctttacaacgaatggagagaaaggctagagagaaattctgtcatggaaactagagtaccgtcaaatttacttatgagaccttttcctaagttaattgtatcaatttacctgtggtttactaggtcactgtagcaggtttattaatggcctccaaagatattaggtcctaatccctggaacttctgaatgttactttatgtggcaaagtctctgaagatgtgattaaatcaatggcccttgctaagaagagattatcctggattactctggtggtgttaaatgcaatcacatgcatccttgtaagagggaggcagaaggagatttgacacaaatacatggaggaaaaggccatgggaagacagagcagactgagtggatggtgctggccttgaagattggagtgagattcggccacaagccaaggaatgccagcggccacacaaagctggaagaggccaggaagggatgtttccctatagtttctggaggaagcaagctcttgtccacaccttgatttcagcccagtgatactaagtttgtacttctggcctccagaactgtgagaataaatttttgttgtttta

SEQ ID NO: 33590 - DNA, 373 bp, Homo sapiens
ccgcgtcgactgaaaacctgttataggttttgccccattcttcacacttgtaggatttctgtccagtatgaattctgtataataagggttgagaacttcctaaaagttttgtcacattctttatatttgtagggtttatgttccatataaattctcatatttagtaaaagttgatagctggttaaaggctttcccacattcatcaaactcatagggtttctctccagtatgaactatcttatgtctggtaagtgtagaggagtgcttaaaggctttgcacattttcacatttgtatggtttctctcccatatgaattatctcatgtctactaaggtttgaggatgaaataaaggccttgccacatttatcgca

SEQ ID NO: 33591 - DNA, 1014 bp, Homo sapiens
aaaaaaggagaaagagctacaggagagatggaggaagagacaggatttaaaccatgtatgcctttgtccttgcaatcttagttctattttatgttgatatctcctacagctaattatgttacttctgtttcacatggatctcatatagaaaatgcacaagtgtttaagaacagaatataatgatgaaggaatatcaataagtatattttttgcattggttatattagtcaaacatggcattacaaaaggagtgtctaatcttccccagatgtcattataaggtaaagttcttacatattattatcagcatcagtaaaatttgataaatttctatttgactgacagaaatacagatttatctttgttccatgccactcctgatagacatttacctccaccttggaagaatacaaaggactccacttaaaaggcaaatcaagccaaaccttataaagacaagccacagacttcaggttacatgttttgagttctgcacaaaatatttgaatgggtgcttcataaaagatgatatatgaggacttggggcagaacaagatggcagaatagaaggctccgccaattgtccctgcttcaaggacaccaatttaacaactaactacataaaatagcacctttataagaaccaaaaatcaggtgagtacctggctttaacttcgtattactaaaagagggcactgaagagtgcaggaaaaaccgtcttgaattgctgacatcacacctcctctctcccgcagcagcagtggcatggtgcagagaacatttttgtgtgctggggagaaggagatcacagtatttgtgaggcattgaactcagtgctgccttattataacagaaaacaaaattggaccaatctattcatgaattggaaaaatcaatattgctaaaatgtccatactacccaaagcaatctacagatttaatgcaatccctatcaaaatgccaatgacattattcacagaaatagaaaaacactctaaaacgtatgtggaacca

SEQ ID NO: 33592 - DNA, 721 bp, Homo sapiens
caccaaaggcgtatcctagctttattaaagggcccgcgccacggagtcaatataaaaacacaaaaagtcccatcagtttaataacaataaaaaaacccaaaagtggaaaactgagggggcaggggaagagacccctgggccaggggcaccgaggagccctgctcatggcaccaggcctggccgcagggtcccccggtattgctgttgctacgaggttggggggcagcgattgtcctgtgggaaccaccgttctcctgggtcggggaccctcacttcttctggggtgtgctcagcttctgcatgccccggatcttgtccagcagaccagaaatgaaggcctctgtgggtttgtaacagtcaaccagcagctccttgaccgtggcagcccgggcatcgtcactctccatgtccaggagctcatccacgtcaatctccagttctgggatctcctcttcctggcagtcgtagaggcgcgtgagctgctccaggatccactcctctaggttgaggcgcttccgtagctccttgcggtcatacttgacggtgaccttcccttggcgcctcactgggccctcatcgtccgccccgcccgggccctctcctgcggccccgggggggctctgaaagtagacgcgtggtcctgggccgccactgcccggcccgggggccggggccgccaacgccgcgccccccgcggtgccgctgtccgccatggcggccg

SEQ ID NO: 33593 - DNA, 516 bp, Homo sapiens
  misc_feature (23)..(23): n is a, c, g, or t
tctggaggacactaggcttgacntggggagtggcatgatggggggcagggtccgaggcaacggagaaggcagaagtgacttaggtcaggcaagaaagagtatatattgggggcgggagtgcagaggggaggggagcgcgcggggaagcaaagcgccctttgactccagtgacaggcgagctcacagtggagctgccaggcggaccggcgcgagaccgattttggggtgtcggcgcggggtgggaacacacctggcagtcgtagaggcgcgtgagctgctccaggatccactcctctaggttgaggcgcttccgtagctccttgcggtcatacttgacggtgaccttcccttggcgcctcactgggccctcatcgtccgccccgcccgggccctctcctgcggccccgggggggctctgaaagtagacgcgtggtcctgggccgccactgcccggcccgggggccggggccgccaacgccgcgccccccgcggtgccgctgtccgccatggcggccg

SEQ ID NO: 33594 - DNA, 342 bp, Homo sapiens
taacttttctgcagaagttattattggtgttatactcaaaaataaagcacagtttagccctggcctgtgcatttacaccactgaataaattaccaaaagtgtctgtctagcaagagttcgttctaacaaagtggagaggaagagccagttttatacaaatattgaatcatcccacaactacatttcatgaaactccctgattttttttaaaaagagactcttgctctgtagcccaggctgcaaagctggagtgcagtggcctgacctctcagctcactgcaacctctgtatcccctcagcctcctgagtagctaggactacaggcacaggccactgcccccc

SEQ ID NO: 33595 - DNA, 298 bp, Homo sapiens
tgaagagttgctgaggcagaactgaaatcatggctcacctcaaagaagcagcagtattggccgttaatgatgcctcacacagaaagacgatgctcctttaactcggggttttaatgggaagtttctaagcctgaaacaacagctttagacctggggtgtgccatcagctgccttgcagctaccactgtctactgctttcacacagcgtggtcgggaagaatggaaactaaagaggcttgtaactacctgtaactgttccaccaggaaatggatcaagtgtttgttcagccagagccag

SEQ ID NO: 33596 - DNA, 540 bp, Homo sapiens
ttttatttttatgggcaatataatctcaaatctgaaactactacttaagagtttttttaaaattatcttcaggatcaatttgtgtattagtttacttttgtttatctttttcatgctatagattttctcttcaaatgtctaatgacacttgatcgtcccttccttgagggatgaatggggaatgggagggtttcctgggaacttaggacacatggggctagcagcaagaagatctgatgggacatgctgactgaacatgaggggtgaggaagatgcaggggcctagagtaatcttcagactcctagatttttgacttgtaacatggtagggatgatattttcagttactgcaatagaaaatacagaaagataaataggtacattagaagaccaaaaaagaagagctaaggaaacaagttcacttttagaaatgtatgagaactagtggtactggagtagaggattccaggaagcaggtttggagttcataagagagcccatgcctgacctctcaaatctttaagagtaaaaacagtaata

SEQ ID NO: 33597 - DNA, 219 bp, Homo sapiens
cctcaccagctctggggagttcagggaaggcttcccagcagaggtggtgtttaagtggagacctaaaagtattgagggaatgcacaagaaagagagaaataaagacaaaatggaaagggaggacaaaaagagggaaaagagaaaaaagagcaaaagaaagacacacaccgggcaggcacagtggctcacgcctgtaatcctggcactttgggaggccaa

SEQ ID NO: 33598 - DNA, 367 bp, Homo sapiens
acaaaggcctcagaggtgctcattgtccacctgcaggagtgtgcccacagagcttcaagaagatggttctcactcctctcgccctttgccctcattgagaaagctacccacagctatacactgggacggagaaggaagctggctacaagatggggcaagcatgtctgtcactcaaacgctggccttcctggcctagtcacccatttggcacattttcccggatgcccgtgatagtggcattgtgctgtggcattggcctctgctctgtcctccctcttgttctgtctgcccagttcctgtgaagcctagaggcttcttagtctggctcaatgtcttcaacaaagaacacttctcagtccattaggaa

SEQ ID NO: 33599 - DNA, 500 bp, Homo sapiens
catgggatctttagacaaagagctgaattgaattcgtaagaaagagctgcgaggcgcaatggctcgcacctgtaatcccagcactttgggaggccgagtcgggtggatcacgagtcaggagattgagaccatcctggctaacatggtgaaaccctgtctctactaaaaatacaaaaattagccaggcatggtgatgggcgcctgtaatcccagctactcaggaggctgaggcaggagaatcgcttgaacccgggaggcggaggttgcagtgagccgatattgcaccactgcactccagcctgggtgacagagcgagactccgtctcaaaataaaaaataaaaaaagagaaagctagatcatatcttgggataaatgttaataacaaatatcaggaataacatttgtcctttatgtaccttttttccagtggacacagtgggatttttttttttttttttaagagattggggtctgtatgtttcccaggctggtcttgaac

SEQ ID NO: 33600 - DNA, 491 bp, Homo sapiens
ccagaatcaagcagaaagcagacagccaggctttagaaccaaggcctactagtagatactaggaagtggttgtgttgcttcaattagaggggcacaatttcaaattacccttaaaaaaagtcttgaagaaaaatattgttaagtatcactttcacatttctgagtcattttttcagaactgaagagcctgtgaaacagagaaagattgctctagagccacacaataggaactgggtacatggaaatacaccaggagacatgtcaaactatagaatggacttggcacataaccctggagcatgattttacttgaagtcaatgtcaaaataaatactaatttttatagtgtagaatgtaaaacttacactaactttttaggaaaaaaaaactgttattgttatggggttactttaaaccaagtcccctggatttctatttagacatggcttttttctcacccctgtgagtaaaagcttctcaaaggtcttggg

SEQ ID NO: 33601 - DNA, 416 bp, Homo sapiens
tcttttacatgctttaaataccttaaagtaggcagaatctcaaatagtgcaaggatgcgtattgccctatggcaacagtgagtggcgacagtgagctgttatggagctgtccagacttttcctccctccagtgagtgccagctgtccttgcatggagtcctggttcctttggtggagaatggtgttgaaaatctcagcctttgcggcggagagcggggacatgggacacaggggagttggtggtgggcagagatgctgctgggccactttcagtgacaaaacatgacagcaaaggctcttgaagtcagtgcagacaccttcagggatacaaccccttcgaccagggctgtgccagcaactggtatttaacaatttgtgcaccactgggacccaagtgagttggcaagccagaggcc

SEQ ID NO: 33602 - DNA, 449 bp, Homo sapiens
ttcctctggggcttgtctggcattttcctagccagatgttcttgcatcctagtggtttcctgttaggaactcagggctgtctctgctgctaaatgcagtttcctcaaggtctaccacttagaaaagtcatttgtttcacttgcttactttccttccttcagggtcctgcaccacatcccctgcacccagtgggtgacgcagaaatgcccctgggagtaaaatcccaattcttggcttaagcctgttttagtcagaaaccacccaatttagcgtgcaggtcaccagagtgggtagagggtcagaggtcaggtctttggccctgagaaatgaaaatgcaggggccgtgctgtcccttgtacctcaggagagcaaggaagaaactgggccttccctggcagggcttcctgctcctgcttctgtctccactaggctttcccagaaggcagcac

SEQ ID NO: 33603 - DNA, 367 bp, Homo sapiens
tgaaacagaatggggggagaggactggaggtacaagtggggtctccactttccacagacatagcttggtttaactctcatcttttcagtgtggcaccctgccttcgatcatgcctgccaggctcctcctggtccacaagcctttttccctgtccagataataagcttagttgccttcctcagtaggaaaggagaggttttcctacaagtatggagtaggaaagaggaactaggaatcttaacacttcttaaccaactctcaacccttccttcttattgggaaagcctcacttctgggaaattcctgaaccgaataccctcctcccaatttccagagtcttaaggattttctcatgtaaaccaggttg

SEQ ID NO: 33604 - DNA, 442 bp, Homo sapiens
caagtcagaatccatcgtgtgtggggtaaatgagtggttagaccatggggtacatggtgtaagggagatgatgccagagacatagctaggaccagactgagaagcaagggactcgaagaccaggccatgcagcttggacttgatcctggacatagggaaagtgatgtgattagaggatgtgggggttctgggctcaagcatcctcgaagggtcgcactaagggcaaggctccccctccccacggcagttggcaagcagcggcttgctgtttgagaaggtgtttactcctctggagcatgagtcccacactcagaaggtgctgagactctgctcgtagggtaagcatatgaagggccggtcccagccaggacagctgggagtgcgcagtcagcaaggcaaagcaccaggcttatgtcttccctcttcttccatccttcttggc

SEQ ID NO: 33605 - DNA, 473 bp, Homo sapiens
  misc_feature (286)..(286): n is a, c, g, or t
  misc_feature (345)..(345): n is a, c, g, or t
  misc_feature (383)..(383): n is a, c, g, or t
  misc_feature (470)..(472): n is a, c, g, or t
acactgcctcctagtcccatgatgaacgatccacaggaagactgaagagaggtctccatagagagtgctatggaagtgatggctcctaagagtcaggatttcgtcaggaaacacgtgggcaagttcagctgagagactgaaatgtagaaaagggtactgctagggatgtggcattcctggtgggaatgatgggaaaagacgagtaaacaggagcgcagagagtctagagatgagagtgtgtgagatatgactgttagctatttgagcaattccctagagtatttgnacatcaagatgtttccagaaatgtactgcacttctccttggttagcttttttaactacnaaatcatctcgtatgtggtggtgaaaaacaaacaaacnaaaaatctgctaccttaagtacttaagtggcctcgtgtaggaatataagctctgtcatctactcatagagcctcttactcaggccgnnng

SEQ ID NO: 33606 - DNA, 186 bp, Homo sapiens
tttaagaagccttttccagaagacaaagggtgggggatttcttcacctagtgctattttccaaaatacttggctcaggtaaagctcaacattaccataaacagaacaaactatatatatatatatgtatggtttgtatatgtttaagtacgtatatacagtttcgtttacatgcatatgctgaata

SEQ ID NO: 33607 - DNA, 284 bp, Homo sapiens
ggagaaattcagaaacagctaaattattaatacttggaagctgatggaatgaatcaatatggcatggcaaaagaatctcgcagttgccatttccatatttcctgagtttaagacatgctgattagatgctcttagcacatccattttgaaaaacagcacatattttaaagacatatggcatttagaaatgtcacaataaatgaaacagtagcttaattgtttagggtaaacatttattttacagctagataactttgtaaaattatataatttaactcaatgtt

SEQ ID NO: 33608 - DNA, 417 bp, Homo sapiens
aagtgtctgtcagggccaattgtgggccagatgtgcccagggttctatagctagctggtggaaaggcctgaagggttcatattcaggtccacttgacttgaaaactcatattgaccttacttatgtactaattcccactttacaatccatgccacaaactttattgtcttaagaagttgccacagcagccttcagcagccaccttgtgatcagtcagcagtcatcaacattgaggcaagaccctactccagcaaaaacattagtattagctgaagcctcagatgactgttagcattttttagcagtagtgtaatttttaattaaggtatgtacatatctattttatacataatgctattgtatacttaataggctaaagtataaatataacttttatgtacactacaaaaacaaaaa

SEQ ID NO: 33609 - DNA, 380 bp, Homo sapiens
tggatagtatcagctttgaacatgatgttcatttatcttctgtgttggaatcctctactgacttctgaacctagaacatattgacatcaatataactatcactaattctgtgaaattttattttatttaaaataataaaaaagtaatattagacttaatacaaactctaattactaagagaagaatgtgaagattttagcccaaggaatgagcactcccataattaactcttactgctgcataatgtatagttaaacaaagggtgacagttttagctggaacattaaatgtccaccagttgtgaatgctacagataggaaatttctgtaatgggtggcaacttggacttgattacctcagaaggaccttccaggtaaaaa

SEQ ID NO: 33610 - DNA, 299 bp, Homo sapiens
tttaattgactcacaattcggcacggctgggaggcctcaggaaacttataatcatggtggaaggtgaagggcaccttcttcacaaggcggcaggaggaagtgagtgcaagcacaggaaaaacttccacttttaaaaccataagctctcatgaaaactaactatcgtgagaacagcatgggggaaaccgcccccataatccaatcacttcccatcaggttcctcccttgacatatggggactacaattcaagatgagatttgggtggggacagaaagccaaaccatatcaatactattgt

SEQ ID NO: 33611 - DNA, 492 bp, Homo sapiens
cacagataaccactaagacctatttaaatatgtatctcatggctgactggcagctccatacccaaagctactgttacaatccaggctctcatcttacctctggtcctgctgtttaccctacaactaccataatgtttaaatagcagaaattattagattcatcagtgttgttttaagcaggtcatcattttgatttattttttattttttctgttctcagagtctgttcccgtaggtcattatttctttatttatttatttatttatttatttatttatttagagatagagtctcactgtcgcccagattggagtgcagtggtacgatcttagctcactgcagcatcaaccttctgggctcgtgtgatcctcccacctcagcctcctcagtaggtgggaccacagttgtgtgccaccacacctggctaattttttgtatttttttgtagagacaggaatttgccgtgttacccaggctggtctcgaactcct

SEQ ID NO: 33612 - DNA, 541 bp, Homo sapiens
ggctcccgcccccagacattctgatttaattggcatggggcaagacctggacttgggattttttttaatgctcttcatgtgatctgttgggcagccagatttggggatcactagacggaagaaggattgttaaagtctccggagatgttacttgccaatgctaagagctctttgaggacatctggaattgttacaatattgccaaatataggaaagagggaaaaggtagagtgtgattccaataataaaggattccgcttttcattgaaggaactggtggaaaggtttcttctctgctgagcctgcaggcccgtcctgcctgcctggggtgcccgggagacgcgggcctgctccggagactgctgactgccggtcctgttagtcaggtgtcagccctgtctctgccgaagagactcttctctttattttaaattaaaccctcagagcaccaccaaagcatcacttttctccctccattggtgttctcattctttgatgttacttgtttgaacaccactattagtagttggagatttgttcc

SEQ ID NO: 33613 - DNA, 1525 bp, Homo sapiens
gttataacttcaacatgaattttttggaggaaacaattcaactcctaacacatctctacccaacctctgtaggttccctcaatccaccaaaattttttggctccactggattatctagcagttaggaaaccaagatcattaaatgaattcaccgcaactacagtgagactgactaccttagcttacctctgtgaaaggagttaagccaaaggaatctgtggaattttggagagtttgggagcatttgggggcaggaggcaaatgttcttcctttaaatcacaacacttagttctcttccatttataagactcacccctccatcccaacccctgcaccacaggacaaggaagtgttcttggtcttcaactttcatccctgatggtgaaagcagttgctcctgacctatttgcccaccagcttctcctctggagcctgaggcttctgatgcctttcagtacttaaatatgagttcagaccctggggcctggacataagatttggggtcccctggatataagatttctgaaaacactcagactgtggagacccctgctgagggagaagccccaaactgtggcttcaggggaatgcaccaaggctctcattgaggccaccttctccaacaagctcccctcctgcttccccatggctggcatggctgaggaaaaaggacactgagcacagcccgtgcatgagcggcttgccatgcaacaggataaaacccataatgccactcagcaagccttggttgtaaatctagtttgattacatttgtaatcaaatgatggccatttgttctgtttctggtttgtgaaccaactgaagacataagcagggcctcagctaacccacaaatagcacatgtgtgcaaactggaaaaatgaacccttcttctgggaggacgccagcccaggccaggtcacccggcttggccagcagaacacagagtagattttggtcccgtttgttccccagtggggtatctatccttgtgcagggcacaagcctacatggtggctctggtcatatcattagaaaatagacagaaatgggctgcacaccagaatgaatgaattgaattgaaagggaggagtgatggtggaaaaaaaaacaagtcaattcatttagactggtagaaccagaaccactgtgtagtacatccaaacggttaaaattccctggaagatgttacataatcctatcatggtgtttatttatggaaatctattttaaaaattttatgtaatactgcacagtctgtttgcatgatgccttgtacgtagtagcaactcagtaaatactttttgaatgaactagtatagtattttaattagctagtcttcatgtactggtacaaaagaacagtgtcatcttacagctgaagtcatagaggggaaatatcccactcaagatcatataacattccaggtactcaggatgaatggtttgaggactggtctgaattcttcaaaggtttcagctgtattaacattctccatctaataaactttatcttgtcattgc

SEQ ID NO: 33614 - DNA, 1583 bp, Homo sapiens
gttataacttcaacatgaattttttggaggaaacaattcaactcctaacacatctctacccaacctctgtaggttccctcaatccaccaaaattttttggctccactggattatctagcagttaggaaaccaagatcattaaatgaattcaccgcaactacagtgagactgactaccttagcttacctctgtgaaaggagttaagccaaaggaatctgtggaattttggagagtttgggagcatttgggggcaggaggcaaatgttcttcctttaaatcacaacacttagttctcttccatttataagactcacccctccatcccaacccctgcaccacaggacaaggaagtgttcttggtcttcaactttcatccctgatggtgaaagcagttgctcctgacctatttgcccaccagcttctcctctggagcctgaggcttctgatgcctgcctggctggttctcagtaagaaggtcaagttcaaccagaggggagatgctgatgcctttcagtacttaaatatgagttcagaccctggggcctggacataagatttggggtcccctggatataagatttctgaaaacactcagactgtggagacccctgctgagggagaagccccaaactgtggcttcaggggaatgcaccaaggctctcattgaggccaccttctccaacaagctcccctcctgcttccccatggctggcatggctgaggaaaaaggacactgagcacagcccgtgcatgagcggcttgccatgcaacaggataaaacccataatgccactcagcaagccttggttgtaaatctagtttgattacatttgtaatcaaatgatggccatttgttctgtttctggtttgtgaaccaactgaagacataagcagggcctcagctaacccacaaatagcacatgtgtgcaaactggaaaaatgaacccttcttctgggaggacgccagcccaggccaggtcacccggcttggccagcagaacacagagtagattttggtcccgtttgttccccagtggggtatctatccttgtgcagggcacaagcctacatggtggctctggtcatatcattagaaaatagacagaaatgggctgcacaccagaatgaatgaattgaattgaaagggaggagtgatggtggaaaaaaaaacaagtcaattcatttagactggtagaaccagaaccactgtgtagtacatccaaacggttaaaattccctggaagatgttacataatcctatcatggtgtttatttatggaaatctattttaaaaattttatgtaatactgcacagtctgtttgcatgatgccttgtacgtagtagcaactcagtaaatactttttgaatgaactagtatagtattttaattagctagtcttcatgtactggtacaaaagaacagtgtcatcttacagctgaagtcatagaggggaaatatcccactcaagatcatataacattccaggtactcaggatgaatggtttgaggactggtctgaattcttcaaaggtttcagctgtattaacattctccatctaataaactttatcttgtcattgc

SEQ ID NO: 33615 - DNA, 789 bp, Homo sapiens
gggtctctctctctctggagagtggctgcaaattctagccctacccagaccgggaggagagttacattccagtgtgttgggcgggcaagatgtagaggaggcagcacaacaaaacacatgaaatgtcagaagcatcctcctactcacagatccccaggatgggaggctgctctcgggggctgatggaagtccagagacagccgggtgttcaacctgtgggataggaatgagagaggacctgttgggccttgcgttattaaggtgcatggacgttatccctcaggacttcctttgggggttgtggattggttgcgcaaaggaaagttcttatttatatgactctggtgttggccactaagtttcactgtagtcagcagctgtgagatgtgttggatttggggccagtgaggtgaggaacaagcaggctgtataacaaacagctacacaggcaggggaagttttaactaagacaaagacgatgggggtattggagctgagataaataaacagctaactggcatatttcacttttggttctttaccatccatatgcactctcctacacacataggaatttctttggaataattaaacaagtctatattcctacctaagaagatatgagggaagaagtcctcacccacccccaaaggagcagatgcgcagttcaaacagtcctttgtattcccatggcacgccatgtcaattactcctcaaatttagtcccattctaactattctgtttcttaaagacaaaattataaatgtaacctctaataatgtgtatat

SEQ ID NO: 33616 - DNA, 249 bp, Homo sapiens
ttgcagatgatagaataaaaacatgtgtagaatatgtccaaggtcacacaaagagtgagtggtacagctgagttgaaccccaataagcctgactcataagcctggctgagtcatgctgcttctcagaactcttgatccagtacttttccccataagctgtaactccttcctgcagtgtatgattgccacagtcatattattgagaagtgacccctgtgtcacatcatcagtgcacgttgtattttttgt

SEQ ID NO: 33617 - DNA, 342 bp, Homo sapiens
  misc_feature (331)..(331): n is a, c, g, or t
ctgccgaggctggggtgcagtagcacaatctcagctcactgtagctagcctcaaactcgaccttctgagctcaagtagtccctgcacctcagtcccccagccccaagtagctgagactacaggcacatccccactatgcccggctaagttttgtattttttgtagacagggtttcgccatgttgcccacgctgcccatgctcgtctcaaactcctgagctcaagtgatctgcccaccttcacggcctgtaaattcccagcattttggggagggttgagacggggaggattcgctttgagcccagggagtttcgaaggttgttcgtggaggntgagattcatg

SEQ ID NO: 33618 - DNA, 484 bp, Homo sapiens
gggttttcatggaagctttgtgacatcagcattccttcccccagggtatacagcaggaacctctctggggaggtcttaagacccgcaatcagaaaggtagggggaaagttagagtcctgccttagggcaggtgaaagaagaggaggagaaggttggagaggttatttttcttaaggtctgcagagaaggtctaacccaacattatacccaaagactgtagcaagggctatgggagttatgagccaggaactgtggacaaaaaccaaggtatatgtgtatcataacaccacacagaggagcctggaacgtgtcctccctggataccaagggagggattctgaatcgaaataatggatgtgcacccagtcagtaatcaatgaaagagagttaataagcacaagtgggtaccactgcatttaaatgatataagaccagagagtcaagaaagacctggatcccggaagagctcaattaaaaaaaaaaa

SEQ ID NO: 33619 - DNA, 2054 bp, Homo sapiens
catcaccctttttaacattgtttacacatcactgcctgttttagccatggggatttttgaccaggatgtgagtgaccagaacagcgtggactgtccccagctctacaaaccaggacagctgaatctgctttttaacaagcgtaaattttccatttgcgtgttgcatggaatctacacctcattagtccttttcttcatcccctatggggccttttacaacgtggctggagaagatgggcaacatattgctgactaccagtcctttgcagttaccatggccacatctttggtcattgtggtcagtgtgcagatagccttggataccagttactggactttcattaatcacgtcttcatctgggggagcattgccatttatttctccattttatttacaatgcacagtaatggcatctttggcatcttcccaaaccagtttccatttgttggtaatgcacgacattccctgacccagaagtgcatctggcttgtaattctcttaacaacagtggcttcagttatgccagtggtggcattcagatttttgaaggtggatttatacccaaccctgagtgatcagatccgccggtggcagaaggctcaaaagaaggcaaggcctccaagtagccgaaggcctcggacccgcaggtcaagctcaagaaggtctggatatgcttttgctcaccaagaaggctatggagagcttatcacatctggaaaaaatatgcgagctaaaaatccacccccaacatcagggctggaaaagacacattataatagcactagctggattgaaaatttatgtaagaaaaccacagacaccgtgagcagctttagccaggataaaacagtgaaactgtgagtcaatatgaatttaaaccacgtagttatcttttcacttcaggtggagctgaaattctgctggctccagagtttgagatttgaggcaagaggtggggcaggcagattgcctcacttaacttaaatctgcggcagacaactgccagtgcccatcaaacaggagtgtgcgctatggaaaaccaggccagagggtcactgtctggtttgtgatttggtggacaaaacactcgctgttacaagtacagattttttttttttttaaatcaacctagataccaattgacctgaactttagaatcttatttatggagaaaaacttgtaaagctgcatattcactgaatggatcctcaggcggataaaagggtgcattttaaaggtatatatccaagctgaaaagcatgcctattgacagataaacatgtatctgtaagatcagcctttcccaaggtatacttttaaaatttaaagcgtgtactgtgttgctttcagactgagttgcatgtcactctttagtcttgatatctacctgtctgttcagccaggacaacaaatggcttccaagcctgaagaatacaaaagtgtgcttgtgtttctcatttttataccagtctagggacaaaggagactgaacatctttgcagcaggataggctggtaatttgatcaaatttattcaaaaagctctcagtctgtgtcatgtaaggacatgcttatgaaatgtgagagaggctcgccactaagtattctaaatacttttcaatggcttttctaacaacctcagtagtaatttgctgagcatcatccagaccattaatagaatcagcaaagcactggaatttcacactttaatgataatattccacatagtctatgggcaaatattttcaacatttccaatttttaaagcttcagaattgaagccaaacaaattaataaataattgttttaattactatttaaaaactcaggtttagattgtttaaaattagttgcttttgatactcagctgtcatgtttataattcaaacatgtagtaaacatatgtaggtaaggttgtttttttggagatgttgcagctcaaatttcagtccacatatgaatcatcagtgtattttccataaagtgattcgggcatatttgtgtgaaaacctcagttctgtcacttcttacctctataaacttggacgataatg

SEQ ID NO: 33620 - DNA, 2200 bp, Homo sapiens
gtaaaaaagatcatgcatgtgtaaaaatggtattgtgaaaatttacttacagagtataaaatgttgcacttgcccattacagaaagaatttttttccaatagaaaagttttgagagacatttgtaaagtaacttaaaaattataagcccttgtgctttcatatttctcacttaaaagaagtttaacatgtttaacatcttacctcctgattctgactcgaccttggcagatataatggcttgcgtatagaagttctaaagtcaattttctaccagaaatatgaagtcagatcagtcccctgtgtgtgttcagaaagtggggatgcccgcggttggcttggcaactaggcaggtgcaaacttcctgccacagggcagttctcgcgaaacatcacgaggtaaaatgatgctgttttaatcctcaaagacctcccgtttgcatttgattttatttacagatagccttggataccagttactggactttcattaatcacgtcttcatctgggggagcattgccatttatttctccattttatttacaatgcacagtaatggcatctttggcatcttcccaaaccagtttccatttgttggtaatgcacgacattccctgacccagaagtgcatctggcttgtaattctcttaacaacagtggcttcagttatgccagtggtggcattcagatttttgaaggtggatttatacccaaccctgagtgatcagatccgccggtggcagaaggctcaaaagaaggcaaggcctccaagtagccgaaggcctcggacccgcaggtcaagctcaagaaggtctggatatgcttttgctcaccaagaaggctatggagagcttatcacatctggaaaaaatatgcgagctaaaaatccacccccaacatcagggctggaaaagacacattataatagcactagctggattgaaaatttatgtaagaaaaccacagacaccgtgagcagctttagccaggataaaacagtgaaactgtgagtcaatatgaatttaaaccacgtagttatcttttcacttcaggtggagctgaaattctgctggctccagagtttgagatttgaggcaagaggtggggcaggcagattgcctcacttaacttaaatctgcggcagacaactgccagtgcccatcaaacaggagtgtgcgctatggaaaaccaggccagagggtcactgtctggtttgtgatttggtggacaaaacactcgctgttacaagtacagattttttttttttttaaatcaacctagataccaattgacctgaactttagaatcttatttatggagaaaaacttgtaaagctgcatattcactgaatggatcctcaggcggataaaagggtgcattttaaaggtatatatccaagctgaaaagcatgcctattgacagataaacatgtatctgtaagatcagcctttcccaaggtatacttttaaaatttaaagcgtgtactgtgttgctttcagactgagttgcatgtcactctttagtcttgatatctacctgtctgttcagccaggacaacaaatggcttccaagcctgaagaatacaaaagtgtgcttgtgtttctcatttttataccagtctagggacaaaggagactgaacatctttgcagcaggataggctggtaatttgatcaaatttattcaaaaagctctcagtctgtgtcatgtaaggacatgcttatgaaatgtgagagaggctcgccactaagtattctaaatacttttcaatggcttttctaacaacctcagtagtaatttgctgagcatcatccagaccattaatagaatcagcaaagcactggaatttcacactttaatgataatattccacatagtctatgggcaaatattttcaacatttccaatttttaaagcttcagaattgaagccaaacaaattaataaataattgttttaattactatttaaaaactcaggtttagattgtttaaaattagttgcttttgatactcagctgtcatgtttataattcaaacatgtagtaaacatatgtaggtaaggttgtttttttggagatgttgcagctcaaatttcagtccacatatgaatcatcagtgtattttccataaagtgattcgggcatatttgtgtgaaaacctcagttctgtcacttcttacctctataaacttggacgataatg

SEQ ID NO: 33621 - DNA, 2231 bp, Homo sapiens
gtaaaaaagatcatgcatgtgtaaaaatggtattgtgaaaatttacttacagagtataaaatgttgcacttgcccattacagaaagaatttttttccaatagaaaagttttgagagacatttgtaaagtaacttaaaaattataagcccttgtgctttcatatttctcacttaaaagaagtttaacatgtttaacatcttacctcctgattctgactcgaccttggcagatataatggcttgcgtatagaagttctaaagtcaattttctaccagaaatatgaagtcagatcagtcccctgtgtgtgttcagaaagtggggatgcccgcggttggcttggcaactaggcaggtgcaaacttcctgccacagggcagttctcgcgaaacatcacgaggtaaaatgatgctgttttaatcctcaaagacctcccgtttgcatttgattttatttacagatagccttggataccagttactggactttcattaatcacgtcttcatctgggggagcattgccatttatttctccattttatttacaatgcacagtaatggcatctttggcatcttcccaaaccagtttccatttgttggtaatgcacgacattccctgacccagaagtgcatctggcttgtaattctcttaacaacagtggcttcagttatgccagtggtggcattcagatttttgaaggtggatttatacccaaccctgagtgatcagatccgccggtggcagaaggctcaaaagaaggcaaggcctccaagtagccgaaggcctcggacccgcaggtcaagctcaagaaggtctggatatgcttttgctcaccaagaaggctatggagagcttatcacatctggaaaaaatatgcgagctaaaaatccacccccaacatcagggctggaaaagacacattataatagcactagctggattgaaaatttatgtaagaaaaccacagacaccgtgagcagctttagccaggataaaacagtgaaactgtgagtcaatatgaatttaaaccacgtagttatcttttcacttcaggtggagctgaaattctgctggctccagagtttgagatttgaggcaagaggtggggcaggcagattgcctcacttaacttaaatctgcggcagacaactgccagtgcccatcaaacaggagtgtgcgctatggaaaaccaggccagagggtcactgtctggtttgtgatttggtggacaaaacactcgctgttacaagtacagattttttttttttttaaatcaacctagataccaattgacctgaactttagaatcttatttatggagaaaaacttgtaaagctgcatattcactgaatggatcctcaggcggataaaagggtgcattttaaaggtatatatccaagctgaaaagcatgcctattgacagataaacatgtatctgtaagatcagcctttcccaaggtatacttttaaaatttaaagcgtgtactgtgttgctttcagactgagttgcatgtcactctttagtcttgatatctacctgtctgttcagccaggacaacaaatggcttccaagcctgaagaatacaaaagtgtgcttgtgtttctcatttttataccagtctagggacaaaggagactgaacatctttgcagcaggataggctggtaatttgatcaaatttattcaaaaagctctcagtctgtgtcatgtaaggacatgcttatgaaatgtgagagaggctcgccactaagtattctaaatacttttcaatggcttttctaacaacctcagtagtaatttgctgagcatcatccagaccattaatagaatcagcaaagcactggaatttcacactttaatgataatattccacatagtctatgggcaaatattttcaacatttccaatttttaaagcttcagaattgaagccaaacaaattaataaataattgttttaattactatttaaaaactcaggtttagattgtttaaaattagttgcttttgatactcagctgtcatgtttataattcaaacatgtagtaaacatatgtaggtaaggttgtttttttggagatgttgcagctcaaatttcagtccacatatgaatcatcagtgtattttccataaagtgattcgggcatatttgtgtgaaaacctcagttctgtcacttcttacctctataaacttggacgataatgtgccttctctgagactcagtttcttcctctg

SEQ ID NO: 33622 - DNA, 2177 bp, Homo sapiens
gtaaaaaagatcatgcatgtgtaaaaatggtattgtgaaaatttacttacagagtataaaatgttgcacttgcccattacagaaagaatttttttccaatagaaaagttttgagagacatttgtaaagtaacttaaaaattataagcccttgtgctttcatatttctcacttaaaagaagtttaacatgtttaacatcttacctcctgattctgactcgaccttggcagatataatggcttgcgtatagaagttctaaagtcaattttctaccagaaatatgaagtcagatcagtcccctgtgtgtgttcagaaagtggggatgcccgcggttggcttggcaactaggcaggtgcaaacttcctgccacagggcagttctcgcgaaacatcacgaggtaaaatgatgctgttttaatcctcaaagacctcccgtttgcatttgattttatttacagatagccttggataccagttactggactttcattaatcacgtcttcatctgggggagcattgccatttatttctccattttatttacaatgcacagtaatggcatctttggcatcttcccaaaccagtttccatttgttggtaatgcacgacattccctgacccagaagtgcatctggcttgtaattctcttaacaacagtggcttcagttatgccagtggtggcattcagatttttgaaggtggatttatacccaaccctgagtgatcagatccgccggtggcagaaggctcaaaagaaggcaaggcctccaagtagccgaaggcctcggacccgcaggtcaagctcaagaaggtctggatatgcttttgctcaccaagaaggctatggagagcttatcacatctggaaaaaatatgcgagctaaaaatccacccccaacatcagggctggaaaagacacattataatagcactagctggattgaaaatttatgtaagaaaaccacagacaccgtgagcagctttagccaggataaaacagtgaaactgtgagtcaatatgaatttaaaccacgtagttatcttttcacttcaggtggagctgaaattctgctggctccagagtttgagatttgaggcaagaggtggggcaggcagattgcctcacttaacttaaatctgcggcagacaactgccagtgcccatcaaacaggagtgtgcgctatggaaaaccaggccagagggtcactgtctggtttgtgatttggtggacaaaacactcgctgttacaagtacagattttttttttttttaaatcaacctagataccaattgacctgaactttagaatcttatttatggagaaaaacttgtaaagctgcatattcactgaatggatcctcaggcggataaaagggtgcattttaaaggtatatatccaagctgaaaagcatgcctattgacagataaacatgtatctgtaagatcagcctttcccaaggtatacttttaaaatttaaagcgtgtactgtgttgctttcagactgagttgcatgtcactctttagtcttgatatctacctgtctgttcagccaggacaacaaatggcttccaagcctgaagaatacaaaagtgtgcttgtgtttctcatttttataccagtctagggacaaaggagactgaacatctttgcagcaggataggctggtaatttgatcaaatttattcatcgccactaagtattctaaatacttttcaatggcttttctaacaacctcagtagtaatttgctgagcatcatccagaccattaatagaatcagcaaagcactggaatttcacactttaatgataatattccacatagtctatgggcaaatattttcaacatttccaatttttaaagcttcagaattgaagccaaacaaattaataaataattgttttaattactatttaaaaactcaggtttagattgtttaaaattagttgcttttgatactcagctgtcatgtttataattcaaacatgtagtaaacatatgtaggtaaggttgtttttttggagatgttgcagctcaaatttcagtccacatatgaatcatcagtgtattttccataaagtgattcgggcatatttgtgtgaaaacctcagttctgtcacttcttacctctataaacttggacgataatgtgccttctctgagactcagtttcttcctctg

SEQ ID NO: 33623 - DNA, 585 bp, Homo sapiens
catcaccctttttaacattgtttacacatcactgcctgttttagccatggggatttttgaccaggatgtgagtgaccagaacagcgtggactgtccccagctctacaaaccaggacagctgaatctgctttttaacaagcgtaaattttccatttgcgtgttgcatggaatctacacctcattagtccttttcttcatcccctatggggccttttacaacgtggctggagaagatgggcaacatattgctgactaccagtcctttgcagttaccatggccacatctttggtcattgtggtcagtgtgcaggtaacgctgtcggtgtaagcaccttaacttgatgggtttacaacttttactatttcattgttgattgattttgtctacttgttggggggaaataatcctaaaggaatactggggctgtccttttaagtacacattttgagatgaaagcaggaagctttaacataaattactggggagaattagcattaggcgtctgtaacattcatgttagtagaaacctcacaatgtatcacttctttgggttgtgcattgtatgtaaagagaaatgattatac

SEQ ID NO: 33624 - DNA, 484 bp, Homo sapiens
caggaagggtatacatcactttagagataaagaaactgccgtttagagagatctagtatcccattaaggcaccagagctgataagaggcaggtctaggaaagaattcatatttgtctgattccaaaagtcaactcccacccacctcagaaaacctggttatttaacctaaatgtgaatattctcactactatggatgatgtttctcacttatatgttatatttcttttcagactgtttatgaccagtggttcatcaccctttttaacattgtttacacatcactgcctgttttagccatggggatttttgaccaggtatgttttttttccatctttataacttagtttctcttttatgccttttagttttttgtgggttctaagtagaaaacacaattctaagtagcagccctaggaatgcagttgttttagttgcttttgcatggatcacacatgcttccaggtccactgtgcctcccttacc

SEQ ID NO: 33625 - DNA, 297 bp, Homo sapiens
ttttctttttgtaggtgtgtgtgcctcatctctgccctccatacctaagctgcctagaatcacatccagactttgggagcttttgggtcccatgtagtctcttgaaggaaaatgaggctgtgtggacagaatgtggtgttgctgtgtggggtgatggacaaggaactggactgggagccaaaagctcacctttctagtcctgtcaatcacacaattaaatgtggaagtagaagtggaagcactacaaaaatgattatacatgtcaagtggcaataataatttcatgctgtgactgtc

SEQ ID NO: 33626 - DNA, 2336 bp, Homo sapiens
cttttaatttttattttggcaaaactgtcaaatgagaaaaatgattttaaaaacttttttttcaattgacaagactttaagtcagggataacagtattaatgttctctgttctgtttccatgttaaatttaatttaacctggatagccacattaatgaattggtgctgtcaaaatatagtaatttttaaatttgttaataatgaaaacccttaagcatgcaggatgaggtatttgggttttttttttagatcgatcacatctacagaaaatggctaaaccaagttaacttttattatagacagtgaataaaacaccaaaaacccaaaaatgctttaaccacagtataaataatagattatacacatcatcttaataactatttttaagttatttaccatagcctctgtatagaccttaggaacagtgtttcagtgatctggcaccagtttatttggttctgctgacaattctgtatcacaaatgtgctacctggtttttgtccattagataattactctttataaggaaaggaaagagaagcagagttagttccagctctaatagggatcttcaaagttattttgtcttgatgtatgtaacagtaattctttacatcttttgatttttctcttcctttttattcactcttcccacgaatttaaatgtttaagttatattcatcactagcaaggatgataaacacttgtgcactgaaagctaacagggagaggttacacaatattttacagtttcttaaacataatttaatgcatcaccttccacttgctaacataccaagtcagttattttcaagggaagaaccttttaaattatggtcctccatttactacttccactgagagtatgctctcattcctcaggtgttttgagaaacatgactaataaccacacaattaagtagagtcattccaagtcctatggcctggaaattgtattccctataatatacaaattttcctgtaataaagtcaacttagaaactccaaggaggttacatgttttccaacatatcctaaaaactgtgatataagctaacatataatttgccttacgtcaaaagaatatgttttgttgcagctgattccagtttataatagatccctagtaaaaagctttgattcaacacaattgttcatcttcacatcccaaacagaatcactgtttcttgaatatatatttttgaagtttttttgtgcaatatattactaaatcagttattattttacttttccaaattcagagaaagaaaacagattacctgaattcatggaaaaggtggatcacctccctttttccaccttcaagcctttcctgtcctcatagccagcatgacttcttttaacttggattcctttgtatatagtaaagtttagtatatatatatttttttctttttgctactttctgaggcattatgtaaagggctcatactagatgttcagttaaatatactttagcacaaagtcaaactagagaatgtgttaaggagggaatgtatatgtcttggtagaccaggaggcctttgccagcaatttaagcaacagatgtgaatacttcacaaagctgtaaagaccattgtcttaaatactacaacaacttaacacccttttgtgaagatcacagcatttatctaagaaactgtgaggctttctggtttacatatatcttacaggtgtttttttgtatttttttttttttttagtttgaaatgtgtaagctttgatttaaaccaagtttacttcagtatgttaatgatgtagtaaaaatatttattgaaaggtgaattcgagtattttaatgttatacctgccattttttttcttaaagcatattctttgcatctaactgccagtgccattgtcaaaacttattttttaaatcgttgtacatttcttattaaactaagtgcttaattttaaagtattatgttgccatcatatagtgtataaaaatgtataattgccaattgattgtaactattatttatttttaaatgaaagtgtaagaatgctttctgattcaacaaatttgttatcaaactgtttccttatcctcttttctgatgtagcataaaaattgtcccggtttgagttataactgccagtagatgaccagtcacaagtgaaccacttctcagttgccaatctttgctcatattaaaaacaacttacaaatacttagtttttgtatctaatctctgattattaaaatgtttataaagtttatttttaccaaagagatgcaattcattatgagaaagtattgcataataaattttgttttataactttaaaaaaaaaaaatagaactagtc

SEQ ID NO: 33627 - DNA, 2282 bp, Homo sapiens
cttttaatttttattttggcaaaactgtcaaatgagaaaaatgattttaaaaacttttttttcaattgacaagactttaagtcagggataacagtattaatgttctctgttctgtttccatgttaaatttaatttaacctggatagccacattaatgaattggtgctgtcaaaatatagtaatttttaaatttgttaataatgaaaacccttaagcatgcaggatgaggtatttgggttttttttttagatcgatcacatctacagaaaatggctaaaccaagttaacttttattatagacagtgaataaaacaccaaaaacccaaaaatgctttaaccacagtataaataatagattatacacatcatcttaataactatttttaagttatttaccatagcctctgtatagaccttaggaacagtgtttcagtgatctggcaccagtttatttggttctgctgacaattctgtatcacaaatgtgctacctggtttttgtccattagataattactctttataaggaaaggaaagagaagcagagttagttccagctctaatagggatcttcaaagttattttgtcttgatgtatgtaacagtaattctttacatcttttgatttttctcttcctttttattcactcttcccacgaatttaaatgtttaagttatattcatcactagcaaggatgataaacacttgtgcactgaaagctaacagggagaggttacacaatattttacagtttcttaaacataatttaatgcatcaccttccacttgctaacataccaagtcagttattttcaagggaagaaccttttaaattatggtcctccatttactacttccactgagagtatgctctcattcctcaggtgttttgagaaacatgactaataaccacacaattaagtagagtcattccaagtcctatggcctggaaattgtattccctataatatacaaattttcctgtaataaagtcaacttagaaactccaaggaggttacatgttttccaacatatcctaaaaactgtgatataagctaacatataatttgccttacgtcaaaagaatatgttttgttgcagctgattccagtttataatagatccctagtaaaaagctttgattcaacacaattgttcatcttcacatcccaaacagaatcactgtttcttgaatatatatttttgaagtttttttgtgcaatatattactaaatcagttattattttacttttccaaattcagagaaagaaaacagattacctgaattcatggcagcatgacttcttttaacttggattcctttgtatatagtaaagtttagtatatatatatttttttctttttgctactttctgaggcattatgtaaagggctcatactagatgttcagttaaatatactttagcacaaagtcaaactagagaatgtgttaaggagggaatgtatatgtcttggtagaccaggaggcctttgccagcaatttaagcaacagatgtgaatacttcacaaagctgtaaagaccattgtcttaaatactacaacaacttaacacccttttgtgaagatcacagcatttatctaagaaactgtgaggctttctggtttacatatatcttacaggtgtttttttgtatttttttttttttttagtttgaaatgtgtaagctttgatttaaaccaagtttacttcagtatgttaatgatgtagtaaaaatatttattgaaaggtgaattcgagtattttaatgttatacctgccattttttttcttaaagcatattctttgcatctaactgccagtgccattgtcaaaacttattttttaaatcgttgtacatttcttattaaactaagtgcttaattttaaagtattatgttgccatcatatagtgtataaaaatgtataattgccaattgattgtaactattatttatttttaaatgaaagtgtaagaatgctttctgattcaacaaatttgttatcaaactgtttccttatcctcttttctgatgtagcataaaaattgtcccggtttgagttataactgccagtagatgaccagtcacaagtgaaccacttctcagttgccaatctttgctcatattaaaaacaacttacaaatacttagtttttgtatctaatctctgattattaaaatgtttataaagtttatttttaccaaagagatgcaattcattatgagaaagtattgcataataaattttgttttataactttaaaaaaaaaaaatagaactagtc

SEQ ID NO: 33628 - DNA, 1028 bp, Homo sapiens
acagatctagaaggatcccctctcagggacattaagtccagcatgacttcttttaacttggattcctttgtatatagtaaagtttagtatatatatatttttttctttttgctactttctgaggcattatgtaaagggctcatactagatgttcagttaaatatactttagcacaaagtcaaactagagaatgtgttaaggagggaatgtatatgtcttggtagaccaggaggcctttgccagcaatttaagcaacagatgtgaatacttcacaaagctgtaaagaccattgtcttaaatactacaacaacttaacacccttttgtgaagatcacagcatttatctaagaaactgtgaggctttctggtttacatatatcttacaggtgtttttttgtatttttttttttttttagtttgaaatgtgtaagctttgatttaaaccaagtttacttcagtatgttaatgatgtagtaaaaatatttattgaaaggtgaattcgagtattttaatgttatacctgccattttttttcttaaagcatattctttgcatctaactgccagtgccattgtcaaaacttattttttaaatcgttgtacatttcttattaaactaagtgcttaattttaaagtattatgttgccatcatatagtgtataaaaatgtataattgccaattgattgtaactattatttatttttaaatgaaagtgtaagaatgctttctgattcaacaaatttgttatcaaactgtttccttatcctcttttctgatgtagcataaaaattgtcccggtttgagttataactgccagtagatgaccagtcacaagtgaaccacttctcagttgccaatctttgctcatattaaaaacaacttacaaatacttagtttttgtatctaatctctgattattaaaatgtttataaagtttatttttaccaaagagatgcaattcattatgagaaagtattgcataataaattttgttttataactttaaaaaaaaaaaatagaactagtc

SEQ ID NO: 33629 - DNA, 307 bp, Homo sapiens
ctgaagcctggtggcccagaagcccaggtagaaggggccaagtttgtgttgaggaggaaaatgggtagttcctggcgactgactgcagctgcagaagggaaagaactggagtctccccaggagcgtgactgtgacccgctcctctcaattcaatgcttgggtgagcatctgtgacaggccaggcttgtcccatgtgcaagggacagccatgaacgggccagatgaggaatctcacagagctcccagcctgtgagggacaagcgggtgttaaacacatcgcaaagagagtgatgacttacgaattctt

SEQ ID NO: 33630 - DNA, 937 bp, Homo sapiens
taaagtccgtaagaggaaggtgactacgtatatcaaccatcatgacaaaatcaatggaaagaggaagaccgccagaaaacagaaaatgtttcaacgtgcgcaagagttgcggcggcgagcagaggactaccacaaatgcaaaatccccccttctgcaagaaaggctctttgcaactgggtcagaatggcggcagcggagcatcgtcattcttcaggattgccctactggccctacctcacagctgaaactttaaaaaacaggatgggccaccagccacctcctccaactcaacaacattctataactgataactccctgagcctcaagacacctcccgagtgtctgctcactccccttccaccctcagcggatgataatctcaagacacctcccgagtgtgtgctcactccccttccaccctcagcggatgataatctcaagacacctcccgagtgtgtgctcactccccttccaccctcagcggatgataatctcaagacacctcctgagtgtctgctcactccccttccaccctcagcggatgataatctcaagacacctcccgagtgtctgctcactccccttccaccctcagctctaccctcagctccaccctcagcggatgataatctcaagacacgtgccgagtgtctgctccatccccttccaccctcagcggatgataatctcaagacaccttccgagcgtcagctcactccccttccaccctcagctccaccctcagcagatgataatatcaagacacctgccgagcgtctgcgggggccgcttccaccctcagcggatgataatctcaagacaccttccgagcgtcagctcactccccttccaccctcagctccaccctcagcagatgataatatcaagacacctgccgagcgtctgcgggggccgcttccaccctcagcggatgat

SEQ ID NO: 33631 - DNA, 397 bp, Homo sapiens
ccaacaaacaaaaatgtataaatgacaaaaaattaaatctgctctttagaacttgataattcatgagaaaatgaaaatagtttccatcatcctttctcaggctgctgttttttatttgtctaagaagaaaagaaaatatgtcaaagcctatggtagtcactagggctgttcactgatgggcccacttatttatctccagccaatgggaggattgaacttccctggtaccttgaagtttgtgtggtcatatgacttgttctggccaatgagtgtgagtggaagtgatgaaacgtcagttcttaccagaaaatttaaatcgacattaggagaccctccataaccctcttttttttctccacagcatgttgatcctggatcaacatgctgtgggagagaa

SEQ ID NO: 33632 - DNA, 308 bp, Homo sapiens
cttctgcattatcaggtaaccacaggtaattcataaatattatccgtggaatttacttacttaatatctgtatgagtctttatattggcatgtgaggtttttcatagttcagtaaaagcttgactcagtcagagggatcacagaattacatgtttctttttcacccaccaacattttgttgaaaatcttgttaaagtgcattctttcttttttttgatgtactatatggaatgtaagaccattttttaaggtaataattggtagtgttaatatagtaacatagataaaatacaagggaatttgattta

SEQ ID NO: 33633 - DNA, 328 bp, Homo sapiens
taaaataacatgctataattgccagcgtgaagcaaagagtgcggtagcaataccagcctcagtatgaggcataaaattattctaaagttactagacaattatgttacaattattaataacagcttaatatttggaaatgttaagcaattatcccctgatttcttctttacctgttgacttttctcccaaatatgtcagttattctccaagatattcattgccactagaaagagggattatggtaagcgagcagttaaaacaataacaacaacaagaaagaaaaaccttgaatttccaaagtttagttcacaatattactcagtacaaa

SEQ ID NO: 33634 - DNA, 301 bp, Homo sapiens
ttatggctctttaaagatctagaagaccatcaactttatttgaatcatatgtcaaacacacacacacacacacacacacaaacacacacacacacacacccctacaaaacaatctgagaaatctgaacattgactggatatttgacagccttaggaatgattattaaagatgtgatcatagaattgtgattacatttttattcaacaggtttttggggaacaggtggtgtttggtgatgttaataagttatttattggtgatttctgagattttaatgcttccatcacccgagcagtgtac

SEQ ID NO: 33635 - DNA, 417 bp, Homo sapiens
gtttggtggagatggttgcttggtgtctcccctctgactctttcccttctccttctccatgggtaaattattcttccaaattctccctgtgttcaccattataactgttttctgctgcaatctttttctggaaagttccccccttcctacctcctgcccattcctcccaatcagttcagctcttgtgtgtgctggacagaaatccctcttggcagcctaggcaacatagcaagacccccaactctatatatttttttaaattagccagcatgataatgcacacctatagtcttatctactctggaggctgaggtgggaggatcacttgagcccagaagttaaaggctgcagtgagctatgatggcaccactgcattctagcctgggtgacggagcaagaccctgtctcaaaacaagc

SEQ ID NO: 33636 - DNA, 367 bp, Homo sapiens
tgtggaaattgacaactcattagccagtttatcatcaaaatcctcattgaaatgatcttcattaccactagtattttatttcaaatcagcaagaagatatttaaatatttttcgaatatgttcatgcgatttactcttcttcattagctagattattagacaatccaaagtctgcttattctctttcaaatgtatcatctcatcttaatgagttaattttggtatgatttgaaaatgtttttgttataatttgcttattgacagaataacttttatccattttatataggagttaattgggaaagttattttatgatgagtttgtaattgtatactctgaattattaaatatattcttaacaggcaa

SEQ ID NO: 33637 - DNA, 392 bp, Homo sapiens
gccagctacgtccctgaaatcatagagttaataggaaaccgcaagaaatacgggggctcctatagtgcggttagtggaagaaagcacattgtggtctgcggacacatcactctggagagtgtttccaacttcctgaaggactttctgcacaaggaccgggatgacgtcaatgtggagatcgtttttcttcacaacatctcccccaacctggagcttgaagctctgttcaaacgacattttactcaggtggaattttatcagggttccgtcctcaatccacatgatcttgcaagagtcaagatagagtcagcagatgcatgcctgatccttgccaacaagtactgcgctgacccggatgcggaggatgcctcgaatatcatgaggtaactctt

SEQ ID NO: 33638 - DNA, 937 bp, Homo sapiens
agtaaacaaatttttttaggggatcaggaaaagaaatagtgaacttgacaatggcattctttagttttcagtttggaatttaattggaaactcatttagattttaataaaaagggaataaatatatatcttgtatcatgtggatgccttaggctgtcagtaacagaacactccagtgaagaaaagatctcccagaacaagaagtccagaggaagggagagaaggaagacaggttcggggttggttaatttagtggctcactgatctaatcaaggaccccgacactttgcatctttatactctgccattctcagaatcttctctcatgattgtactctggctgtattgaatgcagactcaacagtgtcttatgaagaaatggaatatttcctcctgtacatctctttttgttagcaagacaacaatttcatggaaaccctccagtttttccctcaggtcctattgattaggattggggtcacttgcctttcttaaaccatctggcaaggggaatgagaccattatgattggcttgaaccaattaggagtcactctcctgggattggggagggccctgcctctaagtagttagctgcctgataattctgcaaaagctggcttctattagcaagggaggaggaggggaatgatgtagaataatgactattgtcaggccacagcatggggcattttacttacatttaaacataaggtaatacttagtttctgctacagaatttctaatacatgtacttaagagttttgctggctgggaacagtggctcatgcctgtggtcccagtgctttcagaggctgaggcaggaggatcgcttaagcccagcctcagacttctgtttgaggctgcagtgagctatgatagtaccactgcgtgccagcctgggcaacagagcaagaccctgtctcaaaattaaaaaaaa

SEQ ID NO: 33639 - DNA, 1366 bp, Homo sapiens
ctccccgctaagtgcgcaggctcctggaaagttgtcttcacttccgggccgcggtctagggcggctacgtgtgttgccatagcgaccattttgcattaactggttggtagcttctatcctgggggctgagcgactgcgggccagctcttcccctactccctctcggctccttgtggcccaaaggcctaaccggggtccggcggtctggcctagggatcttccccgttgcccctttggggcgggatggctgcggaagaagaagacgaggtggagtgggtagtggagagcatcgcggggttcctgcgaggcccagactggtccatccccatcttggactttgtggaacagaaatgtgaagtttttgatgatgaagaagaaagcaaattgacctatacagagattcatcaggaatacaaagaactagttgaaaagctgttagaaggttacctcaaagaaattggaattaatgaagatcaatttcaagaagcatgcacttctcctcttgcaaagacccatacatcacaggccattttgcaacctgtgttggcagcagaagattttactatctttaaagcaatgatggtccagaaaaacattgaaatgcagctgcaagccattcgaataattcaagagagaaatggtgtattacctgactgcttaaccgatggctctgatgtggtcagtgaccttgaacacgaagagatgaaaatcctgagggaagttcttagaaaatcaaaagaggaatatgaccaggaagaagaaaggaagaggaaaaaacagttatcagaggctaaaacagaagagcccacagtgcattccagtgaagctgcaataatgaataattcccaaggggatggtgaacattttgcacacccaccctcagaagttaaaatgcattttgctaatcagtcaatagaacctttgggaagaaaagtggaaaggtctgaaacttcctccctcccacaaaaaggcctgaagattcctggcttagagcatgcgagcattgaaggaccaatagcaaacttatcagtacttggaacagaagaacttcggcaacgagaacactatctcaagcagaagagagataagttgatgtccatgagaaaggatatgaggactaaacagatacaaaatatggagcagaaaggaaaacccactggggaggtagaggaaatgacagagaaaccagaaatgacagcagaggagaagcaaacattactaaagaggagattgcttgcagagaaactcaaagaagaagttattaataagtaataattaagaacaatttaacaaaatggaagttcaaattgtcttaaaaataaattatttagtccttacactgagccttttagtttcgaacactttt

SEQ ID NO: 33640 - DNA, 625 bp, Homo sapiens
ataggcactgaatatatgttgactgaatgactatgaggaaaaacaagtattattaacattagctcatttcggtaaacctagcctaacacttaaaatatttctcataatattctaattgctcttattgtctacttattgccagaagttaaaatgcattttgctaatcagtcaatagaacctttgggaagaaaagtggaaaggtctgaaacttcctccctcccacaaaaaggcctgaagattcctggcttagagcatgcgagcattgaaggaccaatagcaaacttatcagtacttggaacagaagaacttcggcaacgagaacactatctcaagcagaagagagataagttgatgtccatgagaaaggatatgaggactaaacagatacaaaatatggagcagaaaggaaaacccactggggaggtagaggaaatgacagagaaaccagaaatgacagcagaggagaagcaaacattactaaagaggagattgcttgcagagaaactcaaagaagaagttattaataagtaataattaagaacaatttaacaaaatggaagttcaaattgtcttaaaaataaattatttagtccttacactgagccttttagtttcgaacactttt

SEQ ID NO: 33641 - DNA, 993 bp, Homo sapiens
ctccccgctaagtgcgcaggctcctggaaagttgtcttcacttccgggccgcggtctagggcggctacgtgtgttgccatagcgaccattttgcattaactggttggtagcttctatcctgggggctgagcgactgcgggccagctcttcccctactccctctcggctccttgtggcccaaaggcctaaccggggtccggcggtctggcctagggatcttccccgttgcccctttggggcgggatggctgcggaagaagaagacgaggtggagtgggtagtggagagcatcgcggggttcctgcgaggcccagactggtccatccccatcttggactttgtggaacagaaatgtgaagtttttgatgatgaagaagaaagcaaattgacctatacagagattcatcaggaatacaaagaactagttgaaaagctgttagaaggttacctcaaagaaattggaattaatgaagatcaatttcaagaagcatgcacttctcctcttgcaaagacccatacatcacaggccattttgcaacctgtgttggcagcagaagattttactatctttaaagcaatgatggtccagaaaaacattgaaatgcagctgcaagccattcgaataattcaagagagaaatggtgtattacctgactgcttaaccgatggctctgatgtggtcagtgaccttgaacacgaagagatgaaaatcctgagggaagttcttagaaaatcaaaagaggaatatgaccaggaagaagaaaggaagaggaaaaaacaggtgcctacagaacatataacagaagtattttattgctgttatctcttattaagtttacacctagatcttactattaaaatttatacttatgtggaactacataattttaagtacaatgtaaatattgaccaataatattaatttgtcattacaaaaaaaaaagggggggggtaaagttcctgagggcaagtttgggtccagttttgtaaaggc

SEQ ID NO: 33642 - DNA, 1258 bp, Homo sapiens
ctccccgctaagtgcgcaggctcctggaaagttgtcttcacttccgggccgcggtctagggcggctacgtgtgttgccatagcgaccattttgcattaactggttggtagcttctatcctgggggctgagcgactgcgggccagctcttcccctactccctctcggctccttgtggcccaaaggcctaaccggggtccggcggtctggcctagggatcttccccgttgcccctttggggcgggatggctgcggaagaagaagacgaggtggagtgggtagtggagagcatcgcggggttcctgcgaggcccagactggtccatccccatcttggactttgtggaacagaaatgtgaagtttttgatgatgaagaagaaagcaaattgacctatacagagattcatcaggaatacaaagaactagttgaaaagctgttagaaggttacctcaaagaaattggaattaatgaagatcaatttcaagaagcatgcacttctcctcttgcaaagacccatacatcacaggccattttgcaacctgtgttggcagcagaagattttactatctttaaagcaatgatggtccagaaaaacattgaaatgcagctgcaagccattcgaataattcaagagagaaatggtaaaatgttgaagttagaaatctaagtactaaatgcatttttttttacagttttgactattctaatatggtcttaaatgtagctgtctcatgtacatttatttcaagtttgaaagacttcagctgacttgagattttagagtatatggctgggtgcagtggctcacgccttggcctcccaacgtggccggaagcagtggttcttaagctttagcaagcattggaaatggttggagggcttgctgaagcacatatggctgcctcccagtttctgatttaataggtctggggtaccgataatttgcatttttaacaatgatatggtttggctgtgtccccacccaaatctcatcttgaattcccacgtgttgtgggagggacccagtgggaggtaattgaattttgggggcaggtgttccccatgctgttcttgtgatagtgaataagtctcatgagatctgatggttttgggaaaggggagtcttcctgcacaagctctctctttgcctgctgtcatccatgtaagacgtgattgctcctgtttgtcttccgccatgattgtgaggcttccccagccatgtggaaatgtaagtccgattaaacctctttcctgtgtaa

SEQ ID NO: 33643 - DNA, 956 bp, Homo sapiens
ctccccgctaagtgcgcaggctcctggaaagttgtcttcacttccgggccgcggtctagggcggctacgtgtgttgccatagcgaccattttgcattaactggttggtagcttctatcctgggggctgagcgactgcgggccagctcttcccctactccctctcggctccttgtggcccaaaggcctaaccggggtccggcggtctggcctagggatcttccccgttgcccctttggggcgggatggctgcggaagaagaagacgaggtggagtgggtagtggagagcatcgcggggttcctgcgaggcccagactggtccatccccatcttggactttgtggaacagaaatgtgaagtttttgatgatgaagaagaaagcaaattgacctatacagagattcatcaggaatacaaagaactagttgaaaagctgttagaaggttacctcaaagaaattggaattaatgaagatcaatttcaagaagcatgcacttctcctcttgcaaagacccatacatcacaggtttttgctttgtgttattctgctaacatacagttttaacaaatgcccagggttaaacactcacttaaatttgaatgtttgattgacaaagtgtaatattttagacattgtgagaggtagaaagataattcatcacatatgagttctttttgagagcaaccctgaaaaatgataatttgaggcattaatgaactgatgcaactcaaagtgacctttctaaactcagaactagaataagatcacagggtttatacaaactactgttttatttacatagatctccaataattctgcagttgctccttttataattttagcagatccacagtcagtagttcctgctgctgcttccttctcttggaactacttgtattatcttactggttgtgtagtgctaggctgaagtagtaatacatatgttataaactaat

SEQ ID NO: 33644 - DNA, 467 bp, Homo sapiens
gtctgtttcacctgggcattctgaaatgttttatcatagagcagcatcagtaccacctttatcatagagcacatcagccaccacttcccagaggggttctccaagaagagactttacgaagaagagatttaggaaacctagtctatgtctgtctctccctccgtcccacaagaaggtgcccccgatttttgttcatttgaggcagtatgttgggaattttagacaaattaccctatttcatactgtagccaattttttctttttttttcaggaaatgacagagaaaccagaaatgacagcagaggagaagcaaacattactaaagaggagattgcttgcagagaaactcaaagaagaagttattaataagtaataattaagaacaatttaacaaaatggaagttcaaattgtcttaaaaataaattatttagtccttacactgagccttttagtttcgaacactttt

SEQ ID NO: 33645 - DNA, 681 bp, Homo sapiens
ataggcactgaatatatgttgactgaatgactatgaggaaaaacaagtattattaacattagctcatttcggtaaacctagcctaacacttaaaatatttctcataatattctaattgctcttattgtctacttattgccagaagttaaaatgcattttgctaatcagtcaatagaacctttgggaagaaaagtggaaaggtctgaaacttcctccctcccacaaaaaggcctgaagattcctggcttagagcatgcgagcattgaaggaccaatagcagtaagtaaacgacatcacttaagaactataagcaaaatgacaaggtactgggaaatcaaacttcgaattgaatcactcagtgggcatctgtgctacttactaaatggatttgaatttagatagctccttttcttacttgacccagaacttatcagtacttggaacagaagaacttcggcaacgagaacactatctcaagcagaagagagataagttgatgtccatgagaaaggatatgaggactaaacagatacaaaatatggagcagaaaggaaaacccactggggaggtagaggtatggctagccttaatatgtcaagatttacaaatctggtggtggaactatcaaaatcagaatatgtgcaagaaagcctctaataaattttgcttgcagacccattc

SEQ ID NO: 33646 - DNA, 1196 bp, Homo sapiens
accacggcccataacctctttaatggcttggcagcaggacctttcctttgattgtttcttgaagatatgagatctatagttcagttgtatcgttggctcttaagggcctggaacatgcaacaatagggcttccgttgttgcatggcaaacatgagaattttgcatggcccttactggggagtttcctcctcatttgactgatgtgagtagagactcttagagccagccaccatcataatcatctactagaatcccaagatgctttccccagcagctaatagcgctgttgtctgtgggtagggggaaaacaccaccctaaccctgaagaatccatgacatagtgctattactttgatgtgaataagtctggaaaatagtctctttctactgtggtttgctctataaaatccttgcctctgaattttcctgaaaactatgctttattctgacttacgggttagacaattttagtgtattacctgactgcttaaccgatggctctgatgtggtcagtgaccttgaacacgaagagatgaaaatcctgagggaagttcttagaaaatcaaaagaggaatatgaccaggaagaagaaaggaagaggaaaaaacagttatcagaggctaaaacagaagagcccacagtgcattccagtgaagctgcaataatgaataattcccaaggggatggtgaacattttgcacacccaccctcagaagttaaaatgcattttgctaatcagtcaatagaacctttgggaagaaaagtggaaaggtctgaaacttcctccctcccacaaaaaggcctgaagattcctggcttagagcatgcgagcattgaaggaccaatagcaaacttatcagtacttggaacagaagaacttcggcaacgagaacactatctcaagcagaagagagataagttgatgtccatgagaaaggatatgaggactaaacagatacaaaatatggagcagaaaggaaaacccactggggaggtagaggaaatgacagagaaaccagaaatgacagcagaggagaagcaaacattactaaagaggagattgcttgcagagaaactcaaagaagaagttattaataagtaataattaagaacaatttaacaaaatggaagttcaaattgtcttaaaaataaattatttagtccttacactgagccttttagtttcgaacactttt

SEQ ID NO: 33647 - DNA, 1511 bp, Homo sapiens
ctccccgctaagtgcgcaggctcctggaaagttgtcttcacttccgggccgcggtctagggcggctacgtgtgttgccatagcgaccattttgcattaactggttggtagcttctatcctgggggctgagcgactgcgggccagctcttcccctactccctctcggctccttgtggcccaaaggcctaaccggggtccggcggtctggcctagggatcttccccgttgcccctttggggcgggatggctgcggaagaagaagacgaggtggagtgggtagtggagagcatcgcggggttcctgcgaggcccagactggtccatccccatcttggactttgtggaacagaaatgtgaagtttttgatgatgaagaagaaagcaaattgacctatacagagattcatcaggaatacaaagaactagttgaaaagctgttagaaggttacctcaaagaaattggaattaatgaagatcaatttcaagaagcatgcacttctcctcttgcaaagacccatacatcacaggccattttgcaacctgtgttggcagcagaagattttactatctttaaagcaatgatggtccagaaaaacattgaaatgcagctgcaagccattcgaataattcaagagagaaatggtgtattacctgactgcttaaccgatggctctgatgtggtcagtgaccttgaacacgaagagatgaaaatcctgagggaagttcttagaaaatcaaaagaggaatatgaccaggaagaagaaaggaagaggaaaaaacagttatcagaggctaaaacagaagagcccacagtgcattccagtgaagctgcaataatgaataattcccaaggggatggtgaacattttgcacacccaccctcagaagttaaaatgcattttgctaatcagtcaatagaacctttgggaagaaaagtggaaaggtctgaaacttcctccctcccacaaaaaggcctgaagattcctggcttagagcatgcgagcattgaaggaccaatagcagtaagtaaacgacatcacttaagaactataagcaaaatgacaaggtactgggaaatcaaacttcgaattgaatcactcagtgggcatctgtgctacttactaaatggatttgaatttagatagctccttttcttacttgacccagaacttatcagtacttggaacagaagaacttcggcaacgagaacactatctcaagcagaagagagataagttgatgtccatgagaaaggatatgaggactaaacagatacaaaatatggagcagaaaggaaaacccactggggaggtagaggaaatgacagagaaaccagaaatgacagcagaggagaagcaaacattactaaagaggagattgcttgcagagaaactcaaagaagaagttattaataagtaataattaagaacaatttaacaaaatggaagttcaaattgtcttaaaaataaattatttagtccttacactgagccttttagtttcgaacactttt

SEQ ID NO: 33648 - DNA, 441 bp, Homo sapiens
ttctagaggatcccgtgcaccgtacttcctccctcccacaaaaaggcctgaagattcctggcttagagcatgcgagcattgaaggaccaatagcaaacttatcagtacttggaacagaagaacttcggcaacgagaacactatctcaagcagaagagagataagttgatgtccatgagaaaggatatgaggactaaacagatacaaaatatggagcagaaaggaaaacccactggggaggtagaggaaatgacagagaaaccagaaatgacagcagaggagaagcaaacattactaaagaggagattgcttgcagagaaactcaaagaagaagttattaataagtaataattaagaacaatttaacaaaatggaagttcaaattgtcttaaaaataaattatttagtccttacactgagccttttagtttcgaacactttt

SEQ ID NO: 33649 - DNA, 1068 bp, Homo sapiens
ctccccgctaagtgcgcaggctcctggaaagttgtcttcacttccgggccgcggtctagggcggctacgtgtgttgccatagcgaccattttgcattaactggttggtagcttctatcctgggggctgagcgactgcgggccagctcttcccctactccctctcggctccttgtggcccaaaggcctaaccggggtccggcggtctggcctagggatcttccccgttgcccctttggggcgggatggctgcggaagaagaagacgaggtggagtgggtagtggagagcatcgcggggttcctgcgaggcccagactggtccatccccatcttggactttgtggaacagaaatgtgaagtttttgatgatgaagaagaaagcaaattgacctatacagagattcatcaggaatacaaagaactagttgaaaagctgttagaaggttacctcaaagaaattggaattaatgaagatcaatttcaagaagcatgcacttctcctcttgcaaagacccatacatcacaggccattttgcaacctgtgttggcagcagaagattttactatctttaaagcaatgatggtccagaaaaacattgaaatgcagctgcaagccattcgaataattcaagagagaaatggtgtattacctgactgcttaaccgatggctctgatgtggtcagtgaccttgaacacgaagagatgaaaatcctgagggaagttcttagaaaatcaaaagaggaatatgaccaggaagaagaaaggaagaggaaaaaacaggtgcctacagaacatataacagaagtattttattgctgttatctcttattaagtttacacctagatcttactattaaaatttatacttatgtggaactacataattttaagtacaatgtaaatattgaccaataatattaatatatcaataattctatgtatgtcgtgcattactgctggccaccatattatatagtactatatatacttaactgtatatagtacaaacaccacatagtactaattaatcttacaggacatgcatataagcaagagtagtcatttttt

SEQ ID NO: 33650 - DNA, 851 bp, Homo sapiens
ctccccgctaagtgcgcaggctcctggaaagttgtcttcacttccgggccgcggtctagggcggctacgtgtgttgccatagcgaccattttgcattaactggttggtagcttctatcctgggggctgagcgactgcgggccagctcttcccctactccctctcggctccttgtggcccaaaggcctaaccggggtccggcggtctggcctagggatcttccccgttgcccctttggggcgggatggctgcggaagaagaagacgaggtggagtgggtagtggagagcatcgcggggttcctgcgaggcccagactggtccatccccatcttggactttgtggaacagaaatgtgaagtttttgatgatgaagaagaaagcaaattgacctatacagagattcatcaggaatacaaagaactagttgaaaagctgttagaaggttacctcaaagaaattggaattaatgaagatcaatttcaagaagcatgcacttctcctcttgcaaagacccatacatcacaggccattttgcaacctgtgttggcagcagaagattttactatctttaaagcaatgatggtccagaaaaacattgaaatgcagctgcaagccattcgaataattcaagagagaaatggtgtattacctgactgcttaaccgatggctctgatgtggtcagtgaccttgaacacgaagagatgaaaatcctgagggaagttcttaggtaccattctttaattgttttttaaatgaatcattattaatattatatgatctgtacatatgctttttgcccaacaaatatgaactaataaaattgctaaattctctactgaaaaccatcaaa

SEQ ID NO: 33651 - DNA, 643 bp, Homo sapiens
ctccccgctaagtgcgcaggctcctggaaagttgtcttcacttccgggccgcggtctagggcggctacgtgtgttgccatagcgaccattttgcattaactggttggtagcttctatcctgggggctgagcgactgcgggccagctcttcccctactccctctcggctccttgtggcccaaaggcctaaccggggtccggcggtctggcctagggatcttccccgttgcccctttggggcgggatggctgcggaagaagaagacgaggtggagtgggtagtggagagcatcgcggggttcctgcgaggcccagactggtccatccccatcttggactttgtggaacagaaatgtgaagtttttgatgatgaagaagaaagcaaattgacctatacagagattcatcaggaatacaaagaactagttgaaaagctgttagaaggttacctcaaagaaattggaattaatgaagatcaatttcaagaacaaacattactaaagaggagattgcttgcagagaaactcaaagaagaagttattaataagtaataattaagaacaatttaacaaaatggaagttcaaattgtcttaaaaataaattatttagtccttacactgagccttttagtttcgaacactttt

SEQ ID NO: 33652 - DNA, 668 bp, Homo sapiens
tgagacggagtctcgctctgttgctcaggctggagtgcagtggcatgatctcggcttactgcatgctctgccttgcgggtttacaccattctcctgcctcagccttctgagtagctgggactacaggcacctgccaccactccgggctaattttttgtatttttagtagagatggggtttcaccatgttagccaggatggtctcgatctcctgacctcgtgatccgcccgccttggcctcccaacgtggccggaagcagtggttcttaagctttagcaagcattggaaatggttggagggcttgctgaagcacatatggctgcctcccagtttctgatttaataggtctggggtaccgataatttgcatttttaacaatgatatggtttggctgtgtccccacccaaatctcatcttgaattcccacgtgttgtgggagggacccagtgggaggtaattgaattttgggggcaggtgttccccatgctgttcttgtgatagtgaataagtctcatgagatctgatggttttgggaaaggggagtcttcctgcacaagctctctctttgcctgctgtcatccatgtaagacgtgattgctcctgtttgtcttccgccatgattgtgaggcttccccagccatgtggaaatgtaagtccgattaaacctc

SEQ ID NO: 33653 - DNA, 662 bp, Homo sapiens
taatttagtggctcactgatctaatcaaggaccccgacactttgcatctttatactctgccattctcagaatcttctctcatgattgtactctggctgtattgaatgcagactcaacagtgtcttatgaagaaatggaatatttcctcctgtacatctctttttgttagcaagacaacaatttcatggaaaccctccagtttttccctcaggtcctattgattaggattggggtcacttgcctttcttaaaccatctggcaaggggaatgagaccattatgattggcttgaaccaattaggagtcactctcctgggattggggagggccctgcctctaagtagttagctgcctgataattctgcaaaagctggcttctattagcaagggaggaggaggggaatgatgtagaataatgactattgtcaggccacagcatggggcattttacttacatttaaacataaggtaatacttagtttctgctacagaatttctaatacatgtacttaagagttttgctggctgggaacagtggctcatgcctgtggtcccagtgctttcagaggctgaggcaggaggatcgcttaagcccagcctcagacttctgtttgaggctgcagtgagctatgatagtaccactgcgtgccagcctgggcaaca

SEQ ID NO: 33654 - DNA, 1675 bp, Homo sapiens
taactagtaaggcggggttaatggacgaggggggcgttgcggccgcaggtttgactcccgtgcggtgcggcccagcagccacaaagctcccgctgccattgctccctgtactcccgccgtcactgccgctgtccaacccctcccccggggcttgcgcggcggctcccacacccctcggcccgtgtacgcgctctgcacctgcctgcccgaaaacatgttgcagacaccagagagcagggggctcccggtcccgcaggccgagggggagaaggatggcggccatgatggtgagacccgggccccgaccgcctcgcaggagcgccccaaggaggagcttggcgccgggagggaggagggggctgcggagcccgccctcacccggaaaggcgcgagggccttggcggccaaatccttggcaaggcgcagggcctaccgccggctgaatcggacggtggcggagttggtgcagttcctcctggtgaaagacaagaagaagagtcccatcacacgctcggagatggtgaaatacgttattggagacttgaagattctgttcccggacatcatcgcaagggccgcagagcatctgcggtatgtctttggttttgagctgaaacagtttgaccgcaagcaccacacttacatcctgatcaacaaactaaaacctctggaggaggaggaggaggaggaggatctgggaggagatggccccagattgggtctgttaatgatgatcctgggccttatctatatgagaggtaatagcgccagggaggcccaggtctgggagatgctgcgtcggttgggggtgcaaccctcaaagtatcatttcctctttgggtatccgaagaggcttattatggaagattttgtgcagcagcgatatctcagttacaggcgggtgcctcacaccaatccaccagaatatgaattctcttggggtccccgaagcaacctggaaatcagcaagatggaagtcctggggttcgtggccaaactgcataagaaggaaccgcagcactggccagtgcagtaccgtgaggccctagcagacgaggccgacagggccagagccaaggccagagctgaagccagtatgagggccagggccagtgctagggccggcatccacctctggtgagggttggtgaaaagttggccagtgggtccccgtgaggacgaactactgtcctgagtcataagtaatatgggtggggcgagggtcttatttctgtagaaatcgtgtgactttaaggatttagattttgtatcttatgttttgtaacatttaataattactgttaaaatgctgtttgtaaatgagattggtctactttttcctgtaggattttattgtagagttttgctggttttgtaaaatggatggaagaactttgtatttatactgtgattttgaacagattatgcaacattggaaggaaggctgtactttgatggtttgaaggaactcagcagtatgatgatctggttccaggggaaaaaaatagctggttggtgtctagccccccaacacttttgtctgttgtgtataaaagaagaaagactggcatgtaccttcatttgcttagctatttgagtatctagagaaaaattaaaatgcaatgagttagcagtataccctggcacacttaataaattaaacatttgtggagca

SEQ ID NO: 33655 - DNA, 1706 bp, Homo sapiens
ccggaagtggcccctcgcgcgggcgcggactgaggctgcgcgccgcaggttccggctgctggcggcgttgcggccgcaggtttgactcccgtgcggtgcggcccagcagccacaaagctcccgctgccattgctccctgtactcccgccgtcactgccgctgtccaacccctcccccggggcttgcgcggcggctcccacacccctcggcccgtgtacgcgctctgcacctgcctgcccgaaaacatgttgcagacaccagagagcagggggctcccggtcccgcaggccgagggggagaaggatggcggccatgatggtgagacccgggccccgaccgcctcgcaggagcgccccaaggaggagcttggcgccgggagggaggagggggctgcggagcccgccctcacccggaaaggcgcgagggccttggcggccaaatccttggcaaggcgcagggcctaccgccggctgaatcggacggtggcggagttggtgcagttcctcctggtgaaagacaagaagaagagtcccatcacacgctcggagatggtgaaatacgttattggagacttgaagattctgttcccggacatcatcgcaagggccgcagagcatctgcggtatgtctttggttttgagctgaaacagtttgaccgcaagcaccacacttacatcctgatcaacaaactaaaacctctggaggaggaggaggaggaggaggatctgggaggagatggccccagattgggtctgttaatgatgatcctgggccttatctatatgagaggtaatagcgccagggaggcccaggtctgggagatgctgcgtcggttgggggtgcaaccctcaaagtatcatttcctctttgggtatccgaagaggcttattatggaagattttgtgcagcagcgatatctcagttacaggcgggtgcctcacaccaatccaccagaatatgaattctcttggggtccccgaagcaacctggaaatcagcaagatggaagtcctggggttcgtggccaaactgcataagaaggaaccgcagcactggccagtgcagtaccgtgaggccctagcagacgaggccgacagggccagagccaaggccagagctgaagccagtatgagggccagggccagtgctagggccggcatccacctctggtgagggttggtgaaaagttggccagtgggtccccgtgaggacgaactactgtcctgagtcataagtaatatgggtggggcgagggtcttatttctgtagaaatcgtgtgactttaaggatttagattttgtatcttatgttttgtaacatttaataattactgttaaaatgctgtttgtaaatgagattggtctactttttcctgtaggattttattgtagagttttgctggttttgtaaaatggatggaagaactttgtatttatactgtgattttgaacagattatgcaacattggaaggaaggctgtactttgatggtttgaaggaactcagcagtatgatgatctggttccaggggaaaaaaatagctggttggtgtctagccccccaacacttttgtctgttgtgtataaaagaagaaagactggcatgtaccttcatttgcttagctatttgagtatctagagaaaaattaaaatgcaatgagttagcagtataccctggcacacttaataaattaaacatttgtggagca

SEQ ID NO: 33656 - DNA, 2690 bp, Homo sapiens
ccggaagtggcccctcgcgcgggcgcggactgaggctgcgcgccgcaggttccggctgctggcggcgttgcggccgcaggtttgactcccgtgcggtgcggcccagcagccacaaagctcccgctgccattgctccctgtactcccgccgtcactgccgctgtccaacccctcccccggggcttgcgcggcggctcccacacccctcggcccgtgtacgcgctctgcacctgcctgcccgaaaacatgttgcagacaccagagagcagggggctcccggtcccgcaggccgagggggagaaggatggcggccatgatggtgagacccgggccccgaccgcctcgcaggagcgccccaaggaggagcttggcgccgggagggaggagggggctgcggagcccgccctcacccggaaaggcgcgagggccttggcggccaaatccttggcaaggcgcagggcctaccgccggctgaatcggacggtggcggagttggtgcagttcctcctggtgaaagacaagaagaagagtcccatcacacgctcggagatggtgaaatacgttattggagacttgaagattctgttcccggacatcatcgcaagggccgcagagcatctgcggtatgtctttggttttgagctgaaacagtttgaccgcaagcaccacacttacatcctgatcaacaaactaaaacctctggaggaggaggaggaggaggaggatctgggaggagatggccccagattgggtctgttaatgatgatcctgggccttatctatatgagaggtaatagcgccagggaggcccaggtctgggagatgctgcgtcggttgggggtgcaaccctcaaagtatcatttcctctttgggtatccgaagaggcttattatggaagattttgtgcagcagcgatatctcagttacaggcgggtgcctcacaccaatccaccagaatatgaattctcttggggtccccgaagcaacctggaaatcagcaagatggaagtcctggggttcgtggccaaactgcataagaaggaaccgcagcactggccagtgcagtaccgtgaggccctagcagacgaggccgacagggccagagccaaggccagagctgaagccagtatgagggccagggccagtgctagggccggcatccacctctggtgagggttggtgaaaagttggccagtgggtccccgtgaggacgaactactgtcctgagtcataagtaatatgggtggggcgagggtcttatttctgtagaaatcgtgtgactttaaggatttagattttgtatcttatgttttgtaacatttaataattactgttaaaatgctgtttgtaaatgagattggtctactttttcctgtaggattttattgtagagttttgctggttttgtaaaatggatggaagaactttgtatttatactgtgattttgaacagattatgcaacattggaaggaaggctgtactttgatggtttgaaggaactcagcagtatgatgatctggttccaggggaaaaaaatagctggttggtgtctagccccccaacacttttgtctgttgtgtataaaagaagaaagactggcatgtaccttcatttgcttagctatttgagtatctagagaaaaattaaaatgcaatgagttagcagtataccctggcacacttaataaattaaacatttgtggagcaaaaaaaaaaaaaaaaaaaaaaaaaaaaaaaaaaaaaaaaaaaaaaaaaaaaaaaaaaaaaaaaaaaaaaaaagaagaagagaaagaaaagaaaaagaacgacagaaggaacacggaaacaaaaagaagaacacacaacgacgtcaatcaccaaacacagacggaccaccaacacagaccgacgacacaatacacgaaggcagagcccgaaccgtcagaacacaaacgccgccgcccgacgcacacacaggcaacgcaaccacgccgtcgcagagacagcgcccgtacagcggagcacaaccagggacggaagacaacaccagcaaacagcaagacagagacacacttgaaagagctacaaaacaagcacgacagcacgatccaggcggagcaacaacacatagagccgtagtcagcggcaggaaagtacacaatgagcggactcaagacaatgagaaaccctagaagagcaacagtactcaatacagcagaacgaatatgtcataacgatacgccgatcaaaaaagataatgtgcaagtccagacggtgcacacgtaacacaagacgcgcaaacaagccttgacagcgaaagtggaagagaaggggaagaggaggagaggaggagagggagaggcgtgaagtggagggagttacgttgcagatgccatgaggagggcatgaatcgcgttgagagatggctggtagagagagttgctgatggagatggtgtgtgttggtcgagccataggggaggagagcaggcgaggtgagaagagacgtgcgcaggcgtgaagcgggttgcgttgagtgcggggagagagataaggaaaggattcggagcgaagtagaggaggaaagcggaggagtggagtgcggtacatagcctggtgagcagctggagatcagcggtgagcttgatgatggatagatgggagcgaggaaggagggagttggagagggtatggtgagtgcagcgagcatggg

SEQ ID NO: 33657 - DNA, 1610 bp, Homo sapiens
aagattggctaggtcgaggctgggtggctgccattgctccctgtactcccgccgtcactgccgctgtccaacccctcccccggggcttgcgcggcggctcccacacccctcggcccgtgtacgcgctctgcacctgcctgcccgaaaacatgttgcagacaccagagagcagggggctcccggtcccgcaggccgagggggagaaggatggcggccatgatggtgagacccgggccccgaccgcctcgcaggagcgccccaaggaggagcttggcgccgggagggaggagggggctgcggagcccgccctcacccggaaaggcgcgagggccttggcggccaaatccttggcaaggcgcagggcctaccgccggctgaatcggacggtggcggagttggtgcagttcctcctggtgaaagacaagaagaagagtcccatcacacgctcggagatggtgaaatacgttattggagacttgaagattctgttcccggacatcatcgcaagggccgcagagcatctgcggtatgtctttggttttgagctgaaacagtttgaccgcaagcaccacacttacatcctgatcaacaaactaaaacctctggaggaggaggaggaggaggaggatctgggaggagatggccccagattgggtctgttaatgatgatcctgggccttatctatatgagaggtaatagcgccagggaggcccaggtctgggagatgctgcgtcggttgggggtgcaaccctcaaagtatcatttcctctttgggtatccgaagaggcttattatggaagattttgtgcagcagcgatatctcagttacaggcgggtgcctcacaccaatccaccagaatatgaattctcttggggtccccgaagcaacctggaaatcagcaagatggaagtcctggggttcgtggccaaactgcataagaaggaaccgcagcactggccagtgcagtaccgtgaggccctagcagacgaggccgacagggccagagccaaggccagagctgaagccagtatgagggccagggccagtgctagggccggcatccacctctggtgagggttggtgaaaagttggccagtgggtccccgtgaggacgaactactgtcctgagtcataagtaatatgggtggggcgagggtcttatttctgtagaaatcgtgtgactttaaggatttagattttgtatcttatgttttgtaacatttaataattactgttaaaatgctgtttgtaaatgagattggtctactttttcctgtaggattttattgtagagttttgctggttttgtaaaatggatggaagaactttgtatttatactgtgattttgaacagattatgcaacattggaaggaaggctgtactttgatggtttgaaggaactcagcagtatgatgatctggttccaggggaaaaaaatagctggttggtgtctagccccccaacacttttgtctgttgtgtataaaagaagaaagactggcatgtaccttcatttgcttagctatttgagtatctagagaaaaattaaaatgcaatgagttagcagtataccctggcacacttaataaattaaacatttgtggagca

SEQ ID NO: 33658 - DNA, 1626 bp, Homo sapiens
aacaagctcaagtacgaggccgggtgttcaatcgagagcgagggcgccattgctccctgtactcccgccgtcactgccgctgtccaacccctcccccggggcttgcgcggcggctcccacacccctcggcccgtgtacgcgctctgcacctgcctgcccgaaaacatgttgcagacaccagagagcagggggctcccggtcccgcaggccgagggggagaaggatggcggccatgatggtgagacccgggccccgaccgcctcgcaggagcgccccaaggaggagcttggcgccgggagggaggagggggctgcggagcccgccctcacccggaaaggcgcgagggccttggcggccaaatccttggcaaggcgcagggcctaccgccggctgaatcggacggtggcggagttggtgcagttcctcctggtgaaagacaagaagaagagtcccatcacacgctcggagatggtgaaatacgttattggagacttgaagattctgttcccggacatcatcgcaagggccgcagagcatctgcggtatgtctttggttttgagctgaaacagtttgaccgcaagcaccacacttacatcctgatcaacaaactaaaacctctggaggaggaggaggaggaggaggatctgggaggagatggccccagattgggtctgttaatgatgatcctgggccttatctatatgagaggtaatagcgccagggaggcccaggtctgggagatgctgcgtcggttgggggtgcaaccctcaaagtatcatttcctctttgggtatccgaagaggcttattatggaagattttgtgcagcagcgatatctcagttacaggcgggtgcctcacaccaatccaccagaatatgaattctcttggggtccccgaagcaacctggaaatcagcaagatggaagtcctggggttcgtggccaaactgcataagaaggaaccgcagcactggccagtgcagtaccgtgaggccctagcagacgaggccgacagggccagagccaaggccagagctgaagccagtatgagggccagggccagtgctagggccggcatccacctctggtgagggttggtgaaaagttggccagtgggtccccgtgaggacgaactactgtcctgagtcataagtaatatgggtggggcgagggtcttatttctgtagaaatcgtgtgactttaaggatttagattttgtatcttatgttttgtaacatttaataattactgttaaaatgctgtttgtaaatgagattggtctactttttcctgtaggattttattgtagagttttgctggttttgtaaaatggatggaagaactttgtatttatactgtgattttgaacagattatgcaacattggaaggaaggctgtactttgatggtttgaaggaactcagcagtatgatgatctggttccaggggaaaaaaatagctggttggtgtctagccccccaacacttttgtctgttgtgtataaaagaagaaagactggcatgtaccttcatttgcttagctatttgagtatctagagaaaaattaaaatgcaatgagttagcagtataccctggcacacttaataaattaaacatttgtggagca

SEQ ID NO: 33659 - DNA, 1440 bp, Homo sapiens
taactagtaaggcggggttaatggacgaggggggcgttgcggccgcaggtttgactcccgtgcggtgcggcccagcagccacaaagctcccgctgccattgctccctgtactcccgccgtcactgccgctgtccaacccctccccggaaaggcgcgagggccttggcggccaaatccttggcaaggcgcagggcctaccgccggctgaatcggacggtggcggagttggtgcagttcctcctggtgaaagacaagaagaagagtcccatcacacgctcggagatggtgaaatacgttattggagacttgaagattctgttcccggacatcatcgcaagggccgcagagcatctgcggtatgtctttggttttgagctgaaacagtttgaccgcaagcaccacacttacatcctgatcaacaaactaaaacctctggaggaggaggaggaggaggaggatctgggaggagatggccccagattgggtctgttaatgatgatcctgggccttatctatatgagaggtaatagcgccagggaggcccaggtctgggagatgctgcgtcggttgggggtgcaaccctcaaagtatcatttcctctttgggtatccgaagaggcttattatggaagattttgtgcagcagcgatatctcagttacaggcgggtgcctcacaccaatccaccagaatatgaattctcttggggtccccgaagcaacctggaaatcagcaagatggaagtcctggggttcgtggccaaactgcataagaaggaaccgcagcactggccagtgcagtaccgtgaggccctagcagacgaggccgacagggccagagccaaggccagagctgaagccagtatgagggccagggccagtgctagggccggcatccacctctggtgagggttggtgaaaagttggccagtgggtccccgtgaggacgaactactgtcctgagtcataagtaatatgggtggggcgagggtcttatttctgtagaaatcgtgtgactttaaggatttagattttgtatcttatgttttgtaacatttaataattactgttaaaatgctgtttgtaaatgagattggtctactttttcctgtaggattttattgtagagttttgctggttttgtaaaatggatggaagaactttgtatttatactgtgattttgaacagattatgcaacattggaaggaaggctgtactttgatggtttgaaggaactcagcagtatgatgatctggttccaggggaaaaaaatagctggttggtgtctagccccccaacacttttgtctgttgtgtataaaagaagaaagactggcatgtaccttcatttgcttagctatttgagtatctagagaaaaattaaaatgcaatgagttagcagtataccctggcacacttaataaattaaacatttgtggagca

SEQ ID NO: 33660 - DNA, 1620 bp, Homo sapiens
ccggaagtggcccctcgcgcgggcgcggactgaggctgcgcgccgcaggttccggctgctggcggcgttgcggccgcaggtttgactcccgtgcggtgcggcccagcagccacaaagctcccgctgccattgctccctgtactcccgccgtcactgccgctgtccaacccctcccccggggcttgcgcggcggctcccacacccctcggcccgtgtacgcgctctgcacctgcctgcccgaaaacatgttgcagacaccagagagcagggggctcccggtcccgcaggccgagggggagaaggatggcggccatgatggtgagacccgggccccgaccgcctcgcaggagcgccccaaggaggagcttggcgccgggagggaggagggggctgcggagcccgccctcacccggaaaggcgcgagggccttggcggccaaatccttggcaaggcgcagggcctaccgccggctgaatcggacggtggcggagttggtgcagttcctcctggtgaaagacaagaagaagagtcccatcacacgctcggagatggtgaaatacgttattggagacttgaagattctgttcccggacatcatcgcaagggccgcagagcatctgcggtatgtctttggttttgagctgaaacagtttgaccgcaagcaccacacttacatcctgatcaacaaactaaaacctctggaggaggaggaggaggaggaggatctgggaggagatgctgcgtcggttgggggtgcaaccctcaaagtatcatttcctctttgggtatccgaagaggcttattatggaagattttgtgcagcagcgatatctcagttacaggcgggtgcctcacaccaatccaccagaatatgaattctcttggggtccccgaagcaacctggaaatcagcaagatggaagtcctggggttcgtggccaaactgcataagaaggaaccgcagcactggccagtgcagtaccgtgaggccctagcagacgaggccgacagggccagagccaaggccagagctgaagccagtatgagggccagggccagtgctagggccggcatccacctctggtgagggttggtgaaaagttggccagtgggtccccgtgaggacgaactactgtcctgagtcataagtaatatgggtggggcgagggtcttatttctgtagaaatcgtgtgactttaaggatttagattttgtatcttatgttttgtaacatttaataattactgttaaaatgctgtttgtaaatgagattggtctactttttcctgtaggattttattgtagagttttgctggttttgtaaaatggatggaagaactttgtatttatactgtgattttgaacagattatgcaacattggaaggaaggctgtactttgatggtttgaaggaactcagcagtatgatgatctggttccaggggaaaaaaatagctggttggtgtctagccccccaacacttttgtctgttgtgtataaaagaagaaagactggcatgtaccttcatttgcttagctatttgagtatctagagaaaaattaaaatgcaatgagttagcagtataccctggcacacttaataaattaaacatttgtggagca

SEQ ID NO: 33661 - DNA, 1220 bp, Homo sapiens
ttctgttcccggacatcatcttcaagtctccaataacgtatttcaccatctccgagcgtgtgatggtgaaatacgttattggagacttgaagattctgttcccggacatcatcgcaagggccgcagagcatctgcggtatgtctttggttttgagctgaaacagtttgaccgcaagcaccacacttacatcctgatcaacaaactaaaacctctggaggaggaggaggaggaggaggatctgggaggagatggccccagattgggtctgttaatgatgatcctgggccttatctatatgagaggtaatagcgccagggaggcccaggtctgggagatgctgcgtcggttgggggtgcaaccctcaaagtatcatttcctctttgggtatccgaagaggcttattatggaagattttgtgcagcagcgatatctcagttacaggcgggtgcctcacaccaatccaccagaatatgaattctcttggggtccccgaagcaacctggaaatcagcaagatggaagtcctggggttcgtggccaaactgcataagaaggaaccgcagcactggccagtgcagtaccgtgaggccctagcagacgaggccgacagggccagagccaaggccagagctgaagccagtatgagggccagggccagtgctagggccggcatccacctctggtgagggttggtgaaaagttggccagtgggtccccgtgaggacgaactactgtcctgagtcataagtaatatgggtggggcgagggtcttatttctgtagaaatcgtgtgactttaaggatttagattttgtatcttatgttttgtaacatttaataattactgttaaaatgctgtttgtaaatgagattggtctactttttcctgtaggattttattgtagagttttgctggttttgtaaaatggatggaagaactttgtatttatactgtgattttgaacagattatgcaacattggaaggaaggctgtactttgatggtttgaaggaactcagcagtatgatgatctggttccaggggaaaaaaatagctggttggtgtctagccccccaacacttttgtctgttgtgtataaaagaagaaagactggcatgtaccttcatttgcttagctatttgagtatctagagaaaaattaaaatgcaatgagttagcagtataccctggcacacttaataaattaaacatttgtggagca

SEQ ID NO: 33662 - DNA, 1061 bp, Homo sapiens
  misc_feature (43)..(43): n is a, c, g, or t
gccggaccttcaaagcggagatgctgattggactggtgtgccnagctggcggtataggctgaaggcgaactcagccaggttgggggcgatcttgttgaaggttgggtgatcctgatcatggtgggatgtatctgtcttctgggcagcatctccgctttggaaattccaaagcggagatgctgcgtcggttgggggtgcaaccctcaaagtatcatttcctctttgggtatccgaagaggcttattatggaagattttgtgcagcagcgatatctcagttacaggcgggtgcctcacaccaatccaccagaatatgaattctcttggggtccccgaagcaacctggaaatcagcaagatggaagtcctggggttcgtggccaaactgcataagaaggaaccgcagcactggccagtgcagtaccgtgaggccctagcagacgaggccgacagggccagagccaaggccagagctgaagccagtatgagggccagggccagtgctagggccggcatccacctctggtgagggttggtgaaaagttggccagtgggtccccgtgaggacgaactactgtcctgagtcataagtaatatgggtggggcgagggtcttatttctgtagaaatcgtgtgactttaaggatttagattttgtatcttatgttttgtaacatttaataattactgttaaaatgctgtttgtaaatgagattggtctactttttcctgtaggattttattgtagagttttgctggttttgtaaaatggatggaagaactttgtatttatactgtgattttgaacagattatgcaacattggaaggaaggctgtactttgatggtttgaaggaactcagcagtatgatgatctggttccaggggaaaaaaatagctggttggtgtctagccccccaacacttttgtctgttgtgtataaaagaagaaagactggcatgtaccttcatttgcttagctatttgagtatctagagaaaaattaaaatgcaatgagttagcagtataccctggcacacttaataaattaaacatttgtggagca

SEQ ID NO: 33663 - DNA, 2895 bp, Homo sapiens
gccagaaatcttcccagtagagatcaccatccgcccccgacccccaagaatacttaaggggtgggtccttcccatcaagctgatttctcaacgagagggacaatcccagcttccccaacattgcagagcccaaacatgtggaagagttggaagctccgcacagatgtcagagtaagggagggggcaggcggttctccttgtgcctcttcccagcccggtagcaggggcccatgcttcctccctggtctgtcctcgcaggaggtgtccaggcggaggcagttcctgcgggagcatgcggcccccttctccgccttcctcacagacagcttcggccggcagcacagctacctgcggatctccctcacagagaagtgcaacctcagatgtcagtactgcatgcccgaggagggggtcccgctgacccccaaagccaacctgctgaccacagaggagatcctgaccctcgcccggctctttgtgaaggaaggcatcgacaagatccggctcacaggtggagagccgcttatccggccggacgtggtggacattgtggcccagctccagcggctggaagggctgagaaccataggtgttaccaccaatggcatcaacctggcccggctactgccccagcttcagaaggctggtctcagtgccatcaacatcagcctggacaccctggtgcctgccaagtttgagttcattgtccgcaggaaaggcttccacaaggtcatggagggcatccacaaggccatcgagctgggctacaaccctgtgaaggtgaactgtgtggtgatgcgaggccttaacgaggatgaactcctggactttgcggccttgactgagggcctccccctggatgtgcgcttcatagagtatatgccctttgatggcaacaagtggaacttcaagaagatggtcagctataaggagatgctagacactgtccggcagcagtggccagagctggagaaggtgccagaggaggaatccagcacagccaaggcctttaaaatccctggcttccaaggccagatcagcttcatcacatccatgtctgagcatttctgtgggacctgcaaccgcctgcgaatcacagctgatgggaacctcaaggtctgcctctttggaaactctgaggtatccctgcgggatcacctgcgagctggggcctctgagcaggagctgctgagaatcattggggctgctgtgggcaggaagaagcggcagcatgcaggcatgttcagtatttcccagatgaagaaccggcccatgatcctcatcggtgggtgacccatcaagttatttttgatgttccccaattccccaccagccaatccaagcattttctcctgggacccgctccatgttcagggtctaagacccagaatgagtttctccagccaggtggccactttatggaaaggatgcagggtcccccagacccctcctctagcccagcagcggctggggtctggctcctttcagagacactacacttcccgtgcagactcagatgccaactcaaagtgccttagcccaggttcctgggcttctgctgccccctcaggaccccagctaacctcagaacaactaactcatgtggactcggaaggacgggcagctatggtagatgtgggcaggaagccagacacagagcgggtggctgtggcttcagccgtggtcctcctgggaccggtagccttcaagcttgtccagcagaaccagctcaagaaaggagatgccctagtggtggcccagctggctggagtccaggcagccaaggtgaccagccagctgatccctctgtgccaccacgtggccctgagccacatccaggtgcagctggagctggacagcacacgccatgccgtgaagatccaggcatcttgccgggctcggggccccaccggggtggagatggaggccctgacctctgctgcagtggccgccctcaccctgtatgacatgtgcaaggctgtcagcagggacatcgtgttggaggagatcaagctcattagcaagactggtggtcagcggggggacttccatcgggcttagcacctgcccttctcacccatggcccacccaggcctggagctgggatgcaatgtaggctgagggaaagacgtcaggttcctttaatcacagtcactgtttgtttaccttgagcagtaaacccgaagtcagcctgctctactactaacaaacaggcctgctgctagatgatctctaatgaccaatggggcttcctttctatagggaggataccagcaggcccttaagccttccaggacactaaggtcgtgggagcgggactgcaacaagcaatgccagataactgagaaatcatgttctttgtggactatttcagacaaccaggttccgacagtccagcccagaacttttccttctcattttgggttttctcttctcctgctttcctggggagagattaagcgctcattaagcagaggagcccactttgaggagagcaaagcacaagcttgcctgaagaatggatcccaacttctccccggcagctctgcctccctaagtctgtgaagccgcagccctgccctgtcctgtcctgtcctgacttcatctctccttctgcccaagtctgtgtcccatcagacttgcagcctttcagcttaacagttgcccggtcctgctggccccttttcctctggcccccctcttctgaaacaggatgtgcacacatgggccatagccctaaggactcctgccagaccacacagcccacacctggccctgttcacggctgttccacccacccctctttattctggagcatatcagggaaagaaaagttgatgatagattgccttcaccctcacagcgcacaaataaagctacgatgccaactttgca

SEQ ID NO: 33664 - DNA, 3057 bp, Homo sapiens
ctgcccctccccgcccttgctgggatgaccccgggggcgagtgcccggccagtgtgctcccgaagcgggctgcggttccgctcgtatcaggcttcatggcggcgcggccactgtcccggatgctgcggcggcttctgaggtccagcgcccggagctgcagctcaggggctccggtgacccagccctgccccggggagtccgcgcgagctgcctcggaggaggtgtccaggcggaggcagttcctgcgggagcatgcggcccccttctccgccttcctcacagacagcttcggccggcagcacagctacctgcggatctccctcacagagaagtgcaacctcagatgtcagtactgcatgcccgaggagggggtcccgctgacccccaaagccaacctgctgaccacagaggagatcctgaccctcgcccggctctttgtgaaggaaggcatcgacaagatccggctcacaggtggagagccgcttatccggccggacgtggtggacattgtggcccagctccagcggctggaagggctgagaaccataggtgttaccaccaatggcatcaacctggcccggctactgccccagcttcagaaggctggtctcagtgccatcaacatcagcctggacaccctggtgcctgccaagtttgagttcattgtccgcaggaaaggcttccacaaggtcatggagggcatccacaaggccatcgagctgggctacaaccctgtgaaggtgaactgtgtggtgatgcgaggccttaacgaggatgaactcctggactttgcggccttgactgagggcctccccctggatgtgcgcttcatagagtatatgccctttgatggcaacaagtggaacttcaagaagatggtcagctataaggagatgctagacactgtccggcagcagtggccagagctggagaaggtgccagaggaggaatccagcacagccaaggcctttaaaatccctggcttccaaggccagatcagcttcatcacatccatgtctgagcatttctgtgggacctgcaaccgcctgcgaatcacagctgatgggaacctcaaggtctgcctctttggaaactctgaggtatccctgcgggatcacctgcgagctggggcctctgagcaggagctgctgagaatcattggggctgctgtgggcaggaagaagcggcagcatgcaggcatgttcagtatttcccagatgaagaaccggcccatgatcctcatcggtgggtgacccatcaagttatttttgatgttccccaattccccaccagccaatccaagcattttctcctgggacccgctccatgttcagggtctaagacccagaatgagtttctccagccaggtggccactttatggaaaggatgcagggtcccccagacccctcctctagcccagcagcggctggggtctggctcctttcagagacactacacttcccgtgcagactcagatgccaactcaaagtgccttagcccaggttcctgggcttctgctgccccctcaggaccccagctaacctcagaacaactaactcatgtggactcggaaggacgggcagctatggtagatgtgggcaggaagccagacacagagcgggtggctgtggcttcagccgtggtcctcctgggaccggtagccttcaagcttgtccagcagaaccagctcaagaaaggagatgccctagtggtggcccagctggctggagtccaggcagccaaggtgaccagccagctgatccctctgtgccaccacgtggccctgagccacatccaggtgcagctggagctggacagcacacgccatgccgtgaagatccaggcatcttgccgggctcggggccccaccggggtggagatggaggccctgacctctgctgcagtggccgccctcaccctgtatgacatgtgcaaggctgtcagcagggacatcgtgttggaggagatcaagctcattagcaagactggtggtcagcggggggacttccatcgggcttagcacctgcccttctcacccatggcccacccaggcctggagctgggatgcaatgtaggctgagggaaagacgtcaggttcctttaatcacagtcactgtttgtttaccttgagcagtaaacccgaagtcagcctgctctactactaacaaacaggcctgctgctagatgatctctaatgaccaatggggcttcctttctatagggaggataccagcaggcccttaagccttccaggacactaaggtcgtgggagcgggactgcaacaagcaatgccagataactgagaaatcatgttctttgtggactatttcagacaaccaggttccgacagtccagcccagaacttttccttctcattttgggttttctcttctcctgctttcctggggagagattaagcgctcattaagcagaggagcccactttgaggagagcaaagcacaagcttgcctgaagaatggatcccaacttctccccggcagctctgcctccctaagtctgtgaagccgcagccctgccctgtcctgtcctgtcctgacttcatctctccttctgcccaagtctgtgtcccatcagacttgcagcctttcagcttaacagttgcccggtcctgctggccccttttcctctggcccccctcttctgaaacaggatgtgcacacatgggccatagccctaaggactcctgccagaccacacagcccacacctggccctgttcacggctgttccacccacccctctttattctggagcatatcagggaaagaaaagttgatgatagattgccttcaccctcacagcgcacaaataaagctacgatgccaactttgcagatgcaagaatgaagacactgtgtgggtagggcactgagctgctgcagtttcacagggaaggctgcacctatcaatcaatcaatcaatcctatcccaagacacagttccctgagggaagaagaggagggacctggaaaggcctaagggtgtactctctgtatagccccgctatgggaaaataaagtggagtagggggcatag

SEQ ID NO: 33665 - DNA, 3450 bp, Homo sapiens
ctgcccctccccgcccttgctgggatgaccccgggggcgagtgcccggccagtgtgctcccgaagcgggctgcggttccgctcgtatcaggcttcatggcggcgcggccactgtcccggatgctgcggcggcttctgaggtccagcgcccggagctgcagctcaggggctccggtgacccagccctgccccggggagtccgcgcgagctgcctcggaggaggtgtccaggcggaggcagttcctgcgggagcatgcggcccccttctccgccttcctcacagacagcttcggccggcagcacagctacctgcggatctccctcacagagaagtgcaacctcagatgtcagtactgcatgcccgaggagggggtcccgctgacccccaaagccaacctgctgaccacagaggagatcctgaccctcgcccggctctttgtgaaggaaggcatcgacaagatccggctcacaggtggagagccgcttatccggccggacgtggtggacattgtggcccagctccagcggctggaagggctgagaaccataggtgttaccaccaatggcatcaacctggcccggctactgccccagcttcagaaggctggtctcagtgccatcaacatcagcctggacaccctggtgcctgccaagtttgagttcattgtccgcaggaaaggcttccacaaggtcatggagggcatccacaaggccatcgagctgggctacaaccctgtgaaggtgaactgtgtggtgatgcgaggccttaacgaggatgaactcctggactttgcggccttgactgagggcctccccctggatgtgcgcttcatagagtatatgccctttgatggcaacaagtggaacttcaagaagatggtcagctataaggagatgctagacactgtccggcagcagtggccagagctggagaaggtgccagaggaggaatccagcacagccaaggcctttaaaatccctggcttccaaggccagatcagcttcatcacatccatgtctgagcatttctgtgggacctgcaaccgcctgcgaatcacagctgatgggaacctcaaggtctgcctctttggaaactctgaggtatccctgcgggatcacctgcgagctggggcctctgagcaggagctgctgagaatcattggggctgctgtgggcaggaagaagcggcagcatgcaggcatgttcagtatttcccagatgaagaaccggcccatgatcctcatcggtgggtgacccatcaagttatttttgatgttccccaattccccaccagccaatccaagcattttctcctgggacccgctccatgttcagggtctaagacccagaatgagtttctccagccaggtggccactttatggaaaggatgcagggtcccccagacccctcctctagcccagcagcggctggggtctggctcctttcagagacactacacttcccgtgcagactcagatgccaactcaaagtgccttagcccaggttcctgggcttctgctgccccctcaggaccccagctaacctcagaacaactaactcatgtggactcggaaggacgggcagctatggtagatgtgggcaggaagccagacacagagcgggtggctgtggcttcagccgtggtcctcctgggaccggtagccttcaagcttgtccagcagaaccagctcaagaaaggagatgccctagtggtggcccagctggctggagtccaggcagccaaggtgaccagccagctgatccctctgtgccaccacgtggccctgagccacatccaggtgcagctggagctggacagcacacgccatgccgtgaagatccaggcatcttgccgggctcggggccccaccggggtggagatggaggccctgacctctgctgcagtggccgccctcaccctgtatgacatgtgcaaggctgtcagcagggacatcgtgttggaggagatcaagctcattagcaagactggtggtcagcggggggacttccatcgggcttagcacctgcccttctcacccatggcccacccaggcctggagctgggatgcaatgtaggctgagggaaagacgtcaggttcctttaatcacagtcactgtttgtttaccttgagcagtaaacccgaagtcagcctgctctactactaacaaacaggcctgctgctagatgatctctaatgaccaatggggcttcctttctatagggaggataccagcaggcccttaagccttccaggacactaaggtcgtgggagcgggactgcaacaagcaatgccagataactgagaaatcatgttctttgtggactatttcagacaaccaggttccgacagtccagcccagaacttttccttctcattttgggttttctcttctcctgctttcctggggagagattaagcgctcattaagcagaggagcccactttgaggagagcaaagcacaagcttgcctgaagaatggatcccaacttctccccggcagctctgcctccctaagtctgtgaagccgcagccctgccctgtcctgtcctgtcctgacttcatctctccttctgcccaagtctgtgtcccatcagacttgcagcctttcagcttaacagttgcccggtcctgctggccccttttcctctggcccccctcttctgaaacaggatgtgcacacatgggccatagccctaaggactcctgccagaccacacagcccacacctggccctgttcacggctgttccacccacccctctttattctggagcatatcagggaaagaaaagttgatgatagattgccttcaccctcacagcgcacaaataaagctacgatgccaactttgcagatgcaagaatgaagacactgtgtgggtagggcactgagctgctgcagtttcacagggaaggctgcacctatcaatcaatcaatcaatcctatcccaagacacagttccctgagggaagaagaggagggacctggaaaggcctaagggtgtactctctgtatagccccgctatgggaaaataaagtggagtagggggcatagaaatgcaccatctaagggaaatcttttgtcaggtggtggccaggggtgttcaaagctcattgcttgcattaccagctattagagagatcagagagggcaattaattagaggctcctggttctcacatcccaaacacacacagttctggcctgctgggctctctaacttggatgtctttgagtcctcagtggtgccccctgcctgcctcccctttgccctatgccaaggtgtgctggcaaatattaaacaaccagctctctggaaaagacaatttgtgatataaatactcccatgttgaataatttcaagctaccagtatgtcaaatggcttgcaaaatttctgaaaatgtaaacaattggttctcacagagctggtacaagctggctccagca

SEQ ID NO: 33666 - DNA, 2792 bp, Homo sapiens
ctgcccctccccgcccttgctgggatgaccccgggggcgagtgcccggccagtgtgctcccgaagcgggctgcggttccgctcgtatcaggcttcatggcggcgcggccactgtcccggatgctgcggcggcttctgaggtccagcgcccggagctgcagctcaggggctccggtgacccagccctgccccggggagtccgcgcgagctgcctcggaggaggtgtccaggcggaggcagttcctgcgggagcatgcggcccccttctccgccttcctcacagacagcttcggccggcagcacagctacctgcggatctccctcacagagaagtgcaacctcagatgtcagtactgcatgcccgaggagggggtcccgctgacccccaaagccaacctgctgaccacagaggagatcctgaccctcgcccggctctttgtgaaggaaggcatcgacaagatccggctcacaggtggagagccgcttatccggccggacgtggtggacattgtggcccagctccagcggctggaagggctgagaaccataggtgttaccaccaatggcatcaacctggcccggctactgccccagcttcagaaggctggtctcagtgccatcaacatcagcctggacaccctggtgcctgccaagtttgagttcattgtccgcaggaaaggcttccacaaggtcatggagggcatccacaaggccatcgagctgggctacaaccctgtgaaggtgaactgtgtggtgatgcgaggccttaacgaggatgaactcctggactttgcggccttgactgagggcctccccctggatgtgcgcttcatagagtatatgccctttgatggcaacaagtggaacttcaagaagatggtcagctataaggagatgctagacactgtccggcagcagtggccagagctggagaaggtgccagaggaggaatccagcacagccaaggcctttaaaatccctggcttccaaggccagatcagcttcatcacatccatgtctgagcatttctgtgggacctgcaaccgcctgcgaatcacagctgatgggaacctcaaggtctgcctctttggaaactctgaggtatccctgcgggatcacctgcgagctggggcctctgagcaggagctgctgagaatcattggggctgctgtgggcaggaagaagcggcagcatgcagagttatttttgatgttccccaattccccaccagccaatccaagcattttctcctgggacccgctccatgttcagggtctaagacccagaatgagtttctccagccaggtggccactttatggaaaggatgcagggtcccccagacccctcctctagcccagcagcggctggggtctggctcctttcagagacactacacttcccgtgcagactcagatgccaactcaaagtgccttagcccaggttcctgggcttctgctgccccctcaggaccccagctaacctcagaacaactaactcatgtggactcggaaggacgggcagctatggtagatgtgggcaggaagccagacacagagcgggtggctgtggcttcagccgtggtcctcctgggaccggtagccttcaagcttgtccagcagaaccagctcaagaaaggagatgccctagtggtggcccagctggctggagtccaggcagccaaggtgaccagccagctgatccctctgtgccaccacgtggccctgagccacatccaggtgcagctggagctggacagcacacgccatgccgtgaagatccaggcatcttgccgggctcggggccccaccggggtggagatggaggccctgacctctgctgcagtggccgccctcaccctgtatgacatgtgcaaggctgtcagcagggacatcgtgttggaggagatcaagctcattagcaagactggtggtcagcggggggacttccatcgggcttagcacctgcccttctcacccatggcccacccaggcctggagctgggatgcaatgtaggctgagggaaagacgtcaggttcctttaatcacagtcactgtttgtttaccttgagcagtaaacccgaagtcagcctgctctactactaacaaacaggcctgctgctagatgatctctaatgaccaatggggcttcctttctatagggaggataccagcaggcccttaagccttccaggacactaaggtcgtgggagcgggactgcaacaagcaatgccagataactgagaaatcatgttctttgtggactatttcagacaaccaggttccgacagtccagcccagaacttttccttctcattttgggttttctcttctcctgctttcctggggagagattaagcgctcattaagcagaggagcccactttgaggagagcaaagcacaagcttgcctgaagaatggatcccaacttctccccggcagctctgcctccctaagtctgtgaagccgcagccctgccctgtcctgtcctgtcctgacttcatctctccttctgcccaagtctgtgtcccatcagacttgcagcctttcagcttaacagttgcccggtcctgctggccccttttcctctggcccccctcttctgaaacaggatgtgcacacatgggccatagccctaaggactcctgccagaccacacagcccacacctggccctgttcacggctgttccacccacccctctttattctggagcatatcagggaaagaaaagttgatgatagattgccttcaccctcacagcgcacaaataaagctacgatgccaactttgca

SEQ ID NO: 33667 - DNA, 2728 bp, Homo sapiens
ctgcccctccccgcccttgctgggatgaccccgggggcgagtgcccggccagtgtgctcccgaagcgggctgcggttccgctcgtatcaggcttcatggcggcgcggccactgtcccggatgctgcggcggcttctgaggtccagcgcccggagctgcagctcaggggctccggtgacccagccctgccccggggagtccgcgcgagctgcctcggaggtcagtactgcatgcccgaggagggggtcccgctgacccccaaagccaacctgctgaccacagaggagatcctgaccctcgcccggctctttgtgaaggaaggcatcgacaagatccggctcacaggtggagagccgcttatccggccggacgtggtggacattgtggcccagctccagcggctggaagggctgagaaccataggtgttaccaccaatggcatcaacctggcccggctactgccccagcttcagaaggctggtctcagtgccatcaacatcagcctggacaccctggtgcctgccaagtttgagttcattgtccgcaggaaaggcttccacaaggtcatggagggcatccacaaggccatcgagctgggctacaaccctgtgaaggtgaactgtgtggtgatgcgaggccttaacgaggatgaactcctggactttgcggccttgactgagggcctccccctggatgtgcgcttcatagagtatatgccctttgatggcaacaagtggaacttcaagaagatggtcagctataaggagatgctagacactgtccggcagcagtggccagagctggagaaggtgccagaggaggaatccagcacagccaaggcctttaaaatccctggcttccaaggccagatcagcttcatcacatccatgtctgagcatttctgtgggacctgcaaccgcctgcgaatcacagctgatgggaacctcaaggtctgcctctttggaaactctgaggtatccctgcgggatcacctgcgagctggggcctctgagcaggagctgctgagaatcattggggctgctgtgggcaggaagaagcggcagcatgcaggcatgttcagtatttcccagatgaagaaccggcccatgatcctcatcggtgggtgacccatcaagttatttttgatgttccccaattccccaccagccaatccaagcattttctcctgggacccgctccatgttcagggtctaagacccagaatgagtttctccagccaggtggccactttatggaaaggatgcagggtcccccagacccctcctctagcccagcagcggctggggtctggctcctttcagagacactacacttcccgtgcagactcagatgccaactcaaagtgccttagcccaggttcctgggcttctgctgccccctcaggaccccagctaacctcagaacaactaactcatgtggactcggaaggacgggcagctatggtagatgtgggcaggaagccagacacagagcgggtggctgtggcttcagccgtggtcctcctgggaccggtagccttcaagcttgtccagcagaaccagctcaagaaaggagatgccctagtggtggcccagctggctggagtccaggcagccaaggtgaccagccagctgatccctctgtgccaccacgtggccctgagccacatccaggtgcagctggagctggacagcacacgccatgccgtgaagatccaggcatcttgccgggctcggggccccaccggggtggagatggaggccctgacctctgctgcagtggccgccctcaccctgtatgacatgtgcaaggctgtcagcagggacatcgtgttggaggagatcaagctcattagcaagactggtggtcagcggggggacttccatcgggcttagcacctgcccttctcacccatggcccacccaggcctggagctgggatgcaatgtaggctgagggaaagacgtcaggttcctttaatcacagtcactgtttgtttaccttgagcagtaaacccgaagtcagcctgctctactactaacaaacaggcctgctgctagatgatctctaatgaccaatggggcttcctttctatagggaggataccagcaggcccttaagccttccaggacactaaggtcgtgggagcgggactgcaacaagcaatgccagataactgagaaatcatgttctttgtggactatttcagacaaccaggttccgacagtccagcccagaacttttccttctcattttgggttttctcttctcctgctttcctggggagagattaagcgctcattaagcagaggagcccactttgaggagagcaaagcacaagcttgcctgaagaatggatcccaacttctccccggcagctctgcctccctaagtctgtgaagccgcagccctgccctgtcctgtcctgtcctgacttcatctctccttctgcccaagtctgtgtcccatcagacttgcagcctttcagcttaacagttgcccggtcctgctggccccttttcctctggcccccctcttctgaaacaggatgtgcacacatgggccatagccctaaggactcctgccagaccacacagcccacacctggccctgttcacggctgttccacccacccctctttattctggagcatatcagggaaagaaaagttgatgatagattgccttcaccctcacagcgcacaaataaagctacgatgccaactttgca

SEQ ID NO: 33668 - DNA, 2767 bp, Homo sapiens
tccaatttcacctggctcctggggctgtcacttccctttgcttcatgtttataaaatgagaggactgggccagcccatcataagatgggggagggcacagaaacttgtcttgaggagactctaaggggaggaggtgtccaggcggaggcagttcctgcgggagcatgcggcccccttctccgccttcctcacagacagcttcggccggcagcacagctacctgcggatctccctcacagagaagtgcaacctcagatgtcagtactgcatgcccgaggagggggtcccgctgacccccaaagccaacctgctgaccacagaggagatcctgaccctcgcccggctctttgtgaaggaaggcatcgacaagatccggctcacaggtggagagccgcttatccggccggacgtggtggacattgtggcccagctccagcggctggaagggctgagaaccataggtgttaccaccaatggcatcaacctggcccggctactgccccagcttcagaaggctggtctcagtgccatcaacatcagcctggacaccctggtgcctgccaagtttgagttcattgtccgcaggaaaggcttccacaaggtcatggagggcatccacaaggccatcgagctgggctacaaccctgtgaaggtgaactgtgtggtgatgcgaggccttaacgaggatgaactcctggactttgcggccttgactgagggcctccccctggatgtgcgcttcatagagtatatgccctttgatggcaacaagtggaacttcaagaagatggtcagctataaggagatgctagacactgtccggcagcagtggccagagctggagaaggtgccagaggaggaatccagcacagccaaggcctttaaaatccctggcttccaaggccagatcagcttcatcacatccatgtctgagcatttctgtgggacctgcaaccgcctgcgaatcacagctgatgggaacctcaaggtctgcctctttggaaactctgaggtatccctgcgggatcacctgcgagctggggcctctgagcaggagctgctgagaatcattggggctgctgtgggcaggaagaagcggcagcatgcaggcatgttcagtatttcccagatgaagaaccggcccatgatcctcatcggtgggtgacccatcaagttatttttgatgttccccaattccccaccagccaatccaagcattttctcctgggacccgctccatgttcagggtctaagacccagaatgagtttctccagccaggtggccactttatggaaaggatgcagggtcccccagacccctcctctagcccagcagcggctggggtctggctcctttcagagacactacacttcccgtgcagactcagatgccaactcaaagtgccttagcccaggttcctgggcttctgctgccccctcaggaccccagctaacctcagaacaactaactcatgtggactcggaaggacgggcagctatggtagatgtgggcaggaagccagacacagagcgggtggctgtggcttcagccgtggtcctcctgggaccggtagccttcaagcttgtccagcagaaccagctcaagaaaggagatgccctagtggtggcccagctggctggagtccaggcagccaaggtgaccagccagctgatccctctgtgccaccacgtggccctgagccacatccaggtgcagctggagctggacagcacacgccatgccgtgaagatccaggcatcttgccgggctcggggccccaccggggtggagatggaggccctgacctctgctgcagtggccgccctcaccctgtatgacatgtgcaaggctgtcagcagggacatcgtgttggaggagatcaagctcattagcaagactggtggtcagcggggggacttccatcgggcttagcacctgcccttctcacccatggcccacccaggcctggagctgggatgcaatgtaggctgagggaaagacgtcaggttcctttaatcacagtcactgtttgtttaccttgagcagtaaacccgaagtcagcctgctctactactaacaaacaggcctgctgctagatgatctctaatgaccaatggggcttcctttctatagggaggataccagcaggcccttaagccttccaggacactaaggtcgtgggagcgggactgcaacaagcaatgccagataactgagaaatcatgttctttgtggactatttcagacaaccaggttccgacagtccagcccagaacttttccttctcattttgggttttctcttctcctgctttcctggggagagattaagcgctcattaagcagaggagcccactttgaggagagcaaagcacaagcttgcctgaagaatggatcccaacttctccccggcagctctgcctccctaagtctgtgaagccgcagccctgccctgtcctgtcctgtcctgacttcatctctccttctgcccaagtctgtgtcccatcagacttgcagcctttcagcttaacagttgcccggtcctgctggccccttttcctctggcccccctcttctgaaacaggatgtgcacacatgggccatagccctaaggactcctgccagaccacacagcccacacctggccctgttcacggctgttccacccacccctctttattctggagcatatcagggaaagaaaagttgatgatagattgccttcaccctcacagcgcacaaataaagctacgatgccaactttgca

SEQ ID NO: 33669 - DNA, 1716 bp, Homo sapiens
ctccataatctgtgcccatttgagtattttgttttcaattagggagatagttggtattaggattaggattgttgtgaagtatagtacggatgctacttgtccaatgatggtaaaagggcagagttatttttgatgttccccaattccccaccagccaatccaagcattttctcctgggacccgctccatgttcagggtctaagacccagaatgagtttctccagccaggtggccactttatggaaaggatgcagggtcccccagacccctcctctagcccagcagcggctggggtctggctcctttcagagacactacacttcccgtgcagactcagatgccaactcaaagtgccttagcccaggttcctgggcttctgctgccccctcaggaccccagctaacctcagaacaactaactcatgtggactcggaaggacgggcagctatggtagatgtgggcaggaagccagacacagagcgggtggctgtggcttcagccgtggtcctcctgggaccggtagccttcaagcttgtccagcagaaccagctcaagaaaggagatgccctagtggtggcccagctggctggagtccaggcagccaaggtgaccagccagctgatccctctgtgccaccacgtggccctgagccacatccaggtgcagctggagctggacagcacacgccatgccgtgaagatccaggcatcttgccgggctcggggccccaccggggtggagatggaggccctgacctctgctgcagtggccgccctcaccctgtatgacatgtgcaaggctgtcagcagggacatcgtgttggaggagatcaagctcattagcaagactggtggtcagcggggggacttccatcgggcttagcacctgcccttctcacccatggcccacccaggcctggagctgggatgcaatgtaggctgagggaaagacgtcaggttcctttaatcacagtcactgtttgtttaccttgagcagtaaacccgaagtcagcctgctctactactaacaaacaggcctgctgctagatgatctctaatgaccaatggggcttcctttctatagggaggataccagcaggcccttaagccttccaggacactaaggtcgtgggagcgggactgcaacaagcaatgccagataactgagaaatcatgttctttgtggactatttcagacaaccaggttccgacagtccagcccagaacttttccttctcattttgggttttctcttctcctgctttcctggggagagattaagcgctcattaagcagaggagcccactttgaggagagcaaagcacaagcttgcctgaagaatggatcccaacttctccccggcagctctgcctccctaagtctgtgaagccgcagccctgccctgtcctgtcctgtcctgacttcatctctccttctgcccaagtctgtgtcccatcagacttgcagcctttcagcttaacagttgcccggtcctgctggccccttttcctctggcccccctcttctgaaacaggatgtgcacacatgggccatagccctaaggactcctgccagaccacacagcccacacctggccctgttcacggctgttccacccacccctctttattctggagcatatcagggaaagaaaagttgatgatagattgccttcaccctcacagcgcacaaataaagctacgatgccaactttgca

SEQ ID NO: 33670 - DNA, 2043 bp, Homo sapiens
ctgcccctccccgcccttgctgggatgaccccgggggcgagtgcccggccagtgtgctcccgaagcgggctgcggttccgctcgtatcaggcttcatggcggcgcggccactgtcccggatgctgcggcggcttctgaggtccagcgcccggagctgcagctcaggggctccggtgacccagccctgccccggggagtccgcgcgagctgcctcggaggaggtgtccaggcggaggcagttcctgcgggagcatgcggcccccttctccgccttcctcacagacagcttcggccggcagcacagctacctgcggatctccctcacagagaagtgcaacctcagatgtcagtactgcatgcccgaggagggggtcccgctgacccccaaagccaacctgctgaccacagaggagatcctgaccctcgcccggctctttgtgaaggaaggcatcgacaagatccggctcacaggtggagagccgcttatccggccggacgtggtggacattgtggcccagctccagcggctggaagggctgagaaccataggtgttaccaccaatggcatcaacctggcccggctactgccccagcttcagaaggctggtctcagtgccatcaacatcagcctggacaccctggtgcctgccaagtttgagttcattgtccgcaggaaaggcttccacaaggtcatggagggcatccacaaggccatcgagctgggctacaaccctgtgaaggtgaactgtgtggtgatgcgaggccttaacgaggatgaactcctggactttgcggccttgactgagggcctccccctggatgtgcgcttcatagagtatatgccctttgatggcaacaagtggaacttcaagaagatggtcagctataaggagatgctagacactgtccggcagcagtggccagagctggagaaggtgccagaggaggaatccagcacagccaaggcctttaaaatccctggcttccaaggccagatcagcttcatcacatccatgtctgagcatttctgtgggacctgcaaccgcctgcgaatcacagctgatgggaacctcaaggtctgcctctttggaaactctgaggtatccctgcgggatcacctgcgagctggggcctctgagcaggagctgctgacttcatctctccttctgcccaagtctgtgtcccatcagacttgcagcctttcagcttaacagttgcccggtcctgctggccccttttcctctggcccccctcttctgaaacaggatgtgcacacatgggccatagccctaaggactcctgccagaccacacagcccacacctggccctgttcacggctgttccacccacccctctttattctggagcatatcagggaaagaaaagttgatgatagattgccttcaccctcacagcgcacaaataaagctacgatgccaactttgcagatgcaagaatgaagacactgtgtgggtagggcactgagctgctgcagtttcacagggaaggctgcacctatcaatcaatcaatcaatcctatcccaagacacagttccctgagggaagaagaggagggacctggaaaggcctaagggtgtactctctgtatagccccgctatgggaaaataaagtggagtagggggcatagaaatgcaccatctaagggaaatcttttgtcaggtggtggccaggggtgttcaaagctcattgcttgcattaccagctattagagagatcagagagggcaattaattagaggctcctggttctcacatcccaaacacacacagttctggcctgctgggctctctaacttggatgtctttgagtcctcagtggtgccccctgcctgcctcccctttgccctatgccaaggtgtgctggcaaatattaaacaaccagctctctggaaaagacaatttgtgatataaatactcccatgttgaataatttcaagctaccagtatgtcaaatggcttgcaaaatttctgaaaatgtaaacaattggttctcacagagctggtacaagctggctccagca

SEQ ID NO: 33671 - DNA, 1257 bp, Homo sapiens
ctgcccctccccgcccttgctgggatgaccccgggggcgagtgcccggccagtgtgctcccgaagcgggctgcggttccgctcgtatcaggcttcatggcggcgcggccactgtcccggatgctgcggcggcttctgaggtccagcgcccggagctgcagctcaggggctccggtgacccagccctgccccggggagtccgcgcgagctgcctcggaggaggtgtccaggcggaggcagttcctgcgggagcatgcggcccccttctccgccttcctcacagacagcttcggccggcagcacagctacctgcggatctccctcacagagaagtgcaacctcagatgtcagtactgcatgcccgaggagggggtcccgctgacccccaaagccaacctgctgaccacagaggagatcctgaccctcgcccggctctttgtgaaggaaggcatcgacaagatccggctcacaggtggagagccgcttatccggccggacgtggtggacattgtggcccagctccagcggctggaagggctgagaaccataggtgttaccaccaatggcatcaacctggcccggctactgccccagcttcagaaggctggtctcagtgccatcaacatcagcctggacaccctggtgcctgccaagtttgagttcattgtccgcaggaaaggcttccacaaggtcatggagggcatccacaaggccatcgagctgggctacaaccctgtgaaggtgaactgtgtggtgatgcgaggccttaacgaggatgaactcctggactttgcggccttgactgagggcctccccctggatgtgcgcttcatagagtatatgccctttgatggcaacaagtggaacttcaagaagatggtcagctataaggagatgctagacactgtccggcagcagtggccagagctggagaaggtgccagaggaggaatccagcacagccaaggcctttaaaatccctggcttccaaggccagatcaacttgcagcctttcagcttaacagttgcccggtcctgctggccccttttcctctggcccccctcttctgaaacaggatgtgcacacatgggccatagccctaaggactcctgccagaccacacagcccacacctggccctgttcacggctgttccacccacccctctttattctggagcatatcagggaaagaaaagttgatgatagattgccttcaccctcacagcgcacaaataaagctacgatgccaactttgca

SEQ ID NO: 33672 - DNA, 301 bp, Homo sapiens
aatctgggtgacagagcaagatttcatctagaaaaaataaaccataaataaattaattaattaaaaaaagaaaataacactcctgtttcatctggaccaataccttcttttaccttctttttctttttccttttaagttccagggtacatgtgcaggatgtgcaggatgtgcaggtttgtaacacaggtaaacgtgtgccatggtggtttgctgcacctatcaccaatacttttcttgatgggtttccacatgagaatcagtccttaagcatggaaaatgtgtctgattttcttatttggt

SEQ ID NO: 33673 - DNA, 490 bp, Homo sapiens
atttaaaatgtattcctggctttaggaaacaaaagaaaaattttaaaccctggcagttaaattattactggtctctacagggttaatttaatgtaaataatctactctcctgagggaaaaggtggaggcctggcattctggaagggccagtcaggtggtgacaaaactgtgtgccttggggttttgaggggtgtgttgggtggctctgaacctggctttgggtttgttacatctctcgctctcttaaaacagtaactcaagatgtaagtaaaagtgttttcattttttattgatcctgctaacatctttcattatccagcatgtagccacagcaaattattgctcatttgatactgagaattctattgaccatcgctttcgttggagagagaattctaactactcggctgctctgtcatcagtcagagctaaggctgaggactttccaccactaaaaccaaaataaattgagccttctgcctccagaaat

SEQ ID NO: 33674 - DNA, 408 bp, Homo sapiens
ttcccatcgtggcctgaacgagtttttcaggttaactttggaatgcccttggctgagaggaggggttcattccccacagctggggggcttagaattttatttttggtttacagtatcagttcttcttcttcttcgtatcagttcttcttcttcttcttcttcttcttctccttcttcttcttcttcttcttcttcttcttctttgtgtccagtagaatttgattatatagatagagtgcagtttgttactccattcatcagctgaaggatatttgggttgtttctattttgaagcaattagaagtaaagcagctataaatattcacatgcaggtatttgtgtgtacttatgacttcacttcccttgactaaatatttaggggcaagatgggaggtcatatgatgagtg

SEQ ID NO: 33675 - DNA, 357 bp, Homo sapiens
gactcaatgcatgaagacaattccaacactcctatgatttcatcccccatccagtttgcagcatcccttccctagccacctgcccaccaaaaaaccctagcctccaagctcctggggaggtgaatttgagaactatctcccatcatgcttctgggctgccttgtgataattaaatcttttctctgctgcaacacgcctgctgtctcagtgtattggctttatctgtgcagcaggcaagaagaacccactgtactatggcaaccatgaagtgagggtgtggggggccctgtagcaccaagcttgaatcctgtagtctttctggattgtgaggaggcacagagactcccaggggaggag

SEQ ID NO: 33676 - DNA, 287 bp, Homo sapiens
ggagttaatttggctgaagtagaaaacccagttgtctttcctatgatggatttcagttgaaagctctgttcacatattttagctttaggtgaattgcttgaaaactgtctaatggaaatctatttcaggggtcaggtgaagagaagggagagactataaacagaatccctctctgtgaatctgtcattttcctactcactttctagctgtgggggttagcccaaatcctgccctctgtatgttcaggttagtaagtctgttaatattctatttaagttacagctgtc

SEQ ID NO: 33677 - DNA, 294 bp, Homo sapiens
cattacagcacttttcacgacagcaaagacatagaatcaatcaaggtgcccatcaatggtggattggacaaggcatgtaaaatggtttcatttgtctaattagactctgaaggatacaatggatgcatttaaaacattagtcacacttctatgatagtaaatatatttcaattatttggtctatagaatacctagaaaaaatgtaatttatgataaatacactttcatcacatctttttttcctgcaaggtatttttctccataatatgacaagtatgaatcatttcacaacac

SEQ ID NO: 33678 - DNA, 197 bp, Homo sapiens
cctcctgtaggatggaagcactttgctctttggccttttgaggtcacccagctatttgaaggtcaggggcaactcgattctaatgagatcaaggtcacagggtcatgttgcccccaggaaagtgggagatggagttctgtggtccaggctgtggccctgctgcagggctgggaggtggagaggtgtggacagagaag

SEQ ID NO: 33679 - DNA, 410 bp, Homo sapiens
gctgggcagagctcggaaactgtgtctccattgctctcagctcagactgtctccattacgttaagctgcaggcccccaggcagggcccccgctgctttgtccctggctgctcctctgagccaagaacgacagtgatgccagtgtctccactgctgcaaaggttctcattttgttctgaaggacagtacccccaacgactggctgtgcgctctgtcacctatcggatgtcttccgctcagtccacactgccaggtcaagggagcaggagctgctgtgtccttggtttacaagacttgagagctcttcagtaggagggagtgtatgaaaaatacatagtaaggatgcctaaggagagtgcagaagcccagcactgagcgtcctggaaagacttcaaataaatctgcacattc

SEQ ID NO: 33680 - DNA, 704 bp, Homo sapiens
atattatatatatatgtctataacatttagacagagaagataataatatattcattttatagtttaggaaacagacttggaagggcaaataacttgtctaagatgactaagcagctgagtgagaaccacagcctatctgtggcattcagtttcagccatctttcccttgcttcataaggatagttactctggtatcagttgctggattgggattttgggcatttataaatgtttttattttggatattactgaatcacagacaatttcatcttagttaattaaaaattcatcttacgtgacacttgtctaaatcttaaaatattaaaattttaatgtataaggatgttaataatctttatattttaagagactatgaagtcaagtctagctaacttagatctgtaagtttttagctatggaaagcaattctattgtgtacaagtttcagcctgtgaagggaattcattgaaaatgtatagagatcagaagaactaacacctttcttgcatggatttttcttgattattggcagttaacaataaaatgttattagatcactggtgcttctgtgtggggttgagttttatgatatcttctgttagacccataagggaggctgtgagttgtttctacatcctggaatatttaagatcctcttttaaattatattttatataagccatgaaaatggcattgaataatg

SEQ ID NO: 33681 - DNA, 315 bp, Homo sapiens
taaattacagaacaataaaatcaggagtggagaaaatttgaaaacaaaaagggtgaatgctccatgtcagtctggattcagacagggaaaatagaaggcactgtatgtattccagtaatgaagagttttaatggaaggaattagaggtgctgccaccacccagagtcacaacctcagcactgaaccagtgattctcaggagcttgctggaaagtttctgtggatcacaggaacatctgggtgtctcccactgactttctctatctgaagcaccagtgaggggattctcacgttcacctggagactgtttcagtca

SEQ ID NO: 33682 - DNA, 1791 bp, Homo sapiens
attaggaatggccagagcaaacagttgagatctgtaagttcatatttaggaccaagtttccatgctctgtgtagagactgagaagcgttctgagcctccatcagcagctgttgcgtccactgaataattcattcaggaaacaaggactgagtacctttcatgtgccagattatctcgaaggctctggtgaccttaggatgaacaaaaaattatgctttcacaagtagaaggaaacgagtatgaatttgggaattgtctgcctttacattatagattgcctctattttctggtgggagtttagcctcatgatattggtgagagccacagatcctgaagggcatgaatttaaggctcagctatgctacttcccatctgggaactgctgttaaagtcggtaaatgctcaagaaatcaatcagaggcccttctcctcgttcttctttattttccatcatcaccaccatcgtcacctataatcaccatgatgatattagatattggtgcaagtagaatcagagatgtgtattgtttgatccaaatattgtatgttgcaaattgaaagtctgccatcctataaatatgaaggagcagttagggagtttcagtaataagcaaaaatgaaggtaagtaacttggactagtcagccatttatgatggtaataataataataataataataataataataataataatcagaaataacaaagtaactgtgaagttgagatatttgaagactagtcccagtactaaggtgctttggggcaatgcgcagttttctaaaagtaatcattttcttgggttggacacagaataaatttttagtactttattttcctggttcttcagttcaattttgctacccaaacttactaccaattatggtttctttacttcaaaattccaaagctccccagcaatttgcagggtgagattttgtgtgactgctggaaggcacattccaaaacataaagaaactttgccattggcagaaatggccttttgggattacaggtgtgagacactgcacccggccttggggtttttcaaagattgtttgggggaagtgatgggagtggctagacaatggttgtttgttgctgattggttgggggtgaagtcatagggttatgggaaatgttcctcctgtgtgctgaatagtttctggtggggccacaagagcagttggtgagtccaggtgaagccaggtgtcagacatgcaaagaacccgaaaagacatttcaaaaggccaatcttaggttcaataatagtgatgctgtccacaggggtaatcggggaagttagcataccttttgatctcttgaataatgactggcaatcctttatgtctacaccttagcagaattcagccccctctatctgcctagcctggtggtctctcattagctttacaaaagtggttgagttttggggaaaggctgttatcatttaacctataaattaaatgcctcccaaggctagcttggcttaagcagccaaggaataattaaaagcagtttgaaggctcaaggcaagaggggagttggctagatcagatctcccccactgccataattttctcactgttataatttttgcaaaggcagtttcagttctagtactctatctgggatgtaccttacttcacttacaaataagcacagatcatattttgtatctacataactaggcaagaaccatcctgaaagggtaacaaattctatgaatccatccaaatataaaaatattcacacgatgtttctgtaattccacacagttagaaaaaaaa

SEQ ID NO: 33683 - DNA, 341 bp, Homo sapiens
taatagaaatacagttgccaaagagaaagcagcaggcagagctaaggaaaggaggagtgttcgaatgattaatcacactcacaccactctccccaacagggagctctcatgtgaagagtttaacggacttgccaattagttacttgtgaatcatcctccacttgcctaattttctttcaaagtttgtactcagcaatttgtactgacttcaatatcaacttacgtagttttctttgtagggcgaaaaaaagggaaggaaaaccagttcatgtctttgcatttcagcaactaaattggtcatttgaggaaattttaaaaactacttttctctgctgcagtgc

SEQ ID NO: 33684 - DNA, 1082 bp, Homo sapiens
atttttttataaaaagtactacattatttgatttttatgcctttaagttttacttctgagtttttaaatttttgaattttattttgataagatcagttatcacaaaatatttttgcacttaagcagtactctttttgagtattatgaatttctggccaccactgtcacaaatgtgtacagcctatgccactgagatgcttacagttattgctgacattgaataaagatgaagaatcttcatgaagactataccactgcacccaattggaaacagagtcaccaccaccttttcaaccagcaaactaaaacccaactgcagatgaaagtccttatctatggaagccactctagaaagttaggaagaggtaggctggacgcggtggctcaagcctgtaatcccagcactttgggaggccaagatgggtggattacttgaggtcaggagttcaagaccagcctggccaatatgacgaaatcccatctctacaaaaataccaaaaaaattagccaggtgtggtgacatacacgtgttaattccagcttctcatgaagctgaggcaagagaatcgcttgaacttgggagacagaggttgcagtgagccaagatcatgccactgtactccagcacaggtgacagatggagacttcatctcaaaaaaaaggaagagatgatttgttccaccaggtgcacagacatcaacacagggacaccagaaatatgaaagagcatggaaataggttgccacccaaaggaaccgtcactttctagtggcagacctgcatgaaaaggaaatcaactaattgccagaaaaggaattcaaaattatgattttttaagaaattgaatgatatacaaggaaatacagatagttcagtcaatcagaaaaggatttatgatgtgaatgacaaattcaacagagatagaaatcataaaaaaaagaaccaaccagaaatcctgcaactgaagaattcagtgaattaaattaaaaaatacaacagagagattcaacaaaagaaagaatccagcaaaagaatccctgaacttgaagataggtcattcgaaattacctagtcagaggaaa

SEQ ID NO: 33685 - DNA, 483 bp, Homo sapiens
aaatgaagatcacagagccagttgatcagtggggaagctgcatctgaaatccaggacttctagatcctgggtcaactggtaatcacaagcgtacagataacaggcaggcaggaatgtgaaaatcagagagaagagagatgtgcaccagaagctggagtaatgtgctttgaagatggaggaagggaccataaatcaaggaatgcagacagcctgtagaagctgggaaaggcaaggatgtggattcactcgagtctctagaagaaacgcaaccccgccaacaccttgatttgaggacgtctgaccttcagaatgagaaaatgatacatttgtgttgtaagccacccagtttgtgaaatatgtatcaacaattgaaaactagtacatagtcaaatactcaatctctgttttttttagcttatcattttcaatctctgtctccaacccacaaaccacatgcatcataaataaattaaaataccaaaa

SEQ ID NO: 33686 - DNA, 473 bp, Homo sapiens
agaggacactgtttcaagattcctgcgccagctccttcgttgttatagaagttggactaaataaaagggtaatcacaagcgtacagataacaggcaggcaggaatgtgaaaatcagagagaagagagatgtgcaccagaagctggagtaatgtgctttgaagatggaggaagggaccataaatcaaggaatgcagacagcctgtagaagctgggaaaggcaaggatgtggattcactcgagtctctagaagaaacgcaaccccgccaacaccttgatttgaggacgtctgaccttcagaatgagaaaatgatacatttgtgttgtaagccacccagtttgtgaaatatgtatcaacaattgaaaactagtacatagtcaaatactcaatctctgttttttttagcttatcattttcaatctctgtctccaacccacaaaccacatgcatcataaataaattaaaataccaaaa

SEQ ID NO: 33687 - DNA, 891 bp, Homo sapiens
aaatgaagatcacagagccagttgatcagtggggaagctgcatctgaaatccaggacttctagatcctgggtcaactggtaatcacaagcgtacagataacaggcaggcaggaatgtgaaaatcagagagaagagagatgtgcaccagaagctggagtaatgtgctttgaagatggaggaagggaccataaatcaaggaatgcagacagcctgtagaagctgggaaaggcaaggatgtggattcactcgagtctctagaagaaacgcaaccccgccaacaccttgatttgaggacgtctgaccttcagaatgagaaaatgatacatttgtgttgtaagccacccagtttgtgaaatatgtatcaacaattgaaaactagtacatagtcaaatactcaatctctgttttttttagcttatcattttcaatctctgtctccaacccacaaaccacatgcatcataaataaattaaaataccaaaaaaaaaaaaaaaaaaaaaaaaaaactgtgtggggcgccgcgctctggcgcccttgagagaaagcgttttcatagagacacttcgcggttgggcgcgcgcgcggggcgccccagagtcggcgacaatggtggaacatgggggcacaatagcggtggtcccatagggaaacccgggggcaggaacaagagggcgccgggggatattctctccaccgaccaataaaagaaaaagcgccgcggggggggaacaaacggcgacgaggcgttctctggaaaacacaatgtcccgagagagggagattgcacgaggggggccacatcacagggggggctcctataaccaaccaggggggagagttcccaggaggagaagcgcccgaatattccaacattgagccccggtcgcgggg

SEQ ID NO: 33688 - DNA, 676 bp, Homo sapiens
gaccaccccgttgttcccactttctgtggttaaggggcgcatcgagtggcgaaggagagagcccagtgaactaaacagccctttaaaagttcgctttgcttcctgctggcgctctttctagcactaactttggtatgcatttaatctgtaaaattagtactatcaccttacgttggagtagcactttacagtttgactctagatgctcttttcattccatcctgctacctactcacatcaagtgcttttccccttgaccaacggtatgccaatctgctgataattacttcggtattcactgaatttctaaatctcaaggctcagtgagcagggtagtctgtagggagggattagttagggaatgccttccaaagggggttttgagctggaatttgaaggtgatcggcagccaagggaacactttcagcaagcgtttcttgagttgaagagttaaaaggagcttagataatctagcccaattctctgagaagactgaggcttagaaaggttatgacttcctcaagctgtttttttgcaaagccttcatgcctttttaataacttctagacattgcagaatacaaaacaggacactggctgggccctgagaacatttaaaatagaattgagaaggccaaaacacagaaaaggagaaaattgaaagtatatcaatttca

SEQ ID NO: 33689 - DNA, 435 bp, Homo sapiens
gaagtgttgatttcttaaaatgttattttccccagccagagtgtgtttggttttcttctggagtacacccactccagataaagttaggactgtgtcttaagattttagatcagcttaaaaaaattttttttgttttggtgacaatagaacatagatatttacatgtatatttgaatacaatagtcccctcttatcctgtcttgctttctgtggttttaattactcatggtgaactgtggtctaaaaatactaaagtggaaaattgcagaaataaaccattcatgagttttattttatttatttattttgggacagagtctcactttgccacctagtctggagtgcagtggtgcgatcatagctcaccacagcctcagcctcaaactcctagactcaagggaccctcctgccttggcctcccagatagctaattaa

SEQ ID NO: 33690 - DNA, 393 bp, Homo sapiens
ttacatgtctctctattacttggcaataatgggaatttttatttctacagttgtattgttttggtctgctccataccctgtaaacatttccattgttctacaaagctgtgtactcttttctgttagggtcagtgttttaggtgggaaaacaggctggttttctccactttattttctaaaatggtgttacatccctctgcttaggattattaatattaacaaaccatgtccacaactggtagaattgtctaatttgaatagtgaactgaaaaacactgaacatagccaaaataaaacatttaactagcttccatcaattcaatgacaatgacaaaaaaaaaagtactaaatacccacaaagtacaaagaactgtgatcagtattgcaggagag

SEQ ID NO: 33691 - DNA, 3060 bp, Homo sapiens
  misc_feature (3052)..(3052): n is a, c, g, or t
  misc_feature (3054)..(3059): n is a, c, g, or t
cagcatcgccttttcctcccgtttctccttccactcccagctccacatcctcctcctattctcccctctcccctcttcaaacccccaccttccagttccctcacctcccctttcggctggtcccctggggcttgcagcaagagggagagagagctcctgacaggattgatggtccttccccaccctgtcctctcatccgctccctccccagcaggcacagacatccccctacaaaaggcaggagcccaggctgtgtggaaacagctgctctcagacgcctttccatttgctctctgctggctaggctgggctgtgcctctgctccctcttcctctagctgagagtgggcacctggggtaccgggcccccccacctcattccccatgaatgctgtgggaagtcctgaggggcaggagctgcacaagctggggagtggagcctgggacaaccccgcctacagtggtcccccttccccacacgggacgctgagagtctgcaccatctccagcacggggcctctccagccccaacccaagaagcctgaagatgaaccccaggagacggcatacaggacccaggtgtccagctgctgcctccatatctgtcaaggcatcagaggactttggggaacaaccctgactgagaacacagctgagaaccgggaactttatatcaagaccaccctgagggagctgttggtatatattgtgttcctggtggacatctgtctactgacctatggaatgacaagctccagtgcttattactacaccaaagtgatgtctgagctcttcttacatactccatcagacactggagtctcctttcaggccatcagcagcatggcggacttctgggattttgcccagggcccactactggacagtttgtattggaccaaatggtacaacaaccagagcctgggccatggctcccactccttcatctactatgagaacatgctgctgggggttccgaggctgcggcagctaaaggtccgcaatgactcctgtgtggtgcatgaagacttccgggaggacattctgagctgctatgatgtctactctccagacaaagaagaacaactcccctttgggcccttcaatggcacagcgtggacataccactcgcaggatgagttggggggcttctcccactggggcaggctcacaagctacagcggaggtggctactacctggaccttccaggatcccgacagggtagtgcagaggctctccgggcccttcaggaggggctgtggctggacaggggcactcgagtggtgttcatcgacttctcagtctacaatgccaatatcaatcttttctgtgtcctgaggctggtggtggagtttccagctacaggaggtgccatcccatcctggcaaatccgcacagtcaagctgatccgctatgtcagcaactgggacttctttatcgttggctgtgaggtcatcttctgcgtcttcatcttctactatgtggtggaagagatcctggagctccacattcaccggcttcgctacctcagcagcatctggaacatactggacctggtggtcatcttgctctccattgtggctgtgggcttccacatattccgaaccctcgaggtgaatcggctcatggggaagctcctgcagcagccaaacacgtatgcagactttgagttcctcgccttctggcagacacagtacaacaacatgaatgctgtcaacctcttcttcgcctggatcaagatattcaagtacatcagcttcaacaaaaccatgacccagctctcctccacgctggcccgctgtgccaaggacatcctgggcttcgccgtcatgttcttcattgttttcttcgcctatgcccaactcggctacctgcttttcgggacccaagtggaaaactttagcactttcatcaagtgcattttcactcagttccggataatcctcggggactttgactacaatgctatcgacaatgccaaccgcatcctgggccctgcctactttgtcacctatgtcttcttcgtcttcttcgtgctcctgaacatgttcctggccatcatcaatgacacatattcagaggtcaaggaggagctggctggacagaaggatgagctgcaactttctgacctcctgaaacagggctacaacaagaccctactaagactgcgtctgaggaaggagagggtttcggatgtgcagaaggtcctgcagggtggggagcaggagatccagtttgaggatttcaccaacaccttaagggaactgggacacgcagagcatgaaatcactgagctcacggccaccttcaccaagtttgacagagatgggaatcgtattctggatgagaaggaacaggaaaaaatgcgacaggacctggaggaagagagggtggccctcaacactgagattgagaaactaggccgatctattgtgagcagcccacaaggcaaatcgggtccagaggctgccagagcaggaggctgggtttcaggagaagaattctacatgctcacaaggagagttctgcagctggagactgtcctggaaggagtagtgtcccagattgatgctgtaggctcaaagctgaaaatgctggagaggaaggggtggctggctccctccccaggcgtgaaggaacaagctatttggaagcacccgcagccagccccagctgtgaccccagacccctggggagtccagggtgggcaggagagtgaggttccctataaaagagaagaggaagccttagaggagaggagactctcccgtggtgagattccaacgttgcagaggagttaagtgtgaggcactcccggagcaaagtctatgaaggatcttctgcaagaggctgcctcctggtccactgaacctggaaactgagtgggctttaaccaggagataaaaatggagcctgaagggaatcaggcaaggaaatgaactcaggattcagagatctttgaattaatatgtggtgggttctgacattattcttccataagaccatgtgggtttccatggtggctatcaataaaactccttaggaaaacttnannnnnna

SEQ ID NO: 33692 - DNA, 960 bp, Homo sapiens
  misc_feature (952)..(952): n is a, c, g, or t
  misc_feature (954)..(959): n is a, c, g, or t
cagcatcgccttttcctcccgtttctccttccactcccagctccacatcctcctcctattctcccctctcccctcttcaaacccccaccttccagttccctcacctcccctttcggctggtcccctggggcttgcagcaagagggagagagagctcctgacaggattgatggtccttccccaccctgtcctctcatccgctccctccccagcaggcacagacatccccctacaaaaggcaggagcccaggctgtgtggaaacagctgctctcagacgcctttccatttgctctctgctggctaggctgggctgtgcctctgctccctcttcctctagctgagagtgggcacctggggtaccgggcccccccacctcattccccatgaatgctgtgggaagtcctgaggggcaggagctgcacaagctggggagtggagcctgggacaaccccgcctacagtggtcccccttccccacacgggacgctgagagtctgcaccatctccagcacggggcctctccagccccaacccaagaagcctgaagatgaaccccaggagacggcatacaggacccaggtgtccagctgctgcctccatatctgtcaaggcatcagagaggttccctataaaagagaagaggaagccttagaggagaggagactctcccgtggtgagattccaacgttgcagaggagttaagtgtgaggcactcccggagcaaagtctatgaaggatcttctgcaagaggctgcctcctggtccactgaacctggaaactgagtgggctttaaccaggagataaaaatggagcctgaagggaatcaggcaaggaaatgaactcaggattcagagatctttgaattaatatgtggtgggttctgacattattcttccataagaccatgtgggtttccatggtggctatcaataaaactccttaggaaaacttnannnnnna

SEQ ID NO: 33693 - DNA, 1862 bp, Homo sapiens
  misc_feature (1854)..(1854): n is a, c, g, or t
  misc_feature (1856)..(1861): n is a, c, g, or t
tgagacaaagtcctgctctgttgcccaggctggagtgcagttgcacaatctcggctcactgcaacctcagcttccccggggtcaagcaattctcatgcctcagcctcctgagtagctgggactacagtcatgtgccaccacgcccggctaatttttgtatttttggtagagatgggattttgccatgttggccaggctggtctcaaactcctggcctcaagtgatccacccacctcagcctcccaaagtgctgggattaggagacaacgtaattaaatgggacaaagtctttgttttctaagagctcatagacttgcaaataaactgaatcacagaataagttcaacagaagtgactaggagtagagggtgatcaattctatctctgagcttaagggaaggcttcctggaagaggtaatgtctaaataggatattggaggatgaatagctcacaagtggacaagcagaggaaggctcttccaagaagagatgaaagcacatacaaaagcatagaggtctgaaaccaagcaacatacacaggaggaataagtagttgagcattgctaagtattaaataaaggggcggggacaggtgggggtcatagcaggagatgagaccagagaaacaggcaaggacccactgagaaaggccacactaccactctgccaaaagaatagggtgccagaagggatttcaaaaaggcacatttttagatctgcatattagaaaggttaattactctagttgtattatggaggatggatttcaggggtagggagtaaaggggaagctgggggatagcaggttatttagaggcaaacagattttgcaataatccctgtaggaggtcatgaggccctgaacctggtgagcaggagtcaggagaggaagaagaaactgaactgaactgagtgttttcctgggggtaagattgctagactttggagaaccttctttaccagaagcaaaacttttgccagagtcaagcaaaagagtgaggaagtccataactgagaggtcacagccacagctgggcagaaatcatttcatcatcctcttctcagactgggacacgcagagcatgaaatcactgagctcacggccaccttcaccaagtttgacagagatgggaatcgtattctggatgagaaggaacaggaaaaaatgcgacaggacctggaggaagagagggtggccctcaacactgagattgagaaactaggccgatctattgtgagcagcccacaaggcaaatcgggtccagaggctgccagagcaggaggctgggtttcaggagaagaattctacatgctcacaaggagagttctgcagctggagactgtcctggaaggagtagtgtcccagattgatgctgtaggctcaaagctgaaaatgctggagaggaaggggtggctggctccctccccaggcgtgaaggaacaagctatttggaagcacccgcagccagccccagctgtgaccccagacccctggggagtccagggtgggcaggagagtgaggttccctataaaagagaagaggaagccttagaggagaggagactctcccgtggtgagattccaacgttgcagaggagttaagtgtgaggcactcccggagcaaagtctatgaaggatcttctgcaagaggctgcctcctggtccactgaacctggaaactgagtgggctttaaccaggagataaaaatggagcctgaagggaatcaggcaaggaaatgaactcaggattcagagatctttgaattaatatgtggtgggttctgacattattcttccataagaccatgtgggtttccatggtggctatcaataaaactccttaggaaaacttnannnnnna

SEQ ID NO: 33694 - DNA, 418 bp, Homo sapiens
ccaagagagtaggcggtatctagatgtcttcctacttcccagtgaatcctattcttatcctttgtgcatcccaagatttgttgctagcacccatgggtttctcgttttcccccacagaggttccctataaaagagaagaggaagccttagaggagaggagactctcccgtggtgagattccaacgttgcagaggagttaagtgtgaggcactcccggagcaaagtctatgaaggatcttctgcaagaggctgcctcctggtccactgaacctggaaactgagtgggctttaaccaggagataaaaatggagcctgaagggaatcaggcaaggaaatgaactcaggattcagagatctttgaattaatatgtggtgggttctgacattattcttccataagaccatgtgggtttccatg

SEQ ID NO: 33695 - DNA, 377 bp, Homo sapiens
catgcctttgggaaatgtagtcactccagggaggctgctggggagtgttggccacaggggacagataggaaaggccttgagagctctggggagtaaactccatttcaagatataaaattcccagaaattttgaaatcacaggcattttcattttgaacactgtttataaatcttaaaatcatgttgtgagtttaaaagtcatttataccttgatttggtcattgcattaccataaactgtatttgttctatttagagctgtaaaggcctagggggtgaggtagggtgcctatagtaagggaactttctggattctgtttttttttgtttgtttgtttgtttgtttgtttttgagacgagtcctgctctgtcacccag

SEQ ID NO: 33696 - DNA, 128 bp, Homo sapiens
ccccctcagactccatcttcacgtgagtcttatccttcttcgaggagctgctggtctgctcctcttcagacttagcattctttacctctactccttgcttgcaatgttccttttcaattttttccagg

SEQ ID NO: 33697 - DNA, 347 bp, Homo sapiens
tcaattcttttctactcatctcattgagagatagagttgaattcatcttcccttgtatctaggctgcacttattcgtttgcttgaccaatggaatgtggctgagtggccgtgtaaaatgcctgactaccctgagactgccatgttgaaggaagcccagctagccatgtggagaggccttgtggagcgggaaatggccaacctccatccattggaagtcatcccatttgaggccctagatactgaaaatcagaaagaagttacttcccattccccacctcaaggccctgtccaaactgaagattcatgggcagaataaacaattgctattttttaaaggtgtatgttt

SEQ ID NO: 33698 - DNA, 488 bp, Homo sapiens
gcccaaagtgggatgcttgctttgctcacattgattgcgtctcccagtgcctccccgcgcctcatctctgtcgtcatcctttttctactgcaggctcatcagagaacacaagtagctcacagcaccctggagagggaaggaggtttgtgcagctaaaatatctgactcctaaaatggagtttcctgaaattattccttactcatagtgtaatgaggtgtatgtgttggatctattataactttctttcgctccgtctctcagaatagatgatcatcctcatctttgcatcatattccaattagaaagggatgatacaacaagaaagctctcgtaagatgtcagctgcttgattttggacttcgcaaactctagaacttttctcttgcttgctcctgccatgtaagaagtacctttcgtttccggccatgattctgaggcctccccagctgtgtggaactaatatggcagatataacagcacgtaattt

SEQ ID NO: 33699 - DNA, 222 bp, Homo sapiens
ttttgggtaaatttgcctggcttcagggcgaaggccctccagcaccaagagctgcctagtactgcagattcttacgaccactcaaatctttctttcctttataagaaacaagcaactctaccctatggttgagccaatgtgtcagtttcttcctatccaaatggatggcatcctgacatctgcagtgagaggccaatgcaatttggtgggggtaggggcaag

SEQ ID NO: 33700 - DNA, 1179 bp, Homo sapiens
  misc_feature (308)..(308): n is a, c, g, or t
atggtcctcctcagtattcttagaattctttttctttgtgaactcgtgcttttcatggaacacagggcccaaatggcagaaggagggcagtcctctattgcccttctggctgaggcccctactttgcccctgattgaggagctgctagaagaatcccctggcgaacagccaaggaagccccggctcctagggcattcactgcggtacatgctggagttgtaccggcgttcagctgactcgcatgggcaccctagagagaaccgcaccattggggccaccatggtgaggctggtgaagcccttgaccantgtggcaaggcctcacagaggtacctggcatatacagatcctgggctttcctctcagaccaaaccgaggactataccaactagttagagccactgtggtttaccgccatcatctccaactaactcgcttcaatctctcctgccatgtggagccctgggtgcagaaaaacccaaccaaccacttcccttcctcagaaggagattcctcaaaaccttccctgatgtctaacgcttggaaagagatggatatcacacaacttgttcagcaaaggttctggaataacaagggacacaggatcctacgactccgttttatgtgtcagcagcaaaaagatagtggtggtcttgagctctggcatggcacttcatccttggacattgccttcttgttactctatttcaatgatactcataaaagcattcggaaggctaaatttcttcccaggggcatggaggagttcatggaaagggaatctcttctccggagaacccgacaagcagatggtatctcagctgaggttactgcctcttcctcaaaacatagcgggcctgaaaataaccagtgttccctccaccctttccaaatcagcttccgccagctgggttgggatcactggatcattgctccccctttctacaccccaaactactgtaaaggaacttgtctccgagtactacgcgatggtctcaattcccccaatcacgccattattcagaaccttatcaatcagttggtggaccagagtgtcccccggccctcctgtgtcccgtataagtatgttccaattagtgtccttatgattgaggcaaatgggagtattttgtacaaggagtatgagggtatgattgctgagtcttgtacatgcagatga

SEQ ID NO: 33701 - DNA, 749 bp, Homo sapiens
agctatggaacctgagcgacaccttgatttgtgttgtcacctgaccaagcctaaagacctccagctcagtcccccaccttcatcccaccccacagatgataaaattcagacctctctcctgaaaggcagaggttcaacattcaggactgtttctggccgaggacttcttccaattaaaacccccaccgtgggctgtctcccctcatttcatttttctaaaggggcagaggcctcttttagaaaataataaaatgcaatgtgtgtgatttacttttctgatctctttgagaaatagagaaatataaaagtgtgttcttaactccagaaccactctttttgcataaatacctcatcgggcagctttctaagtgtgattttcctgagtctcccttcgttggatctgccggaagacttgtcggggaacctttagtgagggtacttcttcctatttttcttctgtttttggaggcatacacattatgcataaccaaaacaatggctcaattgtgtttaactttgtattttgattgttgagaacaaaaacaaaaagtatcaatgtgtatgtggctgtttgtagtgaatttattggagaatgaggttgtccgtgtccttaacaagccaaggggcaggaggcaccctctcttatcccctcctccaagagcagtagagaatttaagcacaagcctatttgtgaaagaatattttgcttaagtgtcattcactttagtcttggaattccttcccaaacg

SEQ ID NO: 33702 - DNA, 509 bp, Homo sapiens
aagtgtagcaaatggaacggccaggtgagaggccagagagatctaagaatgtcctgaaggaggtgagatttgcccttgaccttgatggagtggtcagacttgggaaagaagatgaataaagcctatataaactgagagttaagagtgaagactggagacagatggctttggcttaaatcgcagttctgctgcttgctatctgtgtgaccttgggtaagttacttaacctcagtttcccagttatgacatgggaatgataacaatggtgtcggtctcttgggttgctttgaggttatttgaaataatacctgtaaagcacacagctaaaaaggaggaatgatggtggtgatgcagggagaccaaagagtgaaacagtctagagtgaagcgaatgtgttaaaatccagaggcgatcaagtgaagccagcctttggaggcccgtagaagtcatttggaggaatttggacttcgtgcagtaggaaagagggaaaactgtttttagaaaaaaaa

SEQ ID NO: 33703 - DNA, 352 bp, Homo sapiens
gactctgcaacatgtgttcttaaccatcagactttatttctctggtgggcaacacaggtagatgtgacaggttagaagtattagatataaatataagttatcgagatgatatgactaccgaattcactactgcactttttttacttttttaaaaacatgtatttcagcacactgctaaaccacagcaagaatctttttaaaaagaccttacaagaagcatgattacaggtcacaaaatcaagggaaaatattgtcatcattattttttaataagtgataagtgaggctgatgagtgtagacctgttgctttattaatagaaatatgtgcatctggtgaggacttgtatttgc

SEQ ID NO: 33704 - DNA, 1095 bp, Homo sapiens
  misc_feature (204)..(204): n is a, c, g, or t
atggcccagcagtggagcctccaaaggctcgcaggccgccatccgcaggacagctatgaggacagcacccagtccagcatcttcacctacaccaacagcaactccaccagaggccccttcgaaggcccgaattaccacatcgctcccagatgggtgtaccacctcaccagtgtctggatgatctttgtggtcattgcatccgtnttcacaaatgggcttgtgctggcggccaccatgaagttcaagaagctgcgccacccgctgaactggatcctggtgaacctggcggtcgctgacctggcagagaccgtcatcgccagcactatcagcgttgtgaaccaggtctatggctacttcgtgctgggccaccctatgtgtgtcctggagggctacaccgtctccctgtgtgggatcacaggtctctggtctctggccatcatttcctgggagagatggatggtggtctgcaagccctttggcaatgtgagatttgatgccaagctggccatcgtgggcattgccttctcctggatctgggctgctgtgtggacagccccgcccatctttggttggagcaggtactggccccacggcctgaagacttcatgcggcccagacgtgttcagcggcagctcgtaccccggggtgcagtcttacatgattgtcctcatggtcacctgctgcatcaccccactcagcatcatcgtgctctgctacctccaagtgtggctggccatccgagcggtggcaaagcagcagaaagagtctgaatccacccagaaggcagagaaggaagtgacgcgcatggtggtggtgatggtcctggcattctgcttctgctggggaccatacgccttcttcgcatgctttgctgctgccaaccctggctaccccttccaccctttgatggctgccctgccggccttctttgccaaaagtgccactatctacaaccccgttatctatgtctttatgaaccggcagtttcgaaactgcatcttgcagcttttcgggaagaaggttgacgatggctctgaactctccagcgcctccaaaacggaggtctcatctgtgtcctcggtatcgcctgcatga

SEQ ID NO: 33705 - DNA, 383 bp, Homo sapiens
atcggcttctggggaggcctcaggaagctttcaatcatgacagaaagtgaaaggggagcaggtggatagtgggagcaggagcaagagagagggagatgctacacacttttaaacagccagatctcatgagaagtcacttgttattgcaaaaacagtaccaagaagatggtgctgaggcatttgtgagaaatccatcaccgtgatccaataacctcccaccaggccccacctctaatcctgggattacaattcaacatgagatttggggaggacacgcatccaaactatatcagcccctcagattatttatgtagaaaatgcaggtgatcactacctaccttgttgtgttgttatgatgattatagataatggcattattttta

SEQ ID NO: 33706 - DNA, 321 bp, Homo sapiens
aaaattaagggggaagtggtgagataattaggtaggaacacacgcttataagttctatccccaaaatacagagtgtgaataattatataaggagatgaaatatgagtaaatatggatattacaaccttctttgaaattaggccttatactgtttaatgtcattttaataatcttgtggtttattctataatgtattttccaaattgctgtagaaagcctgaaggcacatgtacaatgaaatcattcagcaaagttttttaaacaattgataatagtaataaaatgaaaactggctgtgcttaactgtaattcacagtgaga

SEQ ID NO: 33707 - DNA, 569 bp, Homo sapiens
ggtctgcatttacttgccttttctaagtgtaactttatgaataattgatggaactgggaagttattggctgattgaaaagccatctcttcatgtctgtaagtctgacctatgggtaaagccaactgttcaggcttttagggtctttaatgaaaggtctttataaaaagcctttcactctttataaggaaaaaaaaatcagattttgaaaatgggattttttttctgacaatagtacattagaaaccaatccagccaggtttttggttaataaatgaatcaagctgactgcatgactaattcagattaatggtgcagaaatcagtcactaaagaagccccaaaaaagtttgctttaatagtcttaacagaatgatcataaattcggatctcccctcctattactgctctctgtgtttaaaacgcttgaaagccctagtaaacatctcctccgcctaagtagatgcagtgtatatgctataaaacaaggcaaagtctccagcaggatgcagatctgttagctgtattatgttttattactaccattggcttacttgaagccaggcttttat

SEQ ID NO: 33708 - DNA, 353 bp, Homo sapiens
aatgtggcatgacaaaagatgccattaaaaatgtaaaaggcaaatgacggagtaagaaggaatattttcagtgcatataatagatgaagacttaatatctttgctcttcagggagctgtcatgaaactgataaggatcagtgacccacccaaaaagcaggtgaagagtgtttagtcagttcacagaagaacgtatctaaatggccagtaaacaacacttcaaggaaataaaaataacaagttagtacttcttattgctggccaattcaaagaaagaggtgcattccttcattactggtagaaaaagaaattgttacagcctgggcaacaagagtgaaactctgtctcaaaaaa

SEQ ID NO: 33709 - DNA, 520 bp, Homo sapiens
tgccagggctacatttcttaatgacaggagaaagcatgaggacttagaaccaacttctttgatgtcggtctgcacccctccttcagaaggacaatgagctcctgggaggctttggtcgttgggtgtgatgtggttgtctgatcctagaaaagaggccgctcaggatgggaagaagatttcaacccctgcgtgtccgacgcagctcccaacgtcgctgaggccttcagaaacccaaagtggcatcgctaggaaaacgactgacaaccggtcacacgacccaggcagagacccagaaagaggctcaccaaagacaggctgacatacaagaaaccaccctccagcgcacagggcacattagtcccaaacacgcacacgaacacacacaaagaaagagacagagaaacaggagagaaagagagacatacacacacagagacatacagcagtggcacagaaacacccacctccaggcagccccagaggctgccgggttctgctctcggcaagaatgaccctcggg

SEQ ID NO: 33710 - DNA, 2087 bp, Homo sapiens
  misc_feature (1038)..(1038): n is a, c, g, or t
  misc_feature (1162)..(1162): n is a, c, g, or t
  misc_feature (1171)..(1171): n is a, c, g, or t
agaaaagatgtgttcatctaattcactattctccaaatacagaatagtttctctatgataaagcactggcatcttatcatgacggagagggtagtagccttgaatgatgttttaactggtaattgcttttatatcaaacacttttcagctgattatgaacaagattcagcctaattttaaagctaaaattaaaaatacgtggggcctcagttttacctataaacatgtaatgaaaaggtgtttttatttttttcctgtggcctctcaaggaagaaatgattctatctttaacacgtttttatttattttatgaatgggcaaatatcctaacaaaaagaaacacacgtcttaccattcatcttgggagagaaggctattgcttgataactaaggaatactatttttgaagcacctttacagtacttgacatgtcagttatgttttcaatgttcagccctatgtcagcctgcaggaatttctcatctgcccatgtctgtctattcatattggtaagtttcagcacagccctctttaaaacttcattgtgttactaatatttaatttttaagttttaaaatctagcacttctgtgctagatcctcgaatcaatttttacattcttttgaaatttatagtaatatttttgcctcatccctatactcaataattggcagtgagctatattatcacttaagtaactttattaccaattgtgctatattctaccatcacaaagtattcttttaaggcattcttcagatactgtcattttcattggtgtcttccagaacgattctataaaaactctgtaagattagcccttttactgttatgtgaaagaaacagggtaacatgatgggcaaaaaacttgagactgaaattttacgtgtaacactgtcatgtgttcattcaaaaaaaaataatttaacttctgtgtgttgctatctctgcctttaaaatacagtagtggtgccgtatctcatgtagacaggttgtgaaatccaaaaaatgtattttacatgttctcggtttttaagncttacaaggttcttttccagctagaatcttctttgaagaacaggaaacaaagaagacttttcctggcctcctcttagactctggagtagggtaactaaaagataaatcagctacttcttaaaanttccaactnccaatcatatcaagaataacatttcaaacaaagcataccaatgaaaattcaaggtatcttgtaacttcccccccaccttttcgggagctgggaggggttaccaagctgttcccaaagctgaaggaaaagaaggcatagtgtgcctcagcaactttcctgagctccgtatttccttgactgcagtttgtgttacctataaagggagatttatcatatcttggtgccaaagctcaaaaattactgggtaaaatatatacatccccatgtatgctgcttaaatacacacatgaacatataattcaaattttcactgtgctatatttaagtaggtaagacaagaaagacaaaatctctgaattgaagcagatatgaagcatataaatgatagtacttcctttttatttagtgcctttactttttgaaatttttgcacgtaattttatttcatcctgacaactttaaatagttcataagacaagtatacactttataaatgtctaagacacagagaggcaaaggtaaatgcttaaaggttgttggactataatggcaattagctaacttcctgaattatctcctttacaggaattcccttttaaaatattatatacagatatatacagacacacacaagaagtatatattcataaatattcttaaaaattaaggttatcaatatgaagtgtgtcagtcccttggaggaattagtttaacttcgttgtagatggaccagatttgaaatgagcaaaaagtctatgcctaaatttttcaaataaaaagagcattgaaaaacatcttgatttccctctccttgccccctaccaatcctagtaggattgtgctttcaatcagagactctgccttcaatctgagtgacatcagactcagagcccacactttaaggcaaaaaaaaaaa

SEQ ID NO: 33711 - DNA, 371 bp, Homo sapiens
tgtaaaacagtacataaatggaccagaaaagggtctttatcctggtgaatattttagaatctatactaactcatggaggtaaaggcaaacattactattcttcattcaatcaatacttgctgatcacataccacatgtcaagcattaaatacagaggatacagcagtgaacaagttcctgccttcttggagcttatgttctaagttaggaagacaaggaaacaagtaaacataatatgtaacgcataaacatataatatggtgattcagtgctatcaataaagtaggtggaatgggatacccaattttgaaaaaaatatagaaaaaaagttttaataaaaaataaagctgggaagcaaaatgagatgggtg

SEQ ID NO: 33712 - DNA, 380 bp, Homo sapiens
gaattccaggagatacagttgaagttgagatttgaatggggacacagccaagccatatcacacagtttgggtgaaggatacttaataagggagggcgcaacatacaaaaactgcaacatctggctgccatcagctcctccaccagcgcccccgcgtgggaattagtggagcgccagacagtcctaaggtcaagtcagtcctaaacttgcagttgtttgtgagacttacatcacttaatttcacaaacctcactgttcaaatggggacaatcaggcttatgagtagttgtgggtgtcaaatgaatgttcgtatgaggtctggcatcacaatgagtattttaatggatcttatccagatgcctccagatgctattggataaa

SEQ ID NO: 33713 - DNA, 415 bp, Homo sapiens
ttttttgaagatgacatgattgtctatgtaggaaacctttggaatctacaaaaaattttaaaaattactagaatcaataagtgagtttaacaaggttgcacgatgcaagatctctgtataaaatcaattatatttctatcttctagcaatgaataaccagaaattgaatttcaaaacaataccatcagtgatgcaggaaactctgtgagtttgcaagaggcagaataatgacccccaaatacgcccatgtcctaatccccagaacttgagcatatgttaccctacgtggcaaatggaactttgcagatgtgattaaggacctgcagtgaaggagatttatccaagtggacctaatctaatcacatggatagcagataatttttttctgctctgtcagaggtgtgactactgaaga

SEQ ID NO: 33714 - DNA, 273 bp, Homo sapiens
gcccctttctacacagtttttctcagccagattgggctccaggtgcctgcaatagtaacttgctcatttacatgtgctgtgtatttaactcttacccttgtaacttcacttcctcattgcccagttaatgctttctcagacctcctcccacatggactactttactcagattcttatctcagtgtagatttctgggtaaacctaaattaagacagttgctaacaaaaatgagtatagagagcagacttcagggtgagattctgggaatcgagg

SEQ ID NO: 33715 - DNA, 494 bp, Homo sapiens
gatctccaaggattttcatattgccaagcagtcacataatataaactaaatgagttcccaaatgagttgtgtcaagtgtccatgttgttttttagagtcaagatatatttagtttaaatgtgaaaagaaatttcaagtagtctttctgtttcagtcaacagtctgtgaaatgccaaatactcactattgttacattggcttcttaggaaaactgcccctaggtactatggcttgtgttgattttcagtgaagccagccttgtttatcctgggtctacaaatgtttggacactataaagactagacatgaaggaggctgacctcctgtcagctaggagtgggcataaaattcaagccaattttgggcactccattttgaatgggtggatttttgggtcctaataaccttctctctgtcttggaaagtaagacgcattgtgaattaagagaattcaggtcattagagtttaggcatgattccagttttccataagg

SEQ ID NO: 33716 - DNA, 292 bp, Homo sapiens
gtctcaagggaaaaaaaaaaggaaaactgattattccacaaaaatgttacaattcatcaatcaattcggcaaagtaacaggatgcaacatcaacatataaatttagttgtatttctatacattaaaagtgaactttctgaaagaaaattaggaaaacattccaatttgcaatagcataagaaagaataaaatacttgggaataaacttaagaggtgttattagtccgtttccactgctgtaaagaaatatctgagaccgagtaatttataaagtaaagaggtttaatgttta

SEQ ID NO: 33717 - DNA, 580 bp, Homo sapiens
ttttttgagagggactctcgctctgttgcccaggctggagtgcagtggcgcgatctcggctcactggaacctctgcctcccaggtttcaagtgattctcccgccttagcctcctgagtagctgggattacaggtgcctaccaccacgcccagctaatttctgtattttagtagagatgggatttcatcatgttggccagggtggtctcgaactcctgacttcaagtgatccacccacctcggcctcctgacgtgctgagattacaggcgtgagccatggtgcatggccatgtgaataaattttattgattttttttcttttatgaaggaattatctttgaacctatagtctaacttatatagaatactttttttttcctttttcttttcttttcttttcttttttttgagacacagtcttgctctgttgccaaggctagagtacagtggcacaatcttggctctctgcaacctccacctcccgggttcaaacgattctcctgccttagcctcccgagtagctgggactacaggcacccgccaccacgtccggctaatttttgtatttttagtagagatag

SEQ ID NO: 33718 - DNA, 3093 bp, Homo sapiens
gatttcagttgaaagatgtgtttttgtgagtagagcaccgcagaagaactgaagactgttgtgtgctccccgcagaaggggctaccatgatcctttcctcctataacaccatccagtcggttttctgttgctgctgttgctgttcagtgcagaagcgacaaatgagaacacagataagcctgagcacagatgaagagcttccagaaaaatacacccagcatcgcaggccgtggctcagccaattgtcaaataagaagcaatccaacacgggccgtgtgcagccgtcaaaacgaaagccactgcctcccctcccaccctctgaggttgctgaagagaagatccaagtcaaggcactttatgattttctgcccagagaaccctgtaatttagccttaaggagagcagaagaatacctgatactggagaaatacaatcctcactggtggaaggcaagagaccgtttggggaatgaaggcttaatcccaagcaactatgtgactgaaaacaaaataactaatttagaaatatatgagtggtaccatagaaacattaccagaaatcaggcagaacatctattgagacaagagtctaaagaaggtgcatttattgtcagagattcaagacatttaggatcctacacaatttccgtatttatgggagctagaagaagtacggaggctgccataaaacattatcagataaaaaagaatgactcaggacagtggtatgtggctgaaagacacgcctttcaatcaatccctgagttaatctggtatcaccagcacaatgcagccggtctcatgactcgtctccgatatccagttgggctgatgggcagttgtttaccagccacagctgggtttagctacgaaaagtgggagatagatccatctgagttggcttttataaaggagattggaagcggtcagtttggagtggtccatttaggtgaatggcggtcacatatccaggtagctatcaaggccatcaatgaaggctccatgtctgaagaggatttcattgaagaggccaaagtgatgatgaaattatctcattcaaagctagtgcaactttatggagtctgtatacagcggaagcccctttacattgtgacagagttcatggaaaatggctgcctgcttaactatctcagggagaataaaggaaagcttaggaaggaaatgctactgagtgtatgccaggatatatgtgaaggaatggaatatctggagaggaatggctatattcatagggatttggcggcaaggaattgtttggtcagttcaacatgcatagtaaaaatttcagactttggaatgacaaggtacgttttggatgatgagtatgtcagttcttttggagccaagttcccaatcaagtggtcccctcctgaagtttttcttttcaataagtacagcagtaaatctgatgtctggtcatttggagttttaatgtgggaagtttttacagaaggaaaaatgccttttgaaaataagtcaaatttgcaagtcgtggaagctatttctgaaggcttcaggctatatcgccctcacctggcaccaatgtccatatatgaagtcatgtacagctgctggcatgagaaacctgaaggccgccctacatttgcggagctgctgcgggctgtcacagagattgcggaaacctggtgaccggaaacagaatgccaacccaaagagtcatcttgcaaaactgtcatttattgtgaatatcttcaccatatggggtcacttatggtgaatatctttcttcagagttgctgactcttgaaaacagtgcaaagatcacagtttttaaaagttttaaaaatttaagaatattcacacaatcgtttttctatgtgtgagagggatttgcacactcttatttttctgtaaaatatttcacatcccaaatgtgaagaagtgaaaaagacttcgcagcagtcttcattgtggtgctcttcatgatcatagccccaggaacccttgaggttcttcttcacaaggctgagagtgcttccttcttgaagacgagtgtcattcatcacttcagtgatccatgcatagaatatgaaaataaattcttccaactcatgggataaaggggactcccttgaagaatttcatgtttttgggctgtatagctctttacagaaaatgcacctttataaatcacatgaatgttagtattctggaaatgtcttttgttaatataatcttcccatgttatttaacaaattgtttttgcacatatctgattatattgaaagcagtttttttgcattcgagttttaaacactgttataaaatgtagccaaagctcacctttgaacagatcccggtgacattctatttccaggaaaatccggaacctgattttagttctgtgattttacactttttacatgtgagattggacagtttcagaggccttattttgtcatactaagtgtctcctgtaattttcaggaagatgatttgttctttccagaagaggagacaaaagcaagatagccaaatgtgacatcaagctccattgtttcggaaatccaggattttgaattcgagatgaaacaaccagcaatcacagttaaatcttaactttgcctgcactctttgtaggaatgatcagaaatttatctttatcattctgagtgcttcaggagtacaataggaagaaagatactggagaaagcactagtgtaatcaccatgaagtctgacaacaggagcccattatttgcgtactgtcccaccctgtatcatggttctctgggaacaagcttttatgattctcattagagtttatttgttgattgtcagtagtttgcgacttttaaattatatttcccccactcaaagaatggtatctttatatatcaatgacattcaataaatgtgtattatttctaatgagaatcagttacaagaggagacttgatagttcaagtagtggtctcagaaatgtttgggctgaatgtggtggctcatgcctataatcccagcactttgggaggccaaggtgggaagataacttgagcccagtttgagaccagcctgggcaacaaagtgagatcctatctctattacaagaa

SEQ ID NO: 33719 - DNA, 2113 bp, Homo sapiens
agttcaaacatttaaaaatgcaaacacaattctgctcactggtgtatgtttttcttcaccaggaaattatctcattcaaagctagtgcaactttatggagtctgtatacagcggaagcccctttacattgtgacagagttcatggaaaatggctgcctgcttaactatctcagggagaataaaggaaagcttaggaaggaaatgctactgagtgtatgccaggatatatgtgaaggaatggaatatctggagaggaatggctatattcatagggatttggcggcaaggaattgtttggtcagttcaacatgcatagtaaaaatttcagactttggaatgacaaggtacgttttggatgatgagtatgtcagttcttttggagccaagttcccaatcaagtggtcccctcctgaagtttttcttttcaataagtacagcagtaaatctgatgtctggtcatttggagttttaatgtgggaagtttttacagaaggaaaaatgccttttgaaaataagtcaaatttgcaagtcgtggaagctatttctgaaggcttcaggctatatcgccctcacctggcaccaatgtccatatatgaagtcatgtacagctgctggcatgagaaacctgaaggccgccctacatttgcggagctgctgcgggctgtcacagagattgcggaaacctggtgaccggaaacagaatgccaacccaaagagtcatcttgcaaaactgtcatttattgtgaatatcttcaccatatggggtcacttatggtgaatatctttcttcagagttgctgactcttgaaaacagtgcaaagatcacagtttttaaaagttttaaaaatttaagaatattcacacaatcgtttttctatgtgtgagagggatttgcacactcttatttttctgtaaaatatttcacatcccaaatgtgaagaagtgaaaaagacttcgcagcagtcttcattgtggtgctcttcatgatcatagccccaggaacccttgaggttcttcttcacaaggctgagagtgcttccttcttgaagacgagtgtcattcatcacttcagtgatccatgcatagaatatgaaaataaattcttccaactcatgggataaaggggactcccttgaagaatttcatgtttttgggctgtatagctctttacagaaaatgcacctttataaatcacatgaatgttagtattctggaaatgtcttttgttaatataatcttcccatgttatttaacaaattgtttttgcacatatctgattatattgaaagcagtttttttgcattcgagttttaaacactgttataaaatgtagccaaagctcacctttgaacagatcccggtgacattctatttccaggaaaatccggaacctgattttagttctgtgattttacactttttacatgtgagattggacagtttcagaggccttattttgtcatactaagtgtctcctgtaattttcaggaagatgatttgttctttccagaagaggagacaaaagcaagatagccaaatgtgacatcaagctccattgtttcggaaatccaggattttgaattcgagatgaaacaaccagcaatcacagttaaatcttaactttgcctgcactctttgtaggaatgatcagaaatttatctttatcattctgagtgcttcaggagtacaataggaagaaagatactggagaaagcactagtgtaatcaccatgaagtctgacaacaggagcccattatttgcgtactgtcccaccctgtatcatggttctctgggaacaagcttttatgattctcattagagtttatttgttgattgtcagtagtttgcgacttttaaattatatttcccccactcaaagaatggtatctttatatatcaatgacattcaataaatgtgtattatttctaatgagaatcagttacaagaggagacttgatagttcaagtagtggtctcagaaatgtttgggctgaatgtggtggctcatgcctataatcccagcactttgggaggccaaggtgggaagataacttgagcccagtttgagaccagcctgggcaacaaagtgagatcctatctctattacaagaa

SEQ ID NO: 33720 - DNA, 251 bp, Homo sapiens
tacctgatactggagaaatacaatcctcactggtggaaggcaagagaccgtttggggtaagacacttacatgacttagtcagtatccaattcttccaacacaaagaagactacttagtgactcaggcttataactcttccctctgcatgaaatggaatctgtcccctctcccccaggatgtgtgagagaatgagagaacagtgatttcaggcagagtctcagaaccagatacacctggcttcacatcctga

SEQ ID NO: 33721 - DNA, 613 bp, Homo sapiens
cacactggtgaaggtgcagaaacttatttttcgctttagttacagttatttgtcttccactagtgaaggaaggcacgatcgagactttcatacgctttataataattcgtctcacccttcccttagagactccctcaatatcacgtactcatggctttctaacagctgagaaatgatctgcttttcagataacaccatccagtcggttttctgttgctgctgttgctgttcagtgcagaagcggtaagtctacttccgagggcaatttcttgaaaattaattaattccgtttctttattacctgtggagtcaccatgtctctttgcacccgctgttctctctacctgggaaccttctcccattttctccctgtggaatgcctatttgtttacaggtctaggtcaaatttcaggtcatctgggatcctttcctgatcctttagatttcattgttcattccattgcactcccatcgtgtgcggcattgttctccacttaatttttatttcatgtatgttgtttataggtctgtgctccaatacgtattttttccctttaagggcaagaatcctatcttagttatctatctccccaaaactaccagtgtggagaga

SEQ ID NO: 33722 - DNA, 290 bp, Homo sapiens
ataatagcacatctatttgtagcatggtttactgaagatttatacccatttttgagatttactgctcagaaaaaaagatttcctcaaaatattactgctcattgacaatgcacctagttacacaagagccctacaaagagatcaatgttgtttgcatacataacacagcatccattctgcagcacatggatcaaggagcaattttgacttacaagtgttattagttaagaaatgtacttcataaacctatagctgctataaatagtgattcctctgatggacctgtgcta

SEQ ID NO: 33723 - DNA, 512 bp, Homo sapiens
cactcagggccctgctcagtgattggccctgtgatcacccaccccggccccttgttagcggcccctgctccatagtgggcagcccgtggattccctaatgaattctgtcagcccagcgtgcaggagatggacagatagagaggccaaatcccaaagtggatttataagtggaaatccagggataaatgcggggttggcgtaggtgaggggagttgaccacatccactgctaaatctcagattccaagaggagcttaattcgtaaggctatgtgctagaaaagtctgcattagccactttggcgtgagtatatctctaaaaccactaatgaaattgtgctttggtcaatcaacatttctggggccagtggcatgggtaatcactgggcttgcgttgtgcttttagacagggaagccaatgtggtccctggtacacgcagttttcttcaacaccgaacgtttgtttttccatcttgtgggtagtgagcctttcttgagccaaaatatatgtagc

SEQ ID NO: 33724 - DNA, 2567 bp, Homo sapiens
taaacattcagtttattgtatgtcttatacatggcagtcaagctgtaataaaataccggttgaataagcagcaggttctcagtaaatgcataatttatcaagctgtacattttaaacgttcagtttattgtatgtcttatacatggcagtcaagctgtaataaaataccggttgaataagcagcaggttctcagtaaatgcataatttatcaagctgtacattttaaacgttcagtttattgtatgtcttatacatggcagtcaagctgtaataaaataccggttgaataagcagcaggttctcagtaaatgcatatccaatggtgcagagaagtgttcaatgttggctgcagggatgcaaagcaggtgccaataagtgttggtggaattaatgtgcagaataaataagtattcacttattaggtgttcaataactttagagtgaatgaataaatttgacagatatttattgctgatcgtgtgctaggcactatcctaggctctgggaataggttaaggaaccaaacaaaaatccttgtgctcacagagctttaattttagaaggatagcagacaataaaagcataagtaaaatacatatagtgtgctagataggtgctaaggagaaataaggttgagaatggggatagggaaagtcaaggaaggaggttgacatgttagagactgtgtccaccgtcattgaaagggtaatgcttgagaaaggcctgaaggatatgggcggacagagtgtgtgtctagggcaataaaaagtaactgctccagatgttgaagaaaataatgtgcaggagttgaactgtttggaaggagggtgagccccatagaaggagccaccctcgccccctgctgagtcccggctcgctcggcccgcgcgtacctgcgttgtccaccaggaggcgctcccgcacccgccccgcaggcgtcttccgccgccggccggtgcgtgggcacgcgcagaaaccgctaggtggcgacggtttcccttcccacgcgcggacgccggcgtgggccgacgcggccggagcgcccgcgcgtgcgcagagccgaggccaggctgccctcgaagcggggcggggcgaagcggggcggggccgagcagggcggggcgggggcttgaggtgattcccaagccgcggggcggctccggtggtgcggggaaaccgaaagtgggcggcggccgcggcggggcccctggcggagacggcggcaggagctgggcccagagacgcggggacgggccgtgggcccccggaacgaggcaaagatgctggaaggagatctggtttcaaagatgctacgagctgttctgcagtctcataagaatggagtagcattaccccggctccaaggagagtacagatccttgactggagactggatccccttcaaacagctaggtttccctacactagaagcctatctgagaagtgtgccagcagtggtcaggatagagactagtagatctggagagattacctgctatgccatggcctgcacagaaactgcaagaattgctcagcttgtggctcgtcaaaggagttctaaaaggaaaaccgggcgtcaagttaattgtcagatgagagtgaagaaaaccatgccattttttctagaaggaaaaccaaaagcaaccctcagacaaccaggatttgcttcaaatttttctgttggcaaaaaacctaatccagcaccgttaagagacaaaggaaactctgttggagttaagcctgatgctgaaatgtctccttatatgctacacacaactcttggaaatgaagcattcaaagacattccagtgcaaaggcatgtgaccatgtccaccaacaacaggtttagcccaaaggcgtcccttcaaccacctttgcagatgcatctctcaagaacctctactaaggaaatgagtgataatttaaatcagactgttgaaaaacccaatgtcaagcctcctgcctcttacacttataaaatggatgaggttcaaaatcgcataaaggaaatactaaacaagcataacaatggcatttggatatctaagcttccacatttttacaaagagttatataaagaagaccttaatcaaggaattttacaacagtttgaacactggcctcatatttgcacggtggagaaaccttgcagtggtggccaagatttacttctttatccagctaagagaaagcagcttttgagaagtgaactggatactgagaaagtacctctatccccactacctggtcccaaacaaacaccaccgttgaaagggtgtccaacagttatggcaggagactttaaagaaaaagtggcagacctgctggtgaaatacacaagtggcctttgggccagtgcacttccgaaagcatttgaggaaatgtacaaagtgaaattccctgaggatgccttaaaaaatcttgcctcactttctgatgtatgcagcatagactacatttctggaaatccccagaaggccattctctatgctaaacttccattgcccactgacaaaatccaaaaggatgcagggcaagcacatggtgataatgatatcaaggctat

SEQ ID NO: 33725 - DNA, 389 bp, Homo sapiens
gaggttcaaaatcgcataaaggaaatactaaacaagcataacaatggcatttggatatctaagcttccacatttttacaaagagttatataaagaagaccttaatcaaggaattttacaacagtttgaacactggcctcatatttgcacggtatgtttttccttattcctcccttctgatacctcctccctgcccaactttgagatcttgagttattagtcatatcaccttttatccccagaagacaaagcactttacatatgttacctcattaatctttatctcttaagattaacatatgtcagttcttatttatagaagtatgtcaaagttgaaggttctcctgtgttgtaattgctatttttatatattttgttttatgtcatttt

SEQ ID NO: 33726 - DNA, 292 bp, Homo sapiens
agctttttaatttttaaaaaactctataaaggacaaaaacacaagcacttttttttttggcccacgttagtgtaacgtgagttgccatctcagacggaactgtagtaataacaagtcaaagcatatcaagctgcttttcccaaaatgatgaaaccagagccatgtattttctgaagtatctttcacatctataacagatactcagaagagagactaattctctcaaagtctcttcttactctgatggagatttggagagaacacaagaggaatcagagctaaatgcttttgt

SEQ ID NO: 33727 - DNA, 728 bp, Homo sapiens
gacccttttcacaagatggtgccgaaagtgaagaaggaagctcctgcccctcctaaagctgaagccaaagcgaaggctttaaaggccaagaaggcagtgttgaaaggtgtccacagccacaaaaagaagaagatccgcacgtcacccaccttccggcggccgaagacactgcgactccggagacagcccaaatatcctcggaagagcgctcccaggagaaacaagcttgaccactatgctatcatcaagtttccgctgaccactgagtctgccatgaagaagatagaagacaacaacacacttgtgttcattgtggatgttaaagccaacaagcaccagattaaacaggctgtgaagaagctgtatgacattgatgtggccaaggtcaacaccctgattcggcctgatggagagaagaaggcatatgttcgactggctcctgattacgatgctttggatgttgccaacaaaattgggatcatctaaactgagtccagctgcctaattctgaatatatatatatatatcttttcaccatatacatgcctctctgtcaatttctggttgggctgggaggccacacacagacactgacatgacagggcttgggcaagactcctgttctacttatccttttgaaatattcaccctgccactccaccatgtgtgatcactccagagatctttgtgactagagttagtgtcctaggaaaaccagaactcagaac

SEQ ID NO: 33728 - DNA, 1010 bp, Homo sapiens
ttgttccatgaatgaatgaatccttgtacacaaacggtgttagggaatgcaaaaaaccaatgaagattctgccgatcagcagagcgttcaaacactgaactggaattgtggtgctctccaatttttgcttaaaaagactcccttggcaaattgtaatcttatagaacccttattttatacaaaaggtttttttcttcctttgaaccagtggctgggattaagactgaagaggtctataaataagcagggaatttacataaccagagattggtctcagtaggcctcagatcccattacagaaaaagcaaacgagtttttggcattttagttctaccaaactctgttgttattgcaattacaaagtttatatctattttaaccatgtatccatgtctgcacttgcacatatacatacagacatagaggacctcagttcatgctaaatcacttgttgagttctaagtatttatatataaaaatggcaggttcagttgcctcttggaatcctaagggaatggaagaaataaaaaattaacctctcatcttggaaaaaccttttaaaataatatttcaccaatttagcaaacctgtatactcatgttaactctataatgatttgttttgtttcaatattttcaaaatggcctctctacattcttgctggttaacagtcctggctgaggctcagatctatcctttcctgtacacagatataggcatttgctcacttccagatattccacaaagtaaccacacttcaaagatggacaactttgcagctgggctaccatttccttctcctgtcatttacatcaggcaatatttcataaaaggattacctcctgtagctggaaggatagttagagattatgtagccatctactcattttgcagatgaggaaacaaggattccagagactgatacaggatttctatgactttttcccctttatgcagatttgattgcctcactataaatttaatccttatatttcatgattactgctata

SEQ ID NO: 33729 - DNA, 424 bp, Homo sapiens
gcacgagcttaactatagtggaattcttttgctgtgagactttgcatggttgtgtgaaagccacttattattccaccaaaactgtctgtttctagaacctataaaatgtaaggctccaggaaatccggaaaatggccactcctcaggtgagatttatacagtaggtgccgaagtcacattttcgtgtcaggaaggataccagttgatgggagtaaccaaaatcacatgtttggagtctggagaatggaatcatctaataccatattgtaaaggtatgtttagtaaatttaccacgtttcttatgtttggcaatcctagaaaggtaaggcgtagacatatgaagtgttatgttgtatcaatgttctttgtatttgaactgaggtattaggctcatgtttaaacatgaccccacacacacacacca

SEQ ID NO: 33730 - DNA, 249 bp, Homo sapiens
atttaaaattccttaaattgcattcaggaaataaaattccttaaattgcattcaggaaaataaaaaaatttaggcttggaggctgagcgtggtggctcatgcctgtaatcccagcactttgggaggtggaggtgggcagatcactttaggtcaggagttcgaaaccagcctggcaaacatggtgaaacccatttctactaaaaatccaaaaaatagccaggcatggtagctcacacctgtagtcacagc

SEQ ID NO: 33731 - DNA, 125 bp, Homo sapiens
gattagagggggacaagactggagccaggaatccatataattggctattgtttaattgaggcaagggaagatgatagtatggtcttagaagtgcctacatgaatggagggttgaattgacaggat

SEQ ID NO: 33732 - DNA, 300 bp, Homo sapiens
tgaaaaaaggtattatcaatagctaaagttattatttcaaactgccacaggcagttgtagaggaaataaaaggtactctaaataaataaaaggtaatatatacataataataatatatatatgtctcatacacacacacacacaaacaaaacctaagtaatgcatatcaccaacattgcaataatatctcagaattagaatcctagatctagactgaaagcatggtgtaaatgtatgaaggcaacaaaaacagaggtataggtggcagggagacatacagaaaagaacaccaaaataaag

SEQ ID NO: 33733 - DNA, 344 bp, Homo sapiens
tgtcacctctaaccaaagggcctccccagatgcctagcctggtccaagcgttccatcaagagtcagtaccagcgtttattgctgtccagtctgtgcaagctccatgctggctgctgggtaagagccaagggcagccaggcctaatggctcatgcctgtaattccagcactttgggaggctgaggctggtggatcacctgaggctgggagtttgagaccagcctggccaacatgttgaaaccccatctctactaaaaatactaaaattagccaggcatggtggtgggtgcctgtaatcccagctactccagaggctgaggcaggagaattgcttgaaccggggag

SEQ ID NO: 33734 - DNA, 485 bp, Homo sapiens
caagacattgtgattttgaccttgttggatgctgcacctaaaggtggatggaagaggaagagtcttgggggctaccatcctggctggagaagctggcacgaggctccctcttgtggatgcagcaagtctgagggccaagggaagagaagagtgacatagaatctcctttccttgagatcttagaatcacgcctgcctccttacctccatccaggactgttaaaaatctcccaaggcagagacttttaggcctacatgtacttagcctcctcttcccacctcctgttcatctctgtttccaatgttccactgccatcactgccaggaagttctgcagagaagaatgaagaagaaccgtatgatcctaaacatgttctttgaagatattatcaacccaccattggccttatttactggaatgtttttataacctttatttgacacctcttcccatcatttaaaataaatctggtgcttccctgaaaa

SEQ ID NO: 33735 - DNA, 939 bp, Homo sapiens
aatttactctacctcagtcctaattagtggtagtatgataagagatttctgctccaggaataggacgtcttcctttctttactccaatagagcagcggtgatgtcatttctgtatttcaggaagactggcagacagttgctttgattcttcctcaaagtatttaccatcagctacagtccaaaattgctttttcttcaaggagatttatggaaaagactctgacaaggactctggaatacaagctcctgataacttcaagatcataccactggactaagaactttcaaaattttaatgaacaggctgataccttcatgaaattcaagacaaagaagaaaaaaaactcaattttattggaataaataatcaaaaggataatgttttcataattttctatttgaaaatgtgctgagtctttgaatgttttattctccagatttatgaacttttttccttgaacaattggtaaagtatacttttgtaaacaaaaattgaaacatttgcttttgctgagtgccccagaattgggaaactattcatgagtattcatatgtttatggtaataaagttatttgcacaacttcagtaaggatctgctctctttataacaggacacatttgaaaacatcggttatattaccaaggctttgactgggatgttatatttgagaatatacatagaataaacccatagggaatgcaggcaaagtctgaagttgcccttggtttggcttcctagtctcaagaggtttttggaagtttaatctgagattcttattaaaaacttctagcaaagcgaagtttaaaaagagcctctatggtccattgctactcttgccgcacttaggtaaaaagtctgggcaagttcggtgagactcaacctattttgcaaacaaattcatcctactggaattatctttggtaaaaatagagactcc

SEQ ID NO: 33736 - DNA, 945 bp, Homo sapiens
tgcggggatcagtgcgcctctccctctctcccctcccccaccaccttactgctaacactccaggaataggacgtcttcctttctttactccaatagagcagcggtgatgtcatttctgtatttcaggaagactggcagacagttgctttgattcttcctcaaagtatttaccatcagctacagtccaaaattgctttttcttcaaggagatttatggaaaagactctgacaaggactctggaatacaagctcctgataacttcaagatcataccactggactaagaactttcaaaattttaatgaacaggctgataccttcatgaaattcaagacaaagaagaaaaaaaactcaattttattggaataaataatcaaaaggataatgttttcataattttctatttgaaaatgtgctgagtctttgaatgttttattctccagatttatgaacttttttccttgaacaattggtaaagtatacttttgtaaacaaaaattgaaacatttgcttttgctgagtgccccagaattgggaaactattcatgagtattcatatgtttatggtaataaagttatttgcacaacttcagtaaggatctgctctctttataacaggacacatttgaaaacatcggttatattaccaaggctttgactgggatgttatatttgagaatatacatagaataaacccatagggaatgcaggcaaagtctgaagttgcccttggtttggcttcctagtctcaagaggtttttggaagtttaatctgagattcttattaaaaacttctagcaaagcgaagtttaaaaagagcctctatggtccattgctactcttgccgcacttaggtaaaaagtctgggcaagttcggtgagactcaacctattttgcaaacaaattcatcctactggaattatctttggtaaaaatagagactcc

SEQ ID NO: 33737 - DNA, 1038 bp, Homo sapiens
ttaatggcgatgttgcagcgatcatagacaaaagcattttatccctcagattactctcagacagcataatgggctctatgcgttgctcagctcgttactcagccactggcgaggaaagctccacatccttgacaatcagagtcatagctcctccccgattaagaacttttgctttcaataatccaacgtagcagccgtgatgtcatttttgtatttcaggaagactggcagacagttgctttgattcttcctcaaagtatttaccatcagctacagtccaaaattgctttttcttcaaggagatttatggaaaagactctgacaaggactctggaatacaagctcctgataacttcaagatcataccactggactaagaactttcaaaattttaatgaacaggctgataccttcatgaaattcaagacaaagaagaaaaaaaactcaattttattggaataaataatcaaaaggataatgttttcataattttctatttgaaaatgtgctgagtctttgaatgttttattctccagatttatgaacttttttccttgaacaattggtaaagtatacttttgtaaacaaaaattgaaacatttgcttttgctgagtgccccagaattgggaaactattcatgagtattcatatgtttatggtaataaagttatttgcacaacttcagtaaggatctgctctctttataacaggacacatttgaaaacatcggttatattaccaaggctttgactgggatgttatatttgagaatatacatagaataaacccatagggaatgcaggcaaagtctgaagttgcccttggtttggcttcctagtctcaagaggtttttggaagtttaatctgagattcttattaaaaacttctagcaaagcgaagtttaaaaagagcctctatggtccattgctactcttgccgcacttaggtaaaaagtctgggcaagttcggtgagactcaacctattttgcaaacaaattcatcctactggaattatctttggtaaaaatagagactcc

SEQ ID NO: 33738 - DNA, 397 bp, Homo sapiens
agagagcagaaaagaggaagagggaaaagagtgccactcccttcccttctgctttcatgaggcagcccccgccttgccatttcacccccacatatacatttcatcttgcacagcctttgccagagctcagatggccacacccagccagagagagggtggtaaatgtagtctttccagtggaacatccgtaacattgaataacatatgccatgttctagggaggcagagggactggctatttgaagatattttgcaggatatgtcataatacgtaacctattcctagcaatagtacatgctttaaaacaagcaattatgatagctttaatgaaaccacagataaataattcccatattttatagagtgctcaggtattttgaattgagaaaatgattt

SEQ ID NO: 33739 - DNA, 431 bp, Homo sapiens
tttctggcagaacaacctttcccaaacatagaactagtcatgttactcctatgattaaagtctttcaataactaactcccagcacctacaaaataaagttcaaatcccagatgtgtgacatacaatacccttcacaacgtgggcctccagcctcagctcaggccatgacaccaactgaaatcacaacctgccttgagctgaatgcagcagaggctgctggttgcccatctggacatcattctctctttctccttagtagcagaaaactttactcaggaggccatgaatcccaccgcaacaccacatttctcaccttccctggtagttatgtatgaccttgtgcctaagttctgacaaatgggactttcaaggtgaaggatgctctttttctcccaacaccctctctttcctcctgctgactacaattcaga

SEQ ID NO: 33740 - DNA, 359 bp, Homo sapiens
gtacaactcctaacagaataataccagtacagcactttaagatgatagcaaaagactacagaacagacaaaatcgaacttaataatgaactccaggtagacttagcctgaaaactactcccttcaaatttcccttgttgctccaaatatgcctaaaaggattttgacactgactcttaggtgccaattaccccctgcctcaatgtgggatgagaacaaaaaccaaaataggtccatcctagcaccaagggccatcaaaaccaaacttaaagatgattgatcagtgatgcttttggaaaaagatctggagcacaaaagggaaacgtgaaagttgtctgaatcaaaatggagtcactagta

SEQ ID NO: 33741 - DNA, 191 bp, Homo sapiens
  misc_feature (51)..(51): n is a, c, g, or t
tctttctagccctttctagccctttctagccctttctagccctttctagcnctttctagctctttctagcccacaccttggaaactgaatccctttccttcatcgagagtttccaaagactttacactttggatatattatgcctgatctaacaataaaacaatgcatagatatctccccaaaaaaaaaaa

SEQ ID NO: 33742 - DNA, 949 bp, Homo sapiens
tgagagcctccaacaaggtaattttaaaatagaggctgtcatttccttccagtgtgggttgatcttagatatatacttataacgaatcggcaaagtgacactgtgatttctgagttagaaaaaggtaatattccttcagcctagggttctgtctttctctcctgggacatgtgtctttgacaccctgagccaccatgtaagaagtccagctaccatgaagccgtcatgcagaagagaccatgtagagacatcacacagagatagagggaggcacccaggagccccagctgtttcagactccagatatttggatcatcctgcgcgggtaccagacatgtgaatgaagaagctcgtgagatgactgcagttccagctaccatcggactgcaacatcacgggacaccccaacccagaaccaccccactgaatacttcccaaacaccaacccacatgaaccatgagagataataatgactgttgctgtttcaagccactaaaaaaataaaaatatttttttaaaaagtagaggctactgatggttgaattgaaatgatgtgtctttatggtaggagctcaataaaaatcttagatctcttgttgacagtgcataaaagttaccagtagaggtcatacttgattaatattttcatatcctcttttctgtaagtatatagcttaataattattattcagtatatgaatataagctcagtaaaactgtatcttggattgttacaagtggtctgtttgctaccttctgtgaattaccaactactgtgtaaaaaataagtactggcttagtgaaatatttaccattaaaaccatactgagctgggctgggtcgcatgcacctgtagtcccagctactcgggaggatgaggtgggagaactgcttgagcccaggagtttgaggctagcctaggcaacacagcaagaactcgtctctaag

SEQ ID NO: 33743 - DNA, 374 bp, Homo sapiens
aaactgggtccactcaacatggtgattcccaccgtcttctccttgttaccacctgtgcaaagtgtgaaggccacctccaagtaacaccatgtgttcaaaccatcatggcaacccacatttgcatattaaaaggctatggcgggagggcctggtttctcccaggctacatgaataacacacctggtcaagccaatcctttgggccctatgcaaaccagatactgcctcctccagcctccagatataagggactgtctttctgttgcgcacagggtctatctctgttcctttcccatgtctcagtacgggggagctgttctcttctttcttccttcttacttgctattaaacttttcactccttaaaactactcca

SEQ ID NO: 33744 - DNA, 108 bp, Homo sapiens
gatattgcaggtttggttccagaccaccactatactaaagcaataaagcaatcatggattttgtttcccagtgtatgcaaaagttatgtttccactatactgtagtct

SEQ ID NO: 33745 - DNA, 310 bp, Homo sapiens
ggtggaatattttcctcctgctaagctctactttacttctctgtagaatgggggataataattatacttatttcttagggtagaagtgaggactcaaagcagctatccatataaagagcttagcccagggctggcatatattaagtattcaatacatgttacctatgacttgaatttaattattattaggagtattggtgtatacatcagtaattgccacagtttttacttttgcattaaaattcagattctggccactgcactccagcatgcgtaacagagagtgacctctctctctcaaaaaaaaaaa

SEQ ID NO: 33746 - DNA, 412 bp, Homo sapiens
cttaatgtgtagttcaagaatcataatagttacttccatttcttcttttccatatttcgtgcttttgttgtcatgcattttgagttgaagtgttctttctgctttgtcaggcagttaccttttcaagcaattaaaagtgacaaaaatactgtaatcccagcactttgggaggctgaggtgggtggattgcttgaacccaggagttcaagaccagcctgagcaacatagtaggacacagtatctataaaaaaataacaaaaattagccagacatggtggctcgtgcctgtaattccagctactctggaagcttaggtgggaggtattgcttgagcctgggctgtcgaggctgcagtgagcctagatcatgccactgtgcttgagcctgggtgacagagagtaacaccctgtca

SEQ ID NO: 33747 - DNA, 326 bp, Homo sapiens
ctcgctggcttgatgcgactaacagaaaagccactttcagaatgcctcgcctcacccggggcccagatatttacatagtggcctttcattctgcgaacagtgtgtgcctctgcaaatattttaggcctccctgcatgcttgcgggcccctacgtcccattcaccagcttttaagtttgttttgcaggcagggagccactgagagggaggcctgactcagagcacagggggccctgctgtctctgccgccgcctcctgccactgcagacttggcggggaaggaagcagtgggttttacagctggtgtttttggtttagcaaaaaaaa

SEQ ID NO: 33748 - DNA, 971 bp, Homo sapiens
cggccgcccccaaccccccggggtctcctctcctgcggggggactggagaagctgggccatcgctggtcttagggaggcagataatttagtccctgggtcgttgtgtttatagctcggggaattgaaaattgttctgtaacgcatcgtaaattaatctttccgacgttgtaaattccaaaaagcatttggtttgttagaaaaaacctgttttctccgctttataaaaacatttgaagccatgctttatattgaactcttaaggagagtattaggaactcgtccgttcaggttctaacttgttggtgttaagtgtctggattaaagactctctttttcgtgtgccgaagccatgatttctcaaattcattcagttgtgtcatacaggaaaaggaagcaaaaatttcagctttatttttgttttccggcttaggcttggttgggaagatttgatggtggttagacacgtctgcccttatttgcctgtttagaaaaacctattctaatgacaaaaacagttacattgctcccactattgtcatggttacctgaaggcaaaagtttactcaaagcttctgagattttatgttcgtttatttgcttctctttttaaaaaaatgtcagctgagtttcaggaatgagtagtctgtcaaacaagagatgaaattagaagcctggatctaagggctttggggaagtttcggttgagttcccctttcacttgtgtcggtgctgtaggactcggggtggctccagctggcgtctggcccagcagagagctgtaggggcccgctctggttgctggctgtgtggactctgagggacacccctggcgagggtgttaatgagcctgcagcgtctgagtccacccaccctcagactggcccctgactcactctgcacctgccatatcagcctccttgctagttctgaacagagccacatgctctgtccttggatcttcctggaatgc

SEQ ID NO: 33749 - DNA, 382 bp, Homo sapiens
gtatcatcttctcccttttactgatggaaaagttgtagaggagcagaacttgaactagggtttatctcaatatgttttgatttgtgggtcactacccattgttggattaatgggtgctaaatgtatttagtgggtcataactaacatttattttaatggattggtttgggatggaaggaccagagtacatagcatgtaatagaagtattatttgctgaaacttttgtttcatttacatacagacatatagagagttgcaatatatttcttactgtgagtcatgtcagaaaacatatgaaagccactggtttgttcaaatcccaatctgttcttctattttctatactgtctcctcaaaaaaataaatttcccaaattatttc

SEQ ID NO: 33750 - DNA, 416 bp, Homo sapiens
acagggtaaaaatcctattgtgttttgtgaccttcaaaccgttaagttcccaatttagaagatggctttgatcctaacttagggatatcttgcctaggcggaaagtgccaggctaagcctccagtaaataaatcaataagcatcatgagatctacaatctggaatcagacagtttgcttgattgctgagatagggtctatggcagatcctatgttttgtgttcttcagcccccatagagccttgagaagactgcagctctagccaactgcttgactgcaaccttgtgagagaccctgagctgagctaagatgctccttcctgcctggctcccagaaattgtatgagataataaatgtttgttgttactcagcaatagataactcgtgcaataacatgcaagacattttttaaaagg

SEQ ID NO: 33751 - DNA, 1602 bp, Homo sapiens
gtagaaagaacagattcgtcatgaactgagttttctaccatggcttcttacccagcagagaaccaccgtgatggtttactcttaaaaagggaaggaaaaaaaaaaaggatttcaacagtacattacaatccaagatattaacataggaagcagtggtctgtgtttttctcaattttatttttaaaaggagatgtattaatgtgaaaggtttcttctacttttcctctatctcttcacctcctctactttaagtggagatgggaaaaattgtgtaggatgcagccccacgccagcagagcccagcaataactttagatctaccagtcaaatcttgtcggctattgctctgtgcctctgttacagaagcattaatgttaattgccttccccagggatacaaagaagtagaagtaccaaaggaaagggtagatatttaacagatgcctcagtgataagaaagatgcctccttgtgtctcactgttttctagcactgaaacatgatacactttgtatccacctgcagaataaagcaatccagacaggcgctctgtaacttagacatcacttgattaaaattatagtctccaaatatagtgttttagaaaaggcactgcacatttttagaggcacgtgaatgtcattcccacctctaacccatctaacatcggtgagatgttaagaaaatgtgccgatgttactgtgaaataaagatgcctgtaattaattgtaggcatcacacacatgcgtgaacatccagagttaggtctcaaggctcttctggttctaagtcctaacaaacaatgatcttttcagtgaactgtagaattctggaaagaataagcgtacctccaggctgcttacatcaatagcttacacgtgcttcctgatgcctgccttaacaacaaaaaattcgtgtccatagcaaatatttattgcatgcccactctgggctaggcactgttttagaggacaccgcagctatcaaggcagatgtggtccctgttcccatgaggctcctacatttgagtggaggaagatgtacttgtctacgttgggtgatgattagtgccatgaagaacaaaacggatacagtgagtaatgtggacagggctatcttagctatcactctaataaggtgatatctgaggagagatctgaatgaagtgaggatacaatggatatccaaggaaaagagcattccagcaaaggaaaaaacacatgcagagaccctgaaggagaagcagggtcactttgtcaaagggacagcaaggaagccaatgaccgggtgaaatgagtgaagagagcgttcagagaggacagccaaaagctctgtgggccacggcaggactttgtcccttgctgagcaagatgggaagccactgaatgtttgcgggcagggtagtgacatgctgtgacttatgtttaaaaggattactccttcatagcgatgaagaaaagctctataacaaaagttccgttgtggtggttatacagcattgtgaatgtacttaatgccaatgaattgtgtactttaaaatggtaaattttatgttatatatgttttaccacaataaaaataatttttttaaaggaaaaaaaaag

SEQ ID NO: 33752 - DNA, 845 bp, Homo sapiens
ctccaggctgcttacatcaatagcttacacgtgcttcctgatgcctgccttaacaacaaaaaattcgtgtccataggtgagtattagggtatgttcattgtatctcaatgaaactagtttttaaagttttcaatgcatttgtttgagatcaattaatatttggatacctatcatgacccaggatatttctttgttcagcaaatatttattgcatgcccactctgggctaggcactgttttagaggacaccgcagctatcaaggcagatgtggtccctgttcccatgaggctcctacatttgagtggaggaagatgtacttgtctacgttgggtgatgattagtgccatgaagaacaaaacggatacagtgagtaatgtggacagggctatcttagctatcactctaataaggtgatatctgaggagagatctgaatgaagtgaggatacaatggatatccaaggaaaagagcattccagcaaaggaaaaaacacatgcagagaccctgaaggagaagcagggtcactttgtcaaagggacagcaaggaagccaatgaccgggtgaaatgagtgaagagagcgttcagagaggacagccaaaagctctgtgggccacggcaggactttgtcccttgctgagcaagatgggaagccactgaatgtttgcgggcagggtagtgacatgctgtgacttatgtttaaaaggattactccttcatagcgatgaagaaaagctctataacaaaagttccgttgtggtggttatacagcattgtgaatgtacttaatgccaatgaattgtgtactttaaaatggtaaattttatgttatatatgttttaccac

SEQ ID NO: 33753 - DNA, 509 bp, Homo sapiens
ttgcatctggatatccagtctgcccaacaccatttattgaagaaactttccttacattgtgtgtttttggcgcactagaaaaatattagttgaccatatagattttcttgaataaatatgtcttcatttcctgtatgcccttaggaaatttacagagactttaaataggtgctagtttttaaaaataattttcaccagttaaagctgttttgtatgggagcagctttgagctcctcacactgtcattccagaagttgtatctctccaattatctgtagaagaaatttaactgattagggtaaaataaacaaattaatgtaaatgcaaagagaacaaacctgaagtctaactaatttggtcattaccagtaattattatttacagatagatttatttgtagttcattaactgcaaacttgcttcatttgtgtgctgtaactcattaatcagaaagctgcattgagtgatgggactctaatgtggtttgactttttaaataaatttcaaga
